United States Patent Application Publication US 2005/0208558 A1 - sequence listing, part 36

SEQ ID NO: 40250 - DNA, 1460 bp, DROSOPHILA
acatttttaaaacaagctaaaccttaaacttacattggcaatggaaaaggaaaaaaagaaatctcttttggaaagatacaacataccaattcactatttggacttcgcccacgtggaaaagtgcacaaatgctcgcgaaatggagaaaatcgtccaaatcctgcgctccggcgaggaaggacattatccggacttgcaacgctgtgcggaggaaaaactgaaggcactgaaaccggatagcaagctatttcgctatgaggaacagataaagcaaagcactgacctggacaaaaccgaactaaagcccattctggattggactgacgccataaaaacaaaggacaatgctctcaatgagctgaagaaagttaagcagaatttgaatcttccatctgtgcgtaaactttcgaaaatcgatttggagaaggaaagtaaaactgaaaaacccaagccagcgccaaaggctacatctccgtccaataccaagaataaggaggctcgaatcaaatccaccgattacagaaaatgggataagtacgatcccgatgaggagatactgcgcatggatttgaacgaggaacgcgaccaggagcaaagagagaaaatcatttccaatcacagtaaatcggttaccacggataagctacagagcgaaagagattctctatatgaacgcctccaagcacagctaaagaacctaagccagctggagaaggagcaatttgctgaaagacatcgactgcgtggcaatgagagcttcaaggcaaaggaatatgaaaatgccattgaggagtacaactgttcaataatatacgatccggagaatgcagtacacgcttacaataatcgcgctgtcgctcgtaaatctcaagttgaagaaatacttttcggccatatcggactgccaagcctgtctgcagatcgatccaatgaatattaaggcacaccttcgaatggctgaggcccacaatgccgaaggaaaacatcttgagtccctaaatgtttacaaaaagctcctcgactttgagccagataatgccattgccaagaaggccgtcgagaagctaacttcaatgctgggtgaggtggctccgtcctctgccacacgtttgataattgaggagatcgatcctccgcaactgaagacttccgaacccaagaaggaggctgagaaaagtgaaccaactgtggtcaagaaacccgaaccagttgtctcggcaaagaagccaccacccattaaagactacgatctagccgagttggtcaagccgaatcgcatggtgaaaagtaacttggtgtcagccgcagaagccttgggaaataagatgcaggccagcaagggaggtgcacctaagaagccacaaagtcctcctatgacaccaaaggaaaccttactgcgtttgccacaggacaaccttaacaatagcaataaacttcttatacaggaaatttagaataaa

SEQ ID NO: 40251 - protein, 299 aa, DROSOPHILA
MEKEKKKSLLERYNIPIHYLDFAHVEKCTNAREMEKIVQILRSGEEGHYPDLQRCAEEKLKALKPDSKLFRYEEQIKQSTDLDKTELKPILDWTDAIKTKDNALNELKKVKQNLNLPSVRKLSKIDLEKESKTEKPKPAPKATSPSNTKNKEARIKSTDYRKWDKYDPDEEILRMDLNEERDQEQREKIISNHSKSVTTDKLQSERDSLYERLQAQLKNLSQLEKEQFAERHRLRGNESFKAKEYENAIEEYNCSIIYDPENAVHAYNNRAVARKSQVEEILFGHIGLPSLSADRSNEY

SEQ ID NO: 40252 - DNA, 3045 bp, DROSOPHILA
tacgagatataacagttaaatgaaccgatgcagcaatgtcgtatgaataacagaaacatatatcttaagtataaatgagtatatatatagcctatatatacacgcatatgtatatctgataaatgagaaatcgctaaactgataaaattaaacctaagtaaaattaaaagaaaatacaaaacacggaaagaaatggaactaataaagagaattattctgagaaatataagccacctgactttcaattgagcgaaaaagggtgaatatattattaagtgtgttggccgaaaatatattttcagttctttctttattgtatcattgcaattaagatcacctgcttttatttagcattttaagattgattctgatgcttcataatgagaactaatggaatgatcaacaactcagcccactgcaatctctgattgtgcgcaatagaatattttttagataagacgtggtccggggtatcaagcaaaagcaactgtaaacatatatctgcggttggggaactccacagtgaaccgtctctcgagatcagttctccactggtcttcgtagagatcggtccgctaaaagtaccttctaaaaattccttttaaaacgtgagaagagcaaatattcaaagcgtgacccacattgaaagctgtgaatatgtcaaccgtacagaccggtgagtttgaatcccggggagataagagcttatctcagctcatcagataatgaaattttccgctgtttttgcatccagttctgggcaccattactcccaatctgctgggtcgaactttgacccacgaacatgtcgccctcgatttcgagcacttctatcgcccaccgcctccggatttcgagagcgaactgaaggcgaagatcagcatgtccaccctgggctatgtgcgtctatatccgtattccagcaaggagaatgtccgcttctacgatggagaagccctcgaggcggccaagaaggatgtgctgctctacaagaagcacggtggtggcagcattgtggagaacagtagctacggcctgaaacgcaatctggagttcatagtggagctggccaagagcacgggtgttcactttattgccggcaccgggcactacatccatgccatgcaggatgccagtcatgccagcctaaccgtggagcaaatgagcgacttgtactccaaggacatcatcactggactgcaggtcaatggcaaggtggtcaagtgcggattcattggcgaggtggccagcgtgtatcccattcatggtaggtctgagcaaagtctattaagaatccaaatatatatactgatatattattttaagattttgagaagaatgccatcaaggcggccggtgagattcaggaagtccttggctgtggtgtttctatgcatccgcatcgtgttaccaaggctccttttgagatcatgcgtctttacttggaggcgggtggacgtgccgacaaatgtgtcatgtcgcatttggatcgtaagtaatatagtctcttaaacatacccagtttgattgaacgttccatattcattaggcaccattttcgacatcgatgagctgctggaattcgccaagctgggctgctacattcagtacgatctctttggaacggagtgctccttctatcaactgaataccagtgtggatatgatctccgatggccaacgtatcgacaatctgataaagctgattaaagagggtttggtggacaagctgctcatgtcccacgacatccatacaaaacatcgattggtaagctaaaattaactcgattgtaaatctcttctatatatatctctatttatttagacctcctatggcggtcatggctatcatcacatccataccaacatcctgcccagaatgttcgatcgcggagtaactttggagcaagtggagcaaatgacggtcaccaatcctgcaaaatggttggcctttgacccctaaacctaaaaagtttgttattctggtagcatctcttatcatgtttttcttgttgataagattagcgcggttcttttggcaataaaaaatgggcgtgtcttcgaactcaagctaatcactttgtttttattacaaaacacgaaaatgggggctcgtacgattttttttagatgcaattagaaagtgattaataaaaacttgggcgaccacaaaaataagtcctctacctttgttctatatcagttgattaaatatatggatatataaagaaaaagtatgtaatagaatagaacttctcggtcaacgaatttctaaaaatttccaatattttagaatatttccactgccgattagagataagtctccgaaatccttatcgttttcggcccactttcaaaccacgtacttaacttcccgtggacttgatatcctatcggcatcgggaacagttccgatggatgttgccaaaaaaggaggaaaacgggtgaaaacgttatcgttgttattgtttcatttaaggttgccagaacaactcttatcagctcgtcgtcaggccaggccccataaagtgaccagccggcaattgaaacgcaaaggtgccgtatttacgacccaatggagtctcctcatccactcatccactatatataccagttccgattattgtcgcactcatcagtattcggcgagctgtttaacccggaggatcctagattgatttttttttgcaatgtcccaggcagtgaaaacggaaacgcccaaggaaccaaatgttgtggctgccaaagccaatggcggcaccgctgtcaatggaaagttggaagcccagaagagaccccggcatgtttctggtggtgtggaggaaatcatcgatcccttttgcaatccggagaaaccgcaacgcatatccttccatgacgtcacatccgctgcctttctcatccgcggtggcgtggaacgcactccttgtccggtagatattcatgcaattgatattttggagtcccagattaagtgattgacttacagaaatccacatcatcggatctatatggcatggagttatatctgaaaaaggatttccta

SEQ ID NO: 40253 - DNA, 1077 bp, DROSOPHILA
gtccgctaaaagtaccttctaaaaattccttttaaaacgtgagaagagcaaatattcaaagcgtgacccacattgaaagctgtgaatatgtcaaccgtacagaccgttctgggcaccattactcccaatctgctgggtcgaactttgacccacgaacatgtcgccctcgatttcgagcacttctatcgcccaccgcctccggatttcgagagcgaactgaaggcgaagatcagcatgtccaccctgggctatgtgcgtctatatccgtattccagcaaggagaatgtccgcttctacgatggagaagccctcgaggcggccaagaaggatgtgctgctctacaagaagcacggtggtggcagcattgtggagaacagtagctacggcctgaaacgcaatctggagttcatagatgccagtcatgccagcctaaccgtggagcaaatgagcgacttgtactccaaggacatcatcactggactgcaggtcaatggcaaggtggtcaagtgcggattcattggcgaggtggccagcgtgtatcccattcatgattttgagaagaatgccatcaaggcggccggtgagattcaggaagtccttggctgtggtgtttctatgcatccgcatcgtgttaccaaggctccttttgagatcatgcgtctttacttggaggcgggtggacgtgccgacaaatgtgtcatgtcgcatttggatcgcaccattttcgacatcgatgagctgctggaattcgccaagctgggctgctacattcagtacgatctctttggaacggagtgctccttctatcaactgaataccagtgtggatatgatctccgatggccaacgtatcgacaatctgataaagctgattaaagagggtttggtggacaagctgctcatgtcccacgacatccatacaaaacatcgattgacctcctatggcggtcatggctatcatcacatccataccaacatcctgcccagaatgttcgatcgcggagtaactttggagcaagtggagcaaatgacggtcaccaatcctgcaaaatggttggcctttgacccctaaaataaa

SEQ ID NO: 40254 - protein, 327 aa, DROSOPHILA
MSTVQTVLGTITPNLLGRTLTHEHVALDFEHFYRPPPPDFESELKAKISMSTLGYVRLYPYSSKENVRFYDGEALEAAKKDVLLYKKHGGGSIVENSSYGLKRNLEFIDASHASLTVEQMSDLYSKDIITGLQVNGKVVKCGFIGEVASVYPIHDFEKNAIKAAGEIQEVLGCGVSMHPHRVTKAPFEIMRLYLEAGGRADKCVMSHLDRTIFDIDELLEFAKLGCYIQYDLFGTECSFYQLNTSVDMISDGQRIDNLIKLIKEGLVDKLLMSHDIHTKHRLTSYGGHGYHHIHTNILPRMFDRGVTLEQVEQMTVTNPAKWLAFDP

SEQ ID NO: 40255 - DNA, 5125 bp, DROSOPHILA
caagaaaaaatatgtccagcagtggtttttgaagttttaaatttcgcgggcttcgcatttaagtgagaccttttttgattgggttttaactatgaaccgatactactgcacttctgatctttctcttatttacataaaatttcttttggttactaattttttcaaagttaaaaaaaaaaaacaagttttaatctcttaatttcgttgaaaactatttgagttgttatatttatttggttttatgtgtgcagtgggaacaagttaaattattgtagatctctggtcacactaaaccgcgagtgttttttgatactggctttcgataagatgaagttaacttatattttgttaatctgcgcttttgtggccgcctccgctgccagcgatccgaaagtgaagattggcattaagaagcgggtggagaactgcacccggaaggccaagggcggcgatctcgtccacgtgcactacagagtaagggaaatcagataaggaagatctctagccgacctaaccccgaatttggaatcattctagggagcactgcaggatggaacagagttcgatagcagctactcccgcggcactcccttctcctttaccctgggagctcggcaggtgatcaagggctgggatcagggaatccttggtatgtgtgagggtgagcagcgaaagctgacgattccgcctgagctgggatacggagccagtggagcgggtggcggaaagattccccccaatgcggtgctcgtcttcgatacggagttggtaaaaatcgaaccgcgctctggatctgaagagctgtaaagcgaatagggccacaaataggcattccatgctacacccaaagtttactttcaactaaagtcataaacatttaatgctcaaatatttaaagtagtaatttgtcttgtttctgaagtgatgccacgccacgaccaataaataataatgtcattccttttatactagaccaaattgtatttattgcaagagccccttacttttggcgtctcagccacgcttccacctcgtcgaagtgacgccgcatcaaccgatgcttctccagcgtgctgctctggatgaagcgctcgccacaggtgccgcacacgaaaggacattcgccggtgtgctgctggagatgaagcttcaggtccttggcctgacggtaactcttctcgcagtaggtgcatttgtgcggctttaggccgctgtgcgtaagcatatggcgcttgagcttatcggagcgggcaaagtccttgccacagacggtgcagtggaatggcttctcgccggtgtgcatccggcggtgcgaggccagctctgagtggcggggaaaggccatttcgcacagatcgcacttgaagggcttctcgccagtgtggcgtcgcatatgggtcacaagagcggcggctgatctcgtctccattccgcacagggagcagaggaagcgcttaattgcctccttgcgcttgcggtcgccgttaatgtgcacatcgcgaatatgattgttcaggcgcgacttcatctggtacgtgcgatcgcagtgtggacactgtagcagcggtattccgtcctcagtggcatccttttccaggtcaccggtcccttgcgtgtgtctgtcgccagtcggattgctgacggaagacttgctgtgttgcaggagaatgtgctgctctaggttctctggccacataaacttgtaggaacacttgccacatgcatgcttcttttctgtactactacactgaccttgccggtggtggtccataatgctctgaagcaataatgaaattgacataatgtatctatactggttaaatgtagaatacacatttaaaacctcaccttggagacacatttaaagatgcagtcgtcgcattcgtgtggcattttgtcaaagcgatgcatcgtccgctgatgctggatcatttcgaacttccgcttgcactgcacgctgcacagctcgcaaatatatacggggcgactgcccacaccgggctgcatctcgtcttcggtttccgaatcctccagctgcagctcaaagccagattcgtttgttattgaataattatgcggggagtcgtagctctggtgtagcgacagggatagcttaagctccaactggatatgggctcgcagatcaacaatacgctcgaaatgcagattgcacatgcggcaagtaatgcgcttcgctccgtttggccgcgaggtggcagcaatcaatgtttctgccaagggaatgtcatgctctttcaaaccgtgtcgcttcaagtgttttaccaagtagtcgtgccgatagaatttgcgactgcaccactggcagggaatcagcttggattcctccgcatgtacgctaagcaggtgaacggtgagggatttctttttatcaaagacccgtttgcactcggaacattcaaacgtttgattctgtaaaattcatagatgcaatgggtctgtagcctgaacaattcttagattaacttactgtaatcctgtgttcgcggaagtgtgttttcaggttgtgtttccagcgaaagcgtagcgggcatttgtggcagagaaatcgcttttgtgcattcctacactgcgactcgttgtggtggcgcagcagctgcagacttacaaaacgtccatcacatcgcccgcagacgtgaggagcgtctgaccaactgtgactttgtcgctgatggtcataaagctgatattttcgcgggaacttttgctggcacagctcgcagctgtaggtggctttgcgcgacttctttcgcctcttgtgctggtcatcgtgatctccgtccaggtcgctgtccgtctccgagctgtccagatccatttcgtagccactttggttcgttatcgaatagaaacgctgatagatacccgccgctagatccttgcgaatcaagttgattaactgctcctcactgaggtcctttgaatcgggataaaacagctctgccagctcatggggctccatatttggccgaccgcacaggctaacaatatcggggtgctcctccaaatgccggcgcagatcagcaatcttgttgtattggctctgacagatcatgcactcaatcagcttgtagccatgcggtttgcagagattcaaatccacagccttggccttcttgtgctcgctaatgttggccgatcgttttgaattccggtgaatttttaggtgtgcttcgagggcttcgctgcggctgaacttgcgaatgcaaagggagcagtcatataatcgagtttctggcttatggacgcgcatttcatggcgtttcaagaagtcgaatcgtttaaaactcctagggcagtcgtgacatttatatacagactttcttcctgttttccacttttgaatgcgattatacagtggcaaattatccagggagctgcaagattagttagttaaaataaagtagttgggaaattccaattgtcacccactcttcgtcttcaaagtccgatgtgggatcgtcatacgctggcttctccacgcttctgggttccatttccagcttcaccgtttcaatcatggtcagtgggtccaccgactttttgctctccatgtccgtttcgtccggttccggtagttcggaacaagtgatagtaacatcattttcgccacagtcctcatcctcagtctccagcttgacttccacatgctgctcagcacacagctccatcggcgcctcctgcagacagtcggttgacgttggagcagcaccgttctttagatgcttcattagaagttcgttggcggccatcgcctgcttcacatagcaataggcacccattaattttttggtgcatccactgcacaagcattgcggaaatttctgactaccagttgcatccagctgaaaggtaaatgtttcattttagtttgcatttttcgtagatttcgcttcttagaactttgtttacattgatttcggttagctcgcataaaatctccgaaagcaacttgtccggatactttttcgagggcgtggccagcttcagaaggttgtcggtgtccgtggagtcgcacgtgcgacaaatcaccggcagcttcatggcgaacaaatttgttttggccaattgaaagcttttttaattttaaatcaacaatcagaaaatcaacattattgatggtatgaccttgatgcgagagatggaaaataccgttcggtcattaaaaaaataccacgttgttaaaaaatacagcaattaattgggtgcgttcagcagagtccgctaattattttcaaagggaaatattacacaaatatttttaaaataaactgaagaaattgttaaattatgaaaaatataaatcaatatccaccagacaaacaattaatacaaatattacagaaccattagaaactgtgattaaaaaatcacgacttaaaatttactgctgacggtgaccaattgttgaatgtgaaatcaatagtgcacttttattacaataaatctacaatagagcgacgataatttgttatttaatctaaattggagcttaaattagtttgtggcgtgtgcacgtttagcatacgcgaaatccggcaaaccgaaacagagcctcgacccgattagatccaatcctctagtatttcttgatcgttttccgtatgagggcaaggcgctgtttgtgcgcctccgtgacagctgcccgcttgtagggacgcagttcgtccgtaccgaagccgggtatccacatgttgtacttccgctcaaagtgcagctgcacgtcgcgcacctcgatcttgttagactttcggtgcttggcgaaggcgctcgtcgacttgacggtgtcctcgacaaagtcgtcgatgatctgaagcagaagctcctcaacatcctcgtccagctgcgtggtggtatccacctctcggacgagctctgtgagacgcggtttggtaagcatctgtaattcggaagagagttaaactagaccctggcgtattccgtgtgcactccataaggcacgcatcttacgggagtgttctcggaaccggcggcggatgatgtgtgattggatgacttgctaccaccagatatggggcccgttcccgtacccaaaccggaaaccggtccgccgttctgcgaggatgagttgctgttgttggtcatc

SEQ ID NO: 40256 - DNA, 2874 bp, DROSOPHILA
attttctgattgttgatttaaaattaaaaaagctttcaattggccaaaacaaatttgttcgccatgaagctgccggtgatttgtcgcacgtgcgactccacggacaccgacaaccttctgaagctggccacgccctcgaaaaagtatccggacaagttgctttcggagattttatgcgagctaaccgaaatcaatctggatgcaactggtagtcagaaatttccgcaatgcttgtgcagtggatgcaccaaaaaattaatgggtgcctattgctatgtgaagcaggcgatggccgccaacgaacttctaatgaagcatctaaagaacggtgctgctccaacgtcaaccgactgtctgcaggaggcgccgatggagctgtgtgctgagcagcatgtggaagtcaagctggagactgaggatgaggactgtggcgaaaatgatgttactatcacttgttccgaactaccggaaccggacgaaacggacatggagagcaaaaagtcggtggacccactgaccatgattgaaacggtgaagctggaaatggaacccagaagcgtggagaagccagcgtatgacgatcccacatcggactttgaagacgaagactccctggataatttgccactgtataatcgcattcaaaagtggaaaacaggaagaaagtctgtatataaatgtcacgactgccctaggagttttaaacgattcgacttcttgaaacgccatgaaatgcgcgtccataagccagaaactcgattatatgactgctccctttgcattcgcaagttcagccgcagcgaagccctcgaagcacacctaaaaattcaccggaattcaaaacgatcggccaacattagcgagcacaagaaggccaaggctgtggatttgaatctctgcaaaccgcatggctacaagctgattgagtgcatgatctgtcagagccaatacaacaagattgctgatctgcgccggcatttggaggagcaccccgatattgttagcctgtgcggtcggccaaatatggagccccatgagctggcagagctgttttatcccgattcaaaggacctcagtgaggagcagttaatcaacttgattcgcaaggatctagcggcgggtatctatcagcgtttctattcgataacgaaccaaagtggctacgaaatggatctggacagctcggagacggacagcgacctggacggagatcacgatgaccagcacaagaggcgaaagaagtcgcgcaaagccacctacagctgcgagctgtgccagcaaaagttcccgcgaaaatatcagctttatgaccatcagcgacaaagtcacagttggtcagacgctcctcacgtctgcgggcgatgtgatggacgttttgtaagtctgcagctgctgcgccaccacaacgagtcgcagtgtaggaatgcacaaaagcgatttctctgccacaaatgcccgctacgctttcgctggaaacacaacctgaaaacacacttccgcgaacacaggattacaaatcaaacgtttgaatgttccgagtgcaaacgggtctttgataaaaagaaatccctcaccgttcacctgcttagcgtacatgcggaggaatccaagctgattccctgccagtggtgcagtcgcaaattctatcggcacgactacttggtaaaacacttgaagcgacacggtttgaaagagcatgacattcccttggcagaaacattgattgctgccacctcgcggccaaacggagcgaagcgcattacttgccgcatgtgcaatctgcatttcgagcgtattgttgatctgcgagcccatatccagttggagcttaagctatccctgtcgctacaccagagctacgactccccgcataattattcaataacaaacgaatctggctttgagctgcagctggaggattcggaaaccgaagacgagatgcagcccggtgtgggcagtcgccccgtatatatttgcgagctgtgcagcgtgcagtgcaagcggaagttcgaaatgatccagcatcagcggacgatgcatcgctttgacaaaatgccacacgaatgcgacgactgcatctttaaatgtgtctccaagagcattatggaccaccaccggcaaggtcagtgtagtagtacagaaaagaagcatgcatgtggcaagtgttcctacaagtttatgtggccagagaacctagagcagcacattctcctgcaacacagcaagtcttccgtcagcaatccgactggcgacagacacacgcaagggaccggtgacctggaaaaggatgccactgaggacggaataccgctgctacagtgtccacactgcgatcgcacgtaccagatgaagtcgcgcctgaacaatcatattcgcgatgtgcacattaacggcgaccgcaagcgcaaggaggcaattaagcgcttcctctgctccctgtgcggaatggagacgagatcagccgccgctcttgtgacccatatgcgacgccacactggcgagaagcccttcaagtgcgatctgtgcgaaatggcctttccccgccactcagagctggcctcgcaccgccggatgcacaccggcgagaagccattccactgcaccgtctgtggcaaggactttgcccgctccgataagctcaagcgccatatgcttacgcacagcggcctaaagccgcacaaatgcacctactgcgagaagagttaccgtcaggccaaggacctgaagcttcatctccagcagcacaccggcgaatgtcctttcgtgtgcggcacctgtggcgagcgcttcatccagagcagcacgctggagaagcatcggttgatgcggcgtcacttcgacgaggtggaagcgtggctgagacgccaaaagtaa

SEQ ID NO: 40257 - protein, 936 aa, DROSOPHILA
MKLPVICRTCDSTDTDNLLKLATPSKKYPDKLLSEILCELTEINLDATGSQKFPQCLCSGCTKKLMGAYCYVKQAMAANELLMKHLKNGAAPTSTDCLQEAPMELCAEQHVEVKLETEDEDCGENDVTITCSELPEPDETDMESKKSVDPLTMIETVKLEMEPRSVEKPAYDDPTSDFEDEDSLDNLPLYNRIQKWKTGRKSVYKCHDCPRSFKRFDFLKRHEMRVHKPETRLYDCSLCIRKFSRSEALEAHLKIHRNSKRSANISEHKKAKAVDLNLCKPHGYKLIECMICQSQYNKIADLRRHLEEHPDIVSLCGRPNMEPHELAELFYPDSKDLSEEQLINLIRKDLAAGIYQRFYSITNQSGYEMDLDSSETDSDLDGDHDDQHKRRKKSRKATYSCELCQQKFPRKYQLYDHQRQSHSWSDAPHVCGRCDGRFVSLQLLRHHNESQCRNAQKRFLCHKCPLRFRWKHNLKTHFREHRITNQTFECSECKRVFDKKKSLTVHLLSVHAEESKLIPCQWCSRKFYRHDYLVKHLKRHGLKEHDIPLAETLIAATSRPNGAKRITCRMCNLHFERIVDLRAHIQLELKLSLSLHQSYDSPHNYSITNESGFELQLEDSETEDEMQPGVGSRPVYICELCSVQCKRKFEMIQHQRTMHRFDKMPHECDDCIFKCVSKSIMDHHRQGQCSSTEKKHACGKCSYKFMWPENLEQHILLQHSKSSVSNPTGDRHTQGTGDLEKDATEDGIPLLQCPHCDRTYQMKSRLNNHIRDVHINGDRKRKEAIKRFLCSLCGMETRSAAALVTHMRRHTGEKPFKCDLCEMAFPRHSELASHRRMHTGEKPFHCTVCGKDFARSDKLKRHMLTHSGLKPHKCTYCEKSYRQAKDLKLHLQQHTGECPFVCGTCGERFIQSSTLEKHRLMRRHFDEVEAWLRRQK

SEQ ID NO: 40258 - DNA, 4697 bp, DROSOPHILA
agctttcttcttctgggcaccgcccctcaatcccagtaccaatcccaagaccccaaacccaaatcccaatctcagcttcactttctgcgactgtctagtgaagcttgccataacgaatatggtttggagcttggagttggatgtggacgtgaatgtgaagtatcttaccactcactttcgccgcactcgtagaacacttgagcagttaccatacgtaatttctgcggctggcaaaacggaaatccgcacggctcgctgcactgcatccatttggcgtccacacaatccggcgacagcagttgcattagtttgtttgcctttcgttcgcttaacattgcataatgctgccgagcaaacattggttcatttgcatggatttttgctacctttttttttcggcgggcattggcaattaaaaacccagaggccgtgtccaaatgagctgcgctttgttctaccgcccggtgttttggatttcctcaagatacggagctggaaatctgaaagacaacacccgattagctagcattgtcttggtggctttttgtgcacctgttcggattaagactcacaaaaaatatatatgatattgcacaactacaaaagaacccatgggtagtaagttaataaatacagcacagacattatttttttctgatttatttattatgaaaagtagataaagtatctatcaaattttcgaaaaggtctttgttagggtgtcttaagttcgcctcgcctcatatacgacaccatttccgcttttgtcatgacaatggttgtgaatatgcgactgcgactccgattccgaatccaacttcgactccaactggcgctgcgtgtggatatgtgtgggcattgtcattaggctaattcccgccaattatgagtaataatagcgcagccattctcgcgtcattcttgacccactttaagtcggaattagcttaatattttggcccgaactctctaacccgatccgtgtgctttccggcagatcatggagctgagcaacttttcgagcggcaagaagatgtcacgcgaggagcgccgctactcggtgccccacggacccaataccccactgccaccggcggcatccgaggatctgcatgcctggtccatctacaggtgagtgattgagtggttaacggtggaggaaccccatttcgagaactgggtgtggtcactggaggaacagcaagggggagtagctggggtaaccactggctggcagccgcacctgcccatcgaagttttgacggttgatttaaccgcagtggacggaagttcaaatgccataaatggctaattgaagagcccacggccaagcccaccaatcatgtccagctgaccgcaactgcagccgcccagtgcagctctctatgacgctttccatcctccacaacgagcaatacaaatacccccatcccatcccatccgtaggcaaaacctgaactctgacttcaccgattcagctctgggctcgtcggacaaatcaccgctgccatatggaaacttccagctacgcgataccacagttcaatcaatcttaaaccatccgcgctacggacccaagtgagtaatctcatacattatttaaataaacaattattaagcataatcaagcgttaatagttccggactatgtatgatctcagcacttgagaatttcggttacgtacaaaaaacacattaattgaattagctatacctttatatatttaagcataagatttaaacgttatcaccatactatatatccgaccatacctaatcctttcagatctcccttgggctcaaatatgtacacatacttgaagttcggactgccgcgcgtctttccgccaaatgctggatcgcagcgatcgcatcgtcccggtccgggtccgggtgcgggaccgggtcatggccatggtggttccagtgccctgggcggagtgcgaggacgagtgaaccgcgcctttcgggatagctcgggtgcaccggctggagccgggagcagtggctacgatagcagcgacaacgagacgacccgcagtcgggtgccgcccaatctccggaagtatcgcagcgagtccgacttccgtgccatcggcggcatgccgcactcgcgtcctgagtcgcgggctcagatcggaggaggcggtgtcccgatggctgccctgcggcaggcaaacagccgagcaagcatcgcggtgggtcagcaccaccatcagatgcagcagcatcaacagcagtacgggaagcactacggtcacagatcgcacagcgaggcggatcttctgggggccggattgagccaggtggatggcggcggtggtgggatgggctacgactataacgaagcccgactgtacggcagctccaggcagtacggcaatggaaacggtcacaaccctggcagcaggaagcagtcgggcatggggctgatctacccaaacatccaggtgcactgcctcgatgtgaatccctgcctgcgcggtgtgtcgatgcaggccaaggcgggggatctgttcgccatcatggccacatcgcagagggagggaagtgccctggccgagtgcttggcgggattgactgaacgtctgggtggggagatcctcatcaacggacagcaggttagtcgacgtggactgcgggaactctgcagctatgtaccggctctcgaggtctcctccctggatccacggatgagtgtccagtgcaccctcaatttccatgccgcgctcagaggtcccattgatcgcagtgatctggaggagcgcatggatgtgctcatcgaggatttggggctgaatacggtgcgtgcctccaatgtgtccacattgacccactcggagaaacagcgcttaagcgtggcctgccagctgctggcgcagtcgtcgctgctgattctggatcaggtgaccagcaacatggatatctttgacacattcttcctggtggagtacctgcgccagtggtgcagcggtggtcgcattgtgatcatgacgcttcagcctcccacctttgagattctatccatgtgttccggcgttctgctgctctccggcggaaggaccgtcttctccggcagtcgagcggatctaccacgacacatgggcgagctgggctatccatgtccgccattcaagaacccagcggactattactgtaagtaactagtgattgagtgcagctcgaatgggtaatcatttgttcttctctagtggatttggtcaccctggatgacctttcagcggccgccatgctggagtcctcggcccgcattgaatcgctggccaacgcctgggatcagattaactcggagcccccattagctgcaccgcccgcctcattgcccaatttcacaatgaaggctggcttctttggtcagatcagcgccctgatcaaaagatttgccggctacaagcagccgggatcactgctcacctggatcagcaagctgatcgccgccgcagtcctctcccttttcattggctgcatcttctgggatgtacccgcttccgatccacagctgagctaccacgatcgcttgggataccatcattgcgtcatggtgctagtctactggccactggtcatgctcaccattcgcgacacgcaggaggatcgccgccatgcggagcgagacatacgcctgggactctatacgcgcagtctttatatcattgtacaggtatgatacgattagatatgatataatatgtaaccagttttcatgtatcataattaaatccattatattgtatttggtctgtttttagagtctcctgggcctgtttcccagcctctgcatctggctcgcctacttgcttcctgcccacagcatggcgggactttacacatattccaacagcagcgatacgggcatatacctgtatatgggtaagctatcttggacaccacctcccactttcccctggttaatactcccattgattcataggctacatgctgctctacttgacgctcattcagacattggcactgttctgtgcccacctgctgccctgcaaggtctcggcgagcattgtcaacgggctcatcagcctggcagtggcggcagtgggtggctacctggtgcatccccagaacctggcccagttctggtcctggttgcaattcgtttcgccagaacgttggctgctgcccgttctggtgcaggatgagtacagtgccgagacgttgtctaactccgcaggactgcagttgtgccgaaataagcaggttggtgtgctcccttctaagggattctcatggccatgacaaaaattaaactcatataattgcccaatttcaggtgcagcaccaggagattattgtgcaacagccctgcccgccgcccaacggcacccaagtgctagtcgacttcgagctgctgccccagcagcacgtgctggatcccacgcccacctatgaccagaccacctcggtggctttggttctgggttcggtgctcgtcttttgcgtcaccttcatcgtctttttgtgcaattgtcgcggcgcctgtcgaaggaagcgtagccgttaggcagataccgtgactgggaggggagctggccaggatctggagtttagatggcacaggctaccgaactgtacattccatagaaactaattcttgaaataaatagtgtttagtcgaggcagtgttcgtttaactaactaaaggcaagtggttttattgagct

SEQ ID NO: 40259 - DNA, 2118 bp, DROSOPHILA
atggagctgagcaacttttcgagcggcaagaagatgtcacgcgaggagcgccgctactcggtgccccacggacccaataccccactgccaccggcggcatccgaggatctgcatgcctggtccatctacaggcaaaacctgaactctgacttcaccgattcagctctgggctcgtcggacaaatcaccgctgccatatggaaacttccagctacgcgataccacagttcaatcaatcttaaaccatccgcgctacggacccaaatctcccttgggctcaaatatgtacacatacttgaagttcggactgccgcgcgtctttccgccaaatgctggatcgcagcgatcgcatcgtcccggtccgggtccgggtgcgggaccgggtcatggccatggtggttccagtgccctgggcggagtgcgaggacgagtgaaccgcgcctttcgggatagctcgggtgcaccggctggagccgggagcagtggctacgatagcagcgacaacgagacgacccgcagtcgggtgccgcccaatctccggaagtatcgcagcgagtccgacttccgtgccatcggcggcatgccgcactcgcgtcctgagtcgcgggctcagatcggaggaggcggtgtcccgatggctgccctgcggcaggcaaacagccgagcaagcatcgcggtgggtcagcaccaccatcagatgcagcagcatcaacagcagtacgggaagcactacggtcacagatcgcacagcgaggcggatcttctgggggccggattgagccaggtggatggcggcggtggtgggatgggctacgactataacgaagcccgactgtacggcagctccaggcagtacggcaatggaaacggtcacaaccctggcagcaggaagcagtcgggcatggggctgatctacccaaacatccaggtgcactgcctcgatgtgaatccctgcctgcgcggtgtgtcgatgcaggccaaggcgggggatctgttcgccatcatggccacatcgcagagggagggaagtgccctggccgagtgcttggcgggattgactgaacgtctgggtggggagatcctcatcaacggacagcaggttagtcgacgtggactgcgggaactctgcagctatgtaccggctctcgaggtctcctccctggatccacggatgagtgtccagtgcaccctcaatttccatgccgcgctcagaggtcccattgatcgcagtgatctggaggagcgcatggatgtgctcatcgaggatttggggctgaatacggtgcgtgcctccaatgtgtccacattgacccactcggagaaacagcgcttaagcgtggcctgccagctgctggcgcagtcgtcgctgctgattctggatcaggtgaccagcaacatggatatctttgacacattcttcctggtggagtacctgcgccagtggtgcagcggtggtcgcattgtgatcatgacgcttcagcctcccacctttgagattctatccatgtgttccggcgttctgctgctctccggcggaaggaccgtcttctccggcagtcgagcggatctaccacgacacatgggcgagctgggctatccatgtccgccattcaagaacccagcggactattacttggatttggtcaccctggatgacctttcagcggccgccatgctggagtcctcggcccgcattgaatcgctggccaacgcctgggatcagattaactcggagcccccattagctgcaccgcccgcctcattgcccaatttcacaatgaaggctggcttctttggtcagatcagcgccctgatcaaaagatttgccggctacaagcagccgggatcactgctcacctggatcagcaagctgatcgccgccgcagtcctctcccttttcattggctgcatcttctgggatgtacccgcttccgatccacagctgagctaccacgatcgcttgggataccatcattgcgtcatggtgctagtctactggccactggtcatgctcaccattcgcgacacgcaggaggatcgccgccatgcggagcgagacatacgcctgggactctatacgcgcagtctttatatcattgtacaggtatgatacgattag

SEQ ID NO: 40260 - protein, 702 aa, DROSOPHILA
MELSNFSSGKKMSREERRYSVPHGPNTPLPPAASEDLHAWSIYRQNLNSDFTDSALGSSDKSPLPYGNFQLRDTTVQSILNHPRYGPKSPLGSNMYTYLKFGLPRVFPPNAGSQRSHRPGPGPGAGPGHGHGGSSALGGVRGRVNRAFRDSSGAPAGAGSSGYDSSDNETTRSRVPPNLRKYRSESDFRAIGGMPHSRPESRAQIGGGGVPMAALRQANSRASIAVGQHHHQMQQHQQQYGKHYGHRSHSEADLLGAGLSQVDGGGGGMGYDYNEARLYGSSRQYGNGNGHNPGSRKQSGMGLIYPNIQVHCLDVNPCLRGVSMQAKAGDLFAIMATSQREGSALAECLAGLTERLGGEILINGQQVSRRGLRELCSYVPALEVSSLDPRMSVQCTLNFHAALRGPIDRSDLEERMDVLIEDLGLNTVRASNVSTLTHSEKQRLSVACQLLAQSSLLILDQVTSNMDIFDTFFLVEYLRQWCSGGRIVIMTLQPPTFEILSMCSGVLLLSGGRTVFSGSRADLPRHMGELGYPCPPFKNPADYYLDLVTLDDLSAAAMLESSARIESLANAWDQINSEPPLAAPPASLPNFTMKAGFFGQISALIKRFAGYKQPGSLLTWISKLIAAAVLSLFIGCIFWDVPASDPQLSYHDRLGYHHCVMVLVYWPLVMLTIRDTQEDRRHAERDIRLGLYTRSLYIIVQV

SEQ ID NO: 40261 - DNA, 11500 bp, DROSOPHILA
ttctcgctgattgcctcgatttcgctgctaaacttgcgtggagcatttcgctccagttgctccatctcgacacgagtgggcgtggacaggggcgtagacggctggctgcgcgcggactcaaaggaattgcccgatttcagagagcttctgtccgccatgttttctttattgtctacgtttaacttgagtttctaataattgaaatatttatggatttgcaaggacaagaatgaaaccaacaccatgagaaggagatttcaagaatatggtaagagagtcaaggaaaataaatgagaataatgagaaggttagtctccccatcgccaagagagaaaatagttaaatatgacccacctcggtctccgtatctgtgggcagattggcgggcaacggctgcaggcgaacttcctggcgcctcaattcgcgggccttcttgaattcctcaccctcggtgtcatctttgccgtcatctaaaaatccaaagaagagtttaatataaattagttaatttttaaacttccccttttgtgcccactcacccgcaataccttcacttgagtcgtagaaatcgtcagaatcatcactgtcctcacagtattgctttccaatccaatccgacgccagctggagggtctgagcaccaaacggcgaatcatccgcctcctcaaacatctccgaatccgattccgtatccgattcatctgaactggatagctctgattgggaatcgttgttggactcgggcaagaagttgcgaccagaccattcgtgctcatcgataacattggcttcatcatcggacatggcatcggcagaggcatttgctcgcgaggtctccagtagatccacctggtccctgggtggagtggtgtccatatgctccgatgtggcagctgcagtgggtacggatcccgcagttggtggtacagcaggcgaggcgggttgagcggcagcggatttctggagaaaggggatgatgggttctagttagtaagaacacttaaatagatccaagatcgatactcaccctggctttgttggtgcgctgcggcagcggtttgggtggcaaccggaagtgttgggtgcagtaaaatcggccctgcggatcgtcccgatcaaaggcgtagcctcccagacgcaagttggtgtggcagtggtggcacttaaggcaattgcgatgcagaaccaatccctccacggtggtcttctccatcaggtagacggtttgcttacagaagcggcacttttcggaggcagcctgctttttaaaggccagcgccaccttggaactctgtattattagaaggataagtattagaagaaatttgaagatgacaatgattaacaattaacgacataacacataaacatttgcttggcattcgatgggtgtcatgtacaaatgagtggatatgtagcttgatgactatgagtgtttgtgggaaaattgcctagacttttgcttaaagcacgctaacaacatcatcgactacagcaaccacaggaagcaaccatgaaggtaagcaaaaatattaaatatagtatacataaatataaaagcaaatataaaatagcacaggggaaaccgataacaatagaaaccaaacaaaacaattgatacaagaaggtggtggatgaacacaaaattactcacagatttgggtatgactgtgttgttggtgttggtggtggcattgctgctgcccgcgttcttctcatccgaattggcctcatcctttttgccaaactgaccggcaatggaggccactttgttgcgtccccgctcgcccacatccagattgtggccctcctttagctgcttgtccaagttgcggatagtctggtcgatgtccttgaacttttccgcctcacgcgaatcctggcgttgcggcttggacatcttgtgctgtcgcgcctggaactgctccttgctccacttgggaaccttctcgcggcccttaggcccgtggatctccgtcttcttcgacagctcgatcttcttctcgatctcgcgtacattccaatcgttcgagtcgatcttgccgatagcccgcatcagatccttgggcttcttgtcaccaccaaggccaccacgtcccgtcatccgctgctccatgtttttaatccgatcgctgaactgctcgtccgccgtgcgcggcaatgccgacggaatatctccccgttcgcgatcctttggttcataggttgtagatgagtggcagtgtttgtaggcgtgttttgggtttttgttggtgtttaggcatttaaataattaaagtttgggagcggagtggagaggtttgaagaaatcaaaattgatagatatgcataaatattttacgtctgataactgatcgtctaagtaacgtatgaacataaagaatcaactcaaaaggcaaacaactaaacgtaagcataacaacatgtccaatttggaccagtttagcagagcttagcttagcgaatagtacattagtaactggtcgactggcttagccgaatccaaattcttaaacatctgttagttaaatcggagcatatattaaagtaaaatcgctgagcttttagacattgagcgaataggaaacaatcttataggagcatctccattgaacatattttgtcgtatctttcattttcttcgttcgttgaattaaatttgttattaaattaaacgttattaaagtaattgctagcatcaatgttaacgaattaaaacccttactatgtcttattattcgattaggtattattatggttagggatcttgttagttgcttcactcttcgtttcttgatagattcttaacagcagcactgcagcattagtcagatgtaaggatcaacagtgatccgccttggggcaaaacgagtcaagacaaaaacacagaagacgacgcagcgtgcaaagcgagaacgggagattctcttcgcttacgggaaacagaagctttcgctcgaggtccttgacgcgatcattgaatacgggcgcctgctggcggtagaggaatatcgagtagtcctcgaatggggtgccatcctcggccactcccgcctcaccaccctccctcaagagcttgcccgcctgcaggagctgaaggctcttgtagaaattctgcgtctggtgatagcgctgctggcgccgcttgctcatccgctcctgccgattctcctcgatctcctgcaagcgctgctggcgctcctcctgcgcggcagaggtgagagtcaacacattggacagattcgaagggggttcggattcggattcttgggggcagtgggtactttgatttcgatcgagagtgattgggacaactatggtatgctattcgggtgactttgcgtgggacagacacagaacacagtataactaaatctaaatctacatggctttttgactttcactgggattgtgctaagttagttttatgtggattgagagttacgcatcacacagagtggaccatgtagacgacactgggacacttggacactaagtgaactgacctcattgatggtttcgaatgcgctaatggcgttactgatttcatgacagagagctgttctcagcaggagctgaaccttgggaacagattttcgatggttttgtttttatgatattggttttcttgcgttttacatatgtgattaacaattaaattctttgaatgtacatgagatagctgagttcgaacaattttaaacgagcaatggtaatgaaatataaatacacaatgtttgtgtatatagttaacaagatgtttgaatggatgattaagtgacgcgatggcaatcctcagaccttctgcacattcgcgtatgaaccaatccatgatataaaataatgccagcatttactcacaatattggcggttttgtcaacctgacggcgcttcttggaccggcgtggcgtatcgttttgacctgtcgaggaaaataacataaggaatcagaaatcacttaattaattaattaacaaaatgattaacattaatatgtctctggagtggctacttaagctgacagaactttttaagtttaatctgttacattttacttcttgttattattttctttttcctgttaataattatagtacattttttgctccttctctttaaatagcgaaaacaattagaaaaatgtaaataacatttaatttaccagcgaaacattctaatctaagcttagttgttttatatattttattgtcaccatttaatttaacatatatatgctcatctagcagccactccgaaacttattttccatcagactatggtgtaagatagtgatcttcaacagaccctgcgttgtggttcctgtcccgcttccggcaactccggcggcggctcctgctgcccctccaccgatgttaagaagctgctcgtggcgacgctgccgcttggctcgctcctcctcgagcaccgagcgccgctgcactgtcgtgggtatgtccacagcatcctgcatcggcgacttggccttgggtttcgttgccagcagcttggagaagtcgggttgggcatgcgtatggttgatacgatacttctggcgcaaatcgctaaagtccatcttggggtgcttgatatgggggatctcgccgcgaaacaagtcgcagatctggtccaaatagttgagccagattcgcgactccagctcggtcaagtccagcgactgtttggcactcatgacgcgatcgatgtggagttcgcgctctaggacggcgaatgacagctcattgcactccacgggactcatgtccttggtggcagcgtagtcgatgagatcaggacgatagctaaatggtgattttaatgattttaacgtgtcaaaatatatatgtatgtatgtatgtataaaccacaacttaccgattgataagcgcacacagaacgcgtccattccggaacacatccgaagcctccttgagttcgggaataaactgataggaatgcagctgggcacttatccatctcagcaacgtggcaccctggggcagcaagtctttaaaaaaaccccaaagtaattattaaataaaggcagatcgattgataattatttactaacctccactgcgtcgcttgcgtctgcccggtgtgtccaaatgcggggtctgcagagcatgcgtgtccatgaaggtctgctccagaatggacgggtcgtccgtgtcgaccagatgtttgacctgccagctattgaccgactccctgttcagattcggatagcgcgtggccggatccacggtataggcactgatgtcccgctgcagggtgtccggcgtggtctggttaagcagccggtagatgctttcgcgctgcgccagaacgccaagtgtgctgttctgcgggttggaccaaagcttgatggcataggcagcatccatgctggataagaatccacgggcacaacccgatccagtgggccaaaacggctcgagcagactgtcacccacgaggcactgcatcaggcgagctcctttgcgcacaatcacccgacaggacatctcggcggcaaacatcgatgtgaagtcgaacatggccacatctggtttgccgtagtgattaacagcgaactccaggtttggcatttggtattgggtggagaactccgcagcctcgcgtgcatagtcgtgcagcttttgtgtatccacattggctggggcgagaagctcgccgggatcggccatatcctcgataataacgcccttgtcaattagactgtgcttcttggccgtcatcacgaagtagtgcgtctcgtccttgtagtagacgatgttttccaggtcgatgcccgtcttcccgtacagctccttgaagaaggcctggttgaagatgaaagccaccccactgatctcctctactttagcctccgcctccgtcttcttgttgataaagttcgctgtaatagcgatggccagcttcccgcggaactccttcctcctaaagtccagcatattccgcttgccatccgctccgatcaacacatcgaattcgtagtgagatacaggatgatctgcgggagtaacagctgccctccatccgccgccatcgccagagggctctacagcgtgatcaaaactgactccctcgtggatctctacgcccaggagcagcgccaccttgagcagcatgcactgcagctgccgaatggagatgtgatcgatggagccggcgcaaaacttgccgtagaacttctttgcgcccaagttgcgcagatccgtgatgacgaatggccacagatggagcacattgttccgggtgatgcgatcgcgtttctccagcaccaccaccttggcgcccagcagttgggcctcgatggcggtgcgcagtccacagggccctgctccgatgaccaggacgcgtgtgccagtacaggcagctcccttgccgtagactctatgggcagctctggcgtcgaacttcttccacagggcctgcgccttccacgaacgcaccttggcctttagccgtgggtagaagtcgttcagaggcgagggtctcaatcccacagcctcgcacatggcccgatggagcgccaggatctggcgcatcgttgtggccacgcacagcaggtcgaatagctccgccgcctccgcggccgccgcgtgctccgccatcagcagctgctgttgttgctgctgctgcgccgtcagctgctgctgttgttgcggcatctgctgctgcggttgctggtgcggcggcaggtggtgatgctgctggtggtgccgctggtgttggcggctcattctgcaaaaggagagaggtttggtagacaaagaaattagtggggtgcttcgatatgacgactacggctactaaaaaacgaaacttgaacaacataatatattaattaattatttttgtttgacagatttttcattcaagttttcacgcgtctaaaccaagcacttttaggtgtaaaataattcgccctaagaatcaaacaaaattaagtttgaattgataatgatttcagagtaagttgcgacctcctttgaagtcaacgaaccattgcatgtttactcagaaaggactgcttcgcatgtaaatgtaaacaaaatacaagttttactttttaaatattcccggaaagcggaaagaaacacatcccctttcagacttttttacttttccacccggggaactaacaaagagcttttaaactgaacttgtcatcatcttgcttgtttgctctgctttttgttttgcttttggattcaaatgacaactgaaatctcggcacagcattatacttttatacttcaattaattgaatcagaaaatcagtaagaattactcattctgaggtccagcgataataaaaaaaaccgttgaacaaagcagcggagagcaggaaggaaatcttcccagggaaaactcaacctttgaatacccttgaaaccgattggcttgaaccctctcataaatcatgaaaaatcccaatagccaattaaacccctttgaactcaagtagagcattttgtgcgcacctatttcattcgactgcggactataattggaatagcctttgagtgctgacaagtgagccagacaaaagccaaaggcaaatgagccggtaaaagctgccactcgagtttgaacttctgtttggatccgcctagacaggcaacaacctgacaatggacagtagggaactgagagcttgagaaccgagagccgagaactgggaactgccaagtgggagctgcaaggtgggaatcctgaagtggagtgccatttgcgtccggggcaaatggggggaaaaagtaagccacaagaccgcagctgtttgttctttgtgagtgcgtttctgaatgtgaatgtccctcattcactcactcgcataaaggacaatagcctctgggataacctgagaacaaactgggcaagtcactgacccattttcagggacatcattaggaataacgtttatcggggttaaccaagcttttaaggatttcaatcggatattaaacaattaggatgagaaaagattggaaacccataaaaataatttgtttataaaattctttcaaaaaaataatttggtccaaattcgaagccgttgcctcgacatcattaggaataacttttatcggggttaaccaagcttttaaggatttcaatcggatattaaacaattcggatgagaaaagattggaaacccacaaaaataaattgtttataaaatcctttctaaaaaataatcttgatccaaattcgaagccgttgcctcgactttattgaacccgagattttttctgttgcacaaaccacaaaacagttcactgtctgatacaatttgagagatggagaattttcatagtactcgaggaaagggcagcatgagacgggcgtccaaggacacatcgccggagggcatgtgttcgcgttgctcccccgagctcactcggggatacctgatccccgtcatcatgggcggagacccgtccagttgctgtagcttgagcatcagggtcgacatcttgggcagagaaccctcgcaactatatcccgccagtatatcggctgcatactggtctatatcccgtcccagttgctccacaaccggctgcaccaccgaataatggccattgaggctgctaaagaatccatgtcgtgatcctgcctccaggacgtcggtgaccacgggacggatgcggtgcagcggcagcctgtagacgtcggccactctttccgccacctcgtaactggtcgccgggcgacccagcaccttcaacacttccaacaccagagccccattctgtctgcccagattagtgggaatcattctgaattacgcgactggatggcgacgctgcgcctccctttctactacctagattcttgcttttggtattgaaaaaaaaattaacaatgaatttttcaacggctttggttttgcctcgccagggaaaagggaaatcgaaatattttggtcgatagagacaatgaatatgtagtttgatcggaagtttgaaacacactaaatacaatggcaatgaattttgtggttggagatgagacgagggggttactaggatctactgtttggataaaggtaaaatttcttgggatcatcatgctatttcaaaagatgtatcatcatatcatccccttattaaatcagttgtcaaattgaacaatggaataaatagaataaatttgtatggtactgagctctttaatagagaataataagaaagctttctttgtttacgagttttgggaaacggtattgcaaaaaaaaaaaggttccctttttgcatagatttcatccttgacaaattattctacaccaacccacacacaaggcaggaaatcccatatccaatgccgaaaggcggttccaattttttgttgtctcatcgtctattaaagtttgggacccaaatgcgattggcgccaacaaactcataaaaaagagctgcctccatgccccccaaccacgcccacattgcggacaggaaagaggcggtgggtcacgcaattggcgacagctcgactgtcatccgctaccactctctacactgagggaaaaaattaaggggacttttaaaatggggcatctgatggtacaaattctcaattgatgtaccatatgcgatttttcatcacatcaaaaactaagcatatctttcgttccgtgtagttatcggtattttttcgctcattgtttgtccgggttaatcaaaagccttgtgggtcacattgggcacacaccacattatgtcattgcgccaaaagaaagggggtgttgttgggtggtcgtatgagatgaaatacgaaaattaaagtcgaaagaaaatgaaaagttgagcgcttatcgatttttgtgttggctgctttatctaccaaaagtcgccacaacgcgaagtttgttggggcagggagggaaattaaaatcagccgaaactttaggaatgggtagggtatcaaaacaaccggcgagggtgaactgcagcaggtttttcttttcgccaactgggggtgagatgaatgactcatcttcgaatactattcgagggtggcccgaaaatatcccaccatatctacagcttaattactcataaattcagaaataaaaccaaaattgtggactttgcgtaaacgaatgaattcatagtttataaagtgttgcacatggctgccgtacaagatcaaggttcccgagaacaaaatgaaccatttcagtttgaaatgttgaaatttctctttcgtttccttgtgcaaacttggccaatggccaggaaatttataacaaatattcgaaacaccaacatcatctcgtagtcccattcataaacaaaataattaattttgttcaaatttttgttatttcttccgcagtttgtttttgtccatatcatatgctcacctgatgcaatgcaattgacacgtttgtccgaattatcacaatatttatcgcttatatcacaattttttgtgtttatttatttaattttttattcggaacgattcgttgcgagatgcagagccacttgatcggtaatgaagctacgccactgcctgggatcatttttaaggcatttctgtaacaacagatgacaaagatacaatgagtccggccaggtacacaaaagccaggaacattcaaaccacccccacaatgtgagaagttcgtcgcacacttttgatatacacaaaacatcataaaggcagctctaattatagatttatagatactgtatctacatgcaagttttgtttattatcactcatcgataagaaagctcattcttgggcactttctaataacaaaaccaagaagaagaatgctttccgacttgggcatgaaagtcacgtaatttgaatatatctttcttattttattcgttcgcctttatgtgacaattgtaaatagaaatatgtcactgaaacgtgaagagttttcagaagttatggaaattattttctatagtaaccgaatggaaaatttcgattggtgctgcattttatattttgaactgataaacgtcttaatttcaaatcgatctgcttagcacctaggcgcttcagaactcttgccgaatgaatacagctggggcataaaaaaatatgcaaatagacagccgcttgattgatttgcgttcgttgttttctaattttggttcctatgccaattgatcgacagcctcgcagacgagcgaaaattgttgaaattgcagcaaattgatttatgaacaccaaaccaagcagacatttgagcaacacgaaccacaatgcggaagcgccatcgaatttttactttggggattaggggcactcactgctggcgggaaaaaaaaaatataaaattaaataaagaaatcattcggccaagtgtgacaattaaaagacgcgcctgtggcgcttttctataccttttggctggttttcacaattacaacaagatgtgacaagtgtagaaacaatgaaaatagatttgattgaataaatcttgtcggcaactttttggttggcagccaaaacttaaaa

SEQ ID NO: 40262 - DNA, 3782 bp, DROSOPHILA
gctctgcatctcgcaacgaatcgttccgaataaaaaattaaataaataaacacaaaaaattgtgatataagcgataaatattgtgataattcggacaaacgtgtcaattgcattgcatcagaatgagccgccaacaccagcggcaccaccagcagcatcaccacctgccgccgcaccagcaaccgcagcagcagatgccgcaacaacagcagcagctgacggcgcagcagcagcaacaacagcagctgctgatggcggagcacgcggcggccgcggaggcggcggagctattcgacctgctgtgcgtggccacaacgatgcgccagatcctggcgctccatcgggccatgtgcgaggctgtgggattgagaccctcgcctctgaacgacttctacccacggctaaaggccaaggtgcgttcgtggaaggcgcaggccctgtggaagaagttcgacgccagagctgcccatagagtctacggcaagggagctgcctgtactggcacacgcgtcctggtcatcggagcagggccctgtggactgcgcaccgccatcgaggcccaactgctgggcgccaaggtggtggtgctggagaaacgcgatcgcatcacccggaacaatgtgctccatctgtggccattcgtcatcacggatctgcgcaacttgggcgcaaagaagttctacggcaagttttgcgccggctccatcgatcacatctccattcggcagctgcagtgcatgctgctcaaggtggcgctgctcctgggcgtagagatccacgagggagtcagttttgatcacgctgtagagccctctggcgatggcggcggatggagggcagctgttactcccgcagatcatcctgtatctcactacgaattcgatgtgttgatcggagcggatggcaagcggaatatgctggactttaggaggaaggagttccgcgggaagctggccatcgctattacagcgaactttatcaacaagaagacggaggcggaggctaaagtagaggagatcagtggggtggctttcatcttcaaccaggccttcttcaaggagctgtacgggaagacgggcatcgacctggaaaacatcgtctactacaaggacgagacgcactacttcgtgatgacggccaagaagcacagtctaattgacaagggcgttattatcgaggatatggccgatcccggcgagcttctcgccccagccaatgtggatacacaaaagctgcacgactatgcacgcgaggctgcggagttctccacccaataccaaatgccaaacctggagttcgctgttaatcactacggcaaaccagatgtggccatgttcgacttcacatcgatgtttgccgccgagatgtcctgtcgggtgattgtgcgcaaaggagctcgcctgatgcagtgcctcgtgggtgacagtctgctcgagccgttttggcccactggatcgggttgtgcccgtggattcttatccagcatggatgctgcctatgccatcaagctttggtccaacccgcagaacagcacacttggcgttctggcgcagcgcgaaagcatctaccggctgcttaaccagaccacgccggacaccctgcagcgggacatcagtgcctataccgtggatccggccacgcgctatccgaatctgaacagggagtcggtcaatagctggcaggtcaaacatctggtcgacacggacgacccgtccattctggagcagaccttcatggacacgcatgctctgcagaccccgcatttggacacaccgggcagacgcaagcgacgcagtggagacttgctgccccagggtgccacgttgctgagatggataagtgcccagctgcattcctatcagtttattcccgaactcaaggaggcttcggatgtgttccggaatggacgcgttctgtgtgcgcttatcaatcgctatcgtcctgatctcatcgactacgctgccaccaaggacatgagtcccgtggagtgcaatgagctgtcattcgccgtcctagagcgcgaactccacatcgatcgcgtcatgagtgccaaacagtcgctggacttgaccgagctggagtcgcgaatctggctcaactatttggaccagatctgcgacttgtttcgcggcgagatcccccatatcaagcaccccaagatggactttagcgatttgcgccagaagtatcgtatcaaccatacgcatgcccaacccgacttctccaagctgctggcaacgaaacccaaggccaagtcgccgatgcaggatgctgtggacatacccacgacagtgcagcggcgctcggtgctcgaggaggagcgagccaagcggcagcgtcgccacgagcagcttcttaacatcggtggaggggcagcaggagccgccgccggagttgccggaagcgggacaggaaccacaacgcagggtcaaaacgatacgccacgccggtccaagaagcgccgtcaggttgacaaaaccgccaatattgttcagctcctgctgagaacagctctctgtcatgaaatcagtaacgccattagcgcattcgaaaccatcaatgaggtcagttcacttagtgtccaagtgtcccagtgtcgtctacatggtccactctgtgtgatgcaatccgaatccgaacccccttcgaatctgtccaatgtgttgactctcacctctgccgcgcaggaggagcgccagcagcgcttgcaggagatcgaggagaatcggcaggagcggatgagcaagcggcgccagcagcgctatcaccagacgcagaatttctacaagagccttcagctcctgcaggcgggcaagctcttgagggagggtggtgaggcgggagtggccgaggatggcaccccattcgaggactactcgatattcctctaccgccagcaggcgcccgtattcaatgatcgcgtcaaggacctcgagcgaaagcttctgtttcccgatcgcgaacggggagatattccgtcggcattgccgcgcacggcggacgagcagttcagcgatcggattaaaaacatggagcagcggatgacgggacgtggtggccttggtggtgacaagaagcccaaggatctgatgcgggctatcggcaagatcgactcgaacgattggaatgtacgcgagatcgagaagaagatcgagctgtcgaagaagacggagatccacgggcctaagggccgcgagaaggttcccaagtggagcaaggagcagttccaggcgcgacagcacaagatgtccaagccgcaacgccaggattcgcgtgaggcggaaaagttcaaggacatcgaccagactatccgcaacttggacaagcagctaaaggagggccacaatctggatgtgggcgagcggggacgcaacaaagtggcctccattgccggtcagtttggcaaaaaggatgaggccaattcggatgagaagaacgcgggcagcagcaatgccaccaccaacaccaacaacacagtcatacccaaatctagttccaaggtggcgctggcctttaaaaagcaggctgcctccgaaaagtgccgcttctgtaagcaaaccgtctacctgatggagaagaccaccgtggagggattggttctgcatcgcaattgccttaagtgccaccactgccacaccaacttgcgtctgggaggctacgcctttgatcgggacgatccgcagggccgattttactgcacccaacacttccggttgccacccaaaccgctgccgcagcgcaccaacaaagccagggtgagtatcgatcttggatctatttaa

SEQ ID NO: 40263 - protein, 1195 aa, DROSOPHILA
MPQQQQQLTAQQQQQQQLLMAEHAAAAEAAELFDLLCVATTMRQILALHRAMCEAVGLRPSPLNDFYPRLKAKVRSWKAQALWKKFDARAAHRVYGKGAACTGTRVLVIGAGPCGLRTAIEAQLLGAKVVVLEKRDRITRNNVLHLWPFVITDLRNLGAKKFYGKFCAGSIDHISIRQLQCMLLKVALLLGVEIHEGVSFDHAVEPSGDGGGWRAAVTPADHPVSHYEFDVLIGADGKRNMLDFRRKEFRGKLAIAITANFINKKTEAEAKVEEISGVAFIFNQAFFKELYGKTGIDLENIVYYKDETHYFVMTAKKHSLIDKGVIIEDMADPGELLAPANVDTQKLHDYAREAAEFSTQYQMPNLEFAVNHYGKPDVAMFDFTSMFAAEMSCRVIVRKGARLMQCLVGDSLLEPFWPTGSGCARGFLSSMDAAYAIKLWSNPQNSTLGVLAQRESIYRLLNQTTPDTLQRDISAYTVDPATRYPNLNRESVNSWQVKHLVDTDDPSILEQTFMDTHALQTPHLDTPGRRKRRSGDLLPQGATLLRWISAQLHSYQFIPELKEASDVFRNGRVLCALINRYRPDLIDYAATKDMSPVECNELSFAVLERELHIDRVMSAKQSLDLTELESRIWLNYLDQICDLFRGEIPHIKHPKMDFSDLRQKYRINHTHAQPDFSKLLATKPKAKSPMQDAVDIPTTVQRRSVLEEERAKRQRRHEQLLNIGGGAAGAAAGVAGSGTGTTTQGQNDTPRRSKKRRQVDKTANIVQLLLRTALCHEISNAISAFETINEVSSLSVQVSQCRLHGPLCVMQSESEPPSNLSNVLTLTSAAQEERQQRLQEIEENRQERMSKRRQQRYHQTQNFYKSLQLLQAGKLLREGGEAGVAEDGTPFEDYSIFLYRQQAPVFNDRVKDLERKLLFPDRERGDIPSALPRTADEQFSDRIKNMEQRMTGRGGLGGDKKPKDLMRAIGKIDSNDWNVREIEKKIELSKKTEIHGPKGREKVPKWSKEQFQARQHKMSKPQRQDSREAEKFKDIDQTIRNLDKQLKEGHNLDVGERGRNKVASIAGQFGKKDEANSDEKNAGSSNATTNTNNTVIPKSSSKVALAFKKQAASEKCRFCKQTVYLMEKTTVEGLVLHRNCLKCHHCHTNLRLGGYAFDRDDPQGRFYCTQHFRLPPKPLPQRTNKARVSIDLGSI

SEQ ID NO: 40264 - DNA, 7538 bp, DROSOPHILA
aaaacataaacctgagcaagaaagacgggcaggccgatccaccgaaaagaactgagcctgagaacctggctataaagtgactgaagagtaggagctgaaaccaaattactcttggccagggtgcgcacataacaaatcaaaaccggtgacaaaatgatttaggaaccgggcgaaaatgttcacacgaacttcgggccagaacctctgaaatcgaacaagaaatgctgggggagaaacatggccagattctgttcgatattgtatccttttcgactgagaattcttctacgtggtcgctggactcgaattggtggatctcattgttgcgcggcgataaagatcacacgagtaaatcatggtctgccgccactcactcccagctcatccccatatccatcgccatccgcaacccaacccgtcaccaccccttgctcaagattcaccatcgattgccgcagtgcatgaacaagtagtttagcaaatgaatacaagagccacacagggtttttccgccaccgagatcgggacaatggcaaaggaatttctctctctatactgacgtgtaaaatattgtcccaaacctgtctataaatcatcaaatgaatggggaacaattactataatgtagagaactaagagctaagcctgcatatgaaaaaatataaaacattttggaagaagtcatagtactatatttaaaatttatttgactttccaaattagtcaccgcttatatattcgacgtttgagtacctactcaaagcagtcccaattataattacgctctcatatgtgaaaacatatggctatttttcgtacttgaatagagtactgatcaaaacacactttaaaaaaaaatagagaaaacattctttacaataaactatacaaatagtttatacgataaagttctagagggtcattaagagttttgtattacggataatttaaacttttgataatttaaaattacttgtgatttttgccgaactgacttgaactactggacacgcacattgtcatagatctttacgacatctatgtcttgaagaaggtttttacgaaactcctgatagcgggccatttgacgatcatttaactcgacgagcggcttgtttggacagtgtccaacctccttatgtacaatcttgtagttgcactgcctgagtttgtacgcgacctcttgcaggtccagaggccgacatttgaacaaaacagatcctttggccaaatcggtaatggtactatcggtggctttgcaccacaaagcatcaattcgcaacgtttgattgaattcctcaaagcttaatggtgttacgctcggcaatgtggcctcaatcaagccagtttcgttgaataaatgtcgattgaagaagcgcgctttgttttgccgcagtaaggaggccaagcgaagtttcagttcggggagattatccgtcctgatcttgcaaaccatggcaaccaattgccgcccatagtccatgggtatactataggtgtgatgattcctctcgctcaactcgcactccttcagaattcgctgcactcgactgtacggcaattgcaagggcgacagtcgagccctcagctcgtagttcttgtcgggatctatggaacctcccccacgatgcaccgctaatcgaagctcgttagccagtattaactcatctgtcgtatcatgatcaaactgcgcctttttggagcttagtggaacgctggtaaagccggtcttactcgggctcctttccccatacatcggagcccatcgtactcgctttacgctcggtatctctggattatccagaagctccaagtccagcccattacgcttatcgttctctaatttcggggaatcactacggattaggttcggctttggtctgtagggagtaacgctggacttgagctgaggaagtttcgtagtcttggtcctgtccatgggttctaaacagctgttgttatgcatttgaaatgaacttgaaatttggactacttaaagttattgttgaaaatgaatggatttgactaatacaatagaaatttcggagagcgtatgagtgaaaagtttttaaaaggcactaatataaattcacaatgtgatttcaagaaaaaattaaacgaaatcgaaacaagggacaaacttttttgaaaggcacggtaaaaaaaattgatattgtacatcaatatacataaatgaaaaagtaagtataatatgaactcaccgtatcggcggctgttaaattaattcccagtcctccggctctcgtagacagtaagaacacgaagatatctgctctcgtttgaaaatcggcaaccatatcgcgacgagcggatatcttgcttgagccatccaggcgcatatagcgatgcttgcggtgccacatgtactcctagacattttatcaaaaaattaaactgaacagtgatcgtttcaagtttaataaacttacctcgagcaggtctatcatcttggtcatctgcgagtatatgagtactcgatgtccattcgccttcaatcgagttagcaagttgtcaagaacaaaaagcttaccagcatcggtaatcagggtttccttgtcgggcaccacaatcgaggaccatccaccatgaggcttgcacaaggccaatccactggagacaagctccctgccctggctattctcacactgattgtggcgaatctgggaccacgctgcagatcgactatcgcagctaaaattgatataaaaaaagttaaaaacctggatcggtttcgatgaatccatttgaaacttactataaatatctatgcacagcttgaactttttgtcccaaatcgtaaagtattcgtggcatggaaagcggttcgcatacgtattttcttggctttcgtgggcgatgcggaaactctggtagcagcagcagcgtcgtcaccttaacatcgcttttggcattcgactttgtttgcacctccacagactcgatttccagcttttgcttggacacatcctccatctcctcgattagcgacgttttcttcttcagaatctttgaccgaattacacggtgttcgatagtttcctgcatattgtacgtaaagtaatcgccaaatgcgtaaacgctgctttcgttggcggtctttaagcataaatcattgtataaattgttcgaataaaaatttataaatataaataattataccattgctgtgaatatgaagttcttaaggacactgtttggtggcatatagtcgagagctagtttgttttccaacatcggctccagcagttgatatctactgtccggctgctttttccaccaaaagcgacggtaggccagcagtgggtatttctccaaaactcttcgataatgcaaaagactgtagaaaaacaaacgtaagtattgtaagtatttaaccatttgttattatcaaacaaaggagcacgacatttgcgaattttgctattataaacatgttacttacaggtaaagggtataggaatactcacaaatctatcagtccatttaaagttacttctaccatatctcccacagataaatcgcaaagccgggtaaatccgaagcaactattcacgttcacatcctcaaagagagacctctgtatgtattccgatttgaagatattgaacctgcaaatgggcagtcaaggattaaaaattcaaatatgataaaatgttcaaaacctatccacttaccggttatagagcaagtgctttcgactgggcagcattctgtgtatgagtccttcctcatgaatcaatctgggaatggtatactccgcacagcgcatgaaaaacggacttcttgcgtcccttctttcaaaaagctcaggatgattgcataccttgcggaattgcatgaccagattcatcaggttcgatgccgaagatgaggacgaagtagtggttgatccactggtcaggtgaaggagatcctcaatgcggatcttttgcttcagcgccctgtatagtaacttttgacgtatggtcagcggacaatagaccataatctcaattttatccgacagctcgttctccacatccttctttatccgcctcaacatgaagggtttcaagatcatatggagtctggaaatttgtttttcatcaataccagttttgttctccgcatgcgattcaatatccttggagaaccactcgttgaactcatcgtgggaatcaaataacgttggcataataaagtgcagcagtgcccacagctcagccatgctgttctggatgggcgtgccactgagtagcaatcgattacgacagctgaagcccagtaatagcttccaacgctgcgaggcggcacttttaatggcttgtgcctcatctaaaaccatatactgccacttgatccggttgaaatacttgtaatcgctgaccaccagctggtacgaagtaattaccacatgaaagctggcgtcgcgtgtgtgtaagtgcttttggtcccaaaactggcgcagtatctttcgttcggcaggtgaaccccaatatggtaccaccttaaagtcgggcacaaatctggacatctcttgttgccaattgtgaagcgtagaagcgggtgagattactagaaagggaccccacactccgtagtgctcggctatgtggcaaagaaaagctatcgattggacagtctttcccaagcccatttcatctgccaggataccactgattccctgatcgtagatgtttgcgagccatgtcatacccttgatttggtaacccttcagagttcccttaaacattttgggttggggtaggtccttcatttcgggacggggttctggttttatgtcctccacactttcctgcgcttgttcctcctcttctttttccttctttttagcaaagacatcgaatgccctggttttgtccagatctctttgcatagctgcctcggcattctcctgggccaaaagtttcatctctcctgcgtcatagtcatcttgagctgccaacctggcattggtctcctcatccaattggctaagaatgcgcaattgatcctcttcgctgccctggcccagtttcttagacatgaagtgggcatacagctcggtttgggtaatcaggaagttgagcttacgctgctgacgtttcacctcaataagttctacgtcctgttttctttgttcctccgcctctcgctcctgcttgcgccgctgatcccgctccacgcgctcgtaccgcttccaataggcgagcatttccctggtaagtcgcttggcacgccacacggtttccttcataatcctctgggaattaatagcacgctgtcgcaccactttagcgcacatgccagccacccttttgcaattggccagcatctccttgtgattattactcttgatgcgttgcagtctgccagattcctttttggacatgatctgccagatccgccgacgacgagcggccaaagctgctgggttctttcgctttcgccgaacttttgtcacttgtccctcggtgccgccttctacatctacctcctcctcgatctcttcctcctccggataatccaacgccaagctggccagttctcttttgtagtcaacctcgccaccatcctcgtcatcgtcttcgttgttgggcagtgtgtcaccaaatgtatatttacccagctctgacggaggcacctcgccggattctggtgatcccatgttatcgcgcttcttgcggcctcttcttctctgtttgggtggttttggtccagcttgtgcctcagccaaacgggccataagtatttcctgtttggtgcgacgccgcctcttgcgcactcctgcagtcgccagctgacgctcggcaaagatgtcgtgattggacagcaagccgctgccatagtatgcatactgggcattctgaaagggattaaataatctttttaataacatcagtttatacactaactgcaaaccaaactactagacacatcagcatcactcaccgcggcctttttgtagtagttctttcgctgacgctgttcccgaacgtgctctctcagcagctgctgcacatactcatcttcggtgatagtgggatcgtcgctttccgtgtcgctcaagaggagatcgtatagccactcccgatcgctggtcagatcgttgaagttataaagctgtgctttgacactttgtcgctctgttgggggaaattttaggaggtgtactaaactgctccagataccaactcaccttccttgctggccaacagacgactcttccgcttgctggactgtttcatccggaccacgcccacggtggaggagtcatcagagtcttgtacatcgtgttccctcttgaccacatgctcgtcgtccgtttcctcgtcgctactcagtggcttccgcagacttcttttggccatgttcatgaagggtcgcatgttgagtgccgcctccaagcgctggatgtgcagcggctccgccatggcacgggggcgtggctggggtgccggcacgggcttggcttccatggcagcagcgattttagtcagcttttacaaacaattatcacgtaattttgcttttatgcggcatgcacagaggtaaacaacagtatgaccgcagcgagatcggcgaaaaaataccattgagtaaccctcatatcggcatccaacgccattcgcacagtgggcttgactaccacaaatataatataattgctatccccataaatcgttattaaaaaagttcacaaaattacaaattttaaaatacataaatgcatgaaaaaagttatgtatattacactgtttttgaacttaataacatattttcagaggaataaataggaagcagctctacctatatacgttttccaacactaacattcagctgttagaggttttgttttgttttcagtttgtgcagttggagacgatgatttaatagtctgtagggtcgtgagacgtcgatagttatcgatgtttatgttgccagctgtgcggcactgggatgtcaactgccagtaagaaaagaaagcagttcttagcaagttaacaaataaataaatgacaaaataataacgaaatatataataacaaaataaataacgaaaatatttgcttttgtgcaaatacgctcacagaaatcgataaaagtctcgccgttgctgcaattccaagcaaatcaggcagtagcatttgtgatgtcctggtcaagtgcactaatcaaagatatctcgaaaccagaaaatttgatcatttcgtcagaaatcgcagtggtcatagcagacaagtttcccaaggcgcagcatcactacttggtgctaccattggccgacattcccagcatctttcacgtgcgcaaagattgtgcttccgtctccatcgttttactattccaagtaacatttttctcgctccgtttagttgaaccggagccatctgtcgcttttggaggagctgcatctgctggccaggaacgttgtggaagtgaaaggagtccggtggcaggacttcaacgtgggatttcacgcggagccgagcatgcaaaggctccacctgcacgtcatctccaaggacttcgtatca

SEQ ID NO: 40265 - DNA, 4493 bp, DROSOPHILA
gcataaaagcaaaattacgtgataattgtttgtaaaagctgactaaaatcgctgctgccatggaagccaagcccgtgccggcaccccagccacgcccccgtgccatggcggagccgctgcacatccagcgcttggaggcggcactcaacatgcgacccttcatgaacatggccaaaagaagtctgcggaagccactgagtagcgacgaggaaacggacgacgagcatgtggtcaagagggaacacgatgtacaagactctgatgactcctccaccgtgggcgtggtccggatgaaacagtccagcaagcggaagagtcgtctgttggccagcaaggaagagcgacaaagtgtcaaagcacagctttataacttcaacgatctgaccagcgatcgggagtggctatacgatctcctcttgagcgacacggaaagcgacgatcccactatcaccgaagatgagtatgtgcagcagctgctgagagagcacgttcgggaacagcgtcagcgaaagaactactacaaaaaggccgcgaatgcccagtatgcatactatggcagcggcttgctgtccaatcacgacatctttgccgagcgtcagctggcgactgcaggagtgcgcaagaggcggcgtcgcaccaaacaggaaatacttatggcccgtttggctgaggcacaagctggaccaaaaccacccaaacagagaagaagaggccgcaagaagcgcgataacatgggatcaccagaatccggcgaggtgcctccgtcagagctgggtaaatatacatttggtgacacactgcccaacaacgaagacgatgacgaggatggtggcgaggttgactacaaaagagaactggccagcttggcgttggattatccggaggaggaagagatcgaggaggaggtagatgtagaaggcggcaccgagggacaagtgacaaaagttcggcgaaagcgaaagaacccagcagctttggccgctcgtcgtcggcggatctggcagatcatgtccaaaaaggaatctggcagactgcaacgcatcaagagtaataatcacaaggagatgctggccaattgcaaaagggtggctggcatgtgcgctaaagtggtgcgacagcgtgctattaattcccagaggattatgaaggaaaccgtgtggcgtgccaagcgacttaccagggaaatgctcgcctattggaagcggtacgagcgcgtggagcgggatcagcggcgcaagcaggagcgagaggcggaggaacaaagaaaacaggacgtagaacttattgaggtgaaacgtcagcagcgtaagctcaacttcctgattacccaaaccgagctgtatgcccacttcatgtctaagaaactgggccagggcagcgaagaggatcaattgcgcattcttagccaattggatgaggagaccaatgccaggttggcagctcaagatgactatgacgcaggagagatgaaacttttggcccaggagaatgccgaggcagctatgcaaagagatctggacaaaaccagggcattcgatgtctttgctaaaaagaaggaaaaagaagaggaggaacaagcgcaggaaagtgtggaggacataaaaccagaaccccgtcccgaaatgaaggacctaccccaacccaaaatgtttaagggaactctgaagggttaccaaatcaagggtatgacatggctcgcaaacatctacgatcagggaatcagtggtatcctggcagatgaaatgggcttgggaaagactgtccaatcgatagcttttctttgccacatagccgagcactacggagtatttgtgcccgactttaaggtggtaccatattggggttcacctgccgaacgaaagatactgcgccagttttgggaccaaaagcacttacacacacgcgacgccagctttcatgtggtaattacttcgtaccagctggtggtcagcgattacaagtatttcaaccggatcaagtggcagtatatggttttagatgaggcacaagccattaaaagtgccgcctcgcagcgttggaagctattactgggcttcagctgtcgtaatcgattgctactcagtggcacgcccatccagaacagcatggctgagctgtgggcactgctgcactttattatgccaacgttatttgattcccacgatgagttcaacgagtggttctccaaggatattgaatcgcatgcggagaacaaaactggtattgatgaaaaacaaatttccagactccatatgatcttgaaacccttcatgttgaggcggataaagaaggatgtggagaacgagctgtcggataaaattgagattatggtctattgtccgctgaccatacgtcaaaagttactatacagggcgctgaagcaaaagatccgcattgaggatctccttcacctgaccagtggatcaaccactacttcgtcctcatcttcggcatcgaacctgatgaatctggtcatgcaattccgcaaggtatgcaatcatcctgagctttttgaaagaagggacgcaagaagtccgtttttcatgcgctgtgcggagtataccattcccagattgattcatgaggaaggactcatacacagaatgctgcccagtcgaaagcacttgctctataaccgtcttttgcattatcgaagagttttggagaaatacccactgctggcctaccgtcgcttttggtggaaaaagcagccggacagtagatatcaactgctggagccgatgttggaaaacaaactagctctcgactatatgccaccaaacagtgtccttaagaacttcatattcacagcaatgaccgccaacgaaagcagcgtttacgcatttggcgattactttacgtacaatatgcaggaaactatcgaacaccgtgtaattcggtcaaagattctgaagaagaaaacgtcgctaatcgaggagatggaggatgtgtccaagcaaaagctggaaatcgagtctgtggaggtgcaaacaaagtcgaatgccaaaagcgatgttaaggtgacgacgctgctgctgctaccagagtttccgcatcgcccacgaaagccaagaaaatacgtatgcgaaccgctttccatgccacgaatactttacgatttgggacaaaaagttcaagctgtgcatagatatttatactgcgatagtcgatctgcagcgtggtcccagattcgccacaatcagtgtgagaatagccagggcagggagcttgtctccagtggattggccttgtgcaagcctcatggtggatggtcctcgattgtggtgcccgacaaggaaaccctgattaccgatgctggtaagctttttgttcttgacaacttgctaactcgattgaaggcgaatggacatcgagtactcatatactcgcagatgaccaagatgatagacctgctcgaggagtacatgtggcaccgcaagcatcgctatatgcgcctggatggctcaagcaagatatccgctcgtcgcgatatggttgccgattttcaaacgagagcagatatcttcgtgttcttactgtctacgagagccggaggactgggaattaatttaacagccgccgatacgctcaagtccagcgttactccctacagaccaaagccgaacctaatccgtagtgattccccgaaattagagaacgataagcgtaatgggctggacttggagcttctggataatccagagataccgagcgtaaagcgagtacgatgggctccgatgtatggggaaaggagcccgagtaagaccggctttaccagcgttccactaagctccaaaaaggcgcagtttgatcatgatacgacagatgagttaatactggctaacgagcttcgattagcggtgcatcgtgggggaggttccatagatcccgacaagaactacgagctgagggctcgactgtcgcccttgcaattgccgtacagtcgagtgcagcgaattctgaaggagtgcgagttgagcgagaggaatcatcacacctatagtatacccatggactatgggcggcaattggttgccatggtttgcaagatcaggacggataatctccccgaactgaaacttcgcttggcctccttactgcggcaaaacaaagcgcgcttcttcaatcgacatttattcaacgaaactggcttgattgaggccacattgccgagcgtaacaccattaagctttgaggaattcaatcaaacgttgcgaattgatgctttgtggtgcaaagccaccgatagtaccattaccgatttggccaaaggatctgttttgttcaaatgtcggcctctggacctgcaagaggtcgcgtacaaactcaggcagtgcaactacaagattgtacataaggaggttggacactgtccaaacaagccgctcgtcgagttaaatgatcgtcaaatggcccgctatcaggagtttcgtaaaaaccttcttcaagacatagatgtcgtaaagatctatgacaatgtgcgtgtccagtag

SEQ ID NO: 40266 - protein, 1477 aa, DROSOPHILA
MEAKPVPAPQPRPRAMAEPLHIQRLEAALNMRPFMNMAKRSLRKPLSSDEETDDEHVVKREHDVQDSDDSSTVGVVRMKQSSKRKSRLLASKEERQSVKAQLYNFNDLTSDREWLYDLLLSDTESDDPTITEDEYVQQLLREHVREQRQRKNYYKKAANAQYAYYGSGLLSNHDIFAERQLATAGVRKRRRRTKQEILMARLAEAQAGPKPPKQRRRGRKKRDNMGSPESGEVPPSELGKYTFGDTLPNNEDDDEDGGEVDYKRELASLALDYPEEEEIEEEVDVEGGTEGQVTKVRRKRKNPAALAARRRRIWQIMSKKESGRLQRIKSNNHKEMLANCKRVAGMCAKVVRQRAINSQRIMKETVWRAKRLTREMLAYWKRYERVERDQRRKQEREAEEQRKQDVELIEVKRQQRKLNFLITQTELYAHFMSKKLGQGSEEDQLRILSQLDEETNARLAAQDDYDAGEMKLLAQENAEAAMQRDLDKTRAFDVFAKKKEKEEEEQAQESVEDIKPEPRPEMKDLPQPKMFKGTLKGYQIKGMTWLANIYDQGISGILADEMGLGKTVQSIAFLCHIAEHYGVFVPDFKVVPYWGSPAERKILRQFWDQKHLHTRDASFHVVITSYQLVVSDYKYFNRIKWQYMVLDEAQAIKSAASQRWKLLLGFSCRNRLLLSGTPIQNSMAELWALLHFIMPTLFDSHDEFNEWFSKDIESHAENKTGIDEKQISRLHMILKPFMLRRIKKDVENELSDKIEIMVYCPLTIRQKLLYRALKQKIRIEDLLHLTSGSTTTSSSSSASNLMNLVMQFRKVCNHPELFERRDARSPFFMRCAEYTIPRLIHEEGLIHRMLPSRKHLLYNRLLHYRRVLEKYPLLAYRRFWWKKQPDSRYQLLEPMLENKLALDYMPPNSVLKNFIFTAMTANESSVYAFGDYFTYNMQETIEHRVIRSKILKKKTSLIEEMEDVSKQKLEIESVEVQTKSNAKSDVKVTTLLLLPEFPHRPRKPRKYVCEPLSMPRILYDLGQKVQAVHRYLYCDSRSAAWSQIRHNQCENSQGRELVSSGLALCKPHGGWSSIVVPDKETLITDAGKLFVLDNLLTRLKANGHRVLIYSQMTKMIDLLEEYMWHRKHRYMRLDGSSKISARRDMVADFQTRADIFVFLLSTRAGGLGINLTAADTLKSSVTPYRPKPNLIRSDSPKLENDKRNGLDLELLDNPEIPSVKRVRWAPMYGERSPSKTGFTSVPLSSKKAQFDHDTTDELILANELRLAVHRGGGSIDPDKNYELRARLSPLQLPYSRVQRILKECELSERNHHTYSIPMDYGRQLVAMVCKIRTDNLPELKLRLASLLRQNKARFFNRHLFNETGLIEATLPSVTPLSFEEFNQTLRIDALWCKATDSTITDLAKGSVLFKCRPLDLQEVAYKLRQCNYKIVHKEVGHCPNKPLVELNDRQMARYQEFRKNLLQDIDVVKIYDNVRVQ

SEQ ID NO: 40267 - DNA, 4437 bp, DROSOPHILA
tactgcattacttctggacactaattacaatggcaacattagtaagttcgcatgaatgatagctttaaaaagcttaacctttaaaagctgcttctgaataatttcagtgcgtcagtggatcttccagacctgcaatgagtatggttggtatcagacctctggttctagtgcccaaccatttggtaccaaattccctgttacctattataccaccatgtgtgccgatttatatggctcagagtacagcaacgagttcattagcaaccaagtgagcatcaccaatcagttctttggtggattatttcctaatgtggaaaacgtctacctcacccatgggcaattggatccctggagggcgatgggtattcaggacgaaactcaggccactattattccaggtgattagatgggactacatcaccgaattaggaatatttttactttttccgtgactttatagagcatgcccattgcaaggacttcaattcgatcagctcgagtgacactgctgaaatgagagcttccaaagaacgtattgccgaactggtacgcgagtgggttaaataatcgtagatatggtcgcaccgaatggaaaaccacaaataaaatttaacggattttacttataaacaaaccgataaacatcttcgttttaaaatttaatttaatgtttagggcttcatctaattaaaactatatgtcaacgaatcccgtaaactggctaaacattaatagaaaatgaaagctttgatttataaacaaaatctatagatcggcaaatctcatagattaggtaataatgttacggctgtgattttgattggccgacaataaattggaattttcaactaatccaatgtttcgatcgatttatgatggacagcgaatgcgaacatctaatcgcaacttaggaagctatcatatcatgtcgctggtcacttatcaactaattaatttacaatccttatcgtggtaggaaataactttagaatgtgacaccgttacctttaaaaccataatcgaacccgatagttgcctcatttgtgaaaatggctgctctgcgtttggtctgcctttttgtggtcttggccataggacttgtccaatccctggacattccgaagatcaaagatgtgcctcttttggtcaagactctaaagaatttgaaccgtggtccaccacaccaggtggtgaccaagcgtgccaatgtccaggagaaatggatcacccagaaactggataactttaacgcgagcaacacgcaaacctatcagatggtatgtatattcggaaggagaagtatattgctcagtaaaaatatccataagttcgaaacattcatttgagttagacaaaaataagataacaccaagagcttgaacacgtgccattttacacgtttcagcgttatttgctcaacgatgagtttcaaactgagggaagtcccattttcatttacctgggtggcgaatgggagattgaggagagcatggtaagcgctggtcactggtatgatatggcccaggaacacaatggtgttctcgtctacactgaacatcgttactatggtcaaagtataccaacatcgtgagtaatcaatgggcattcattcaatgcattttagttattcatccttttttagaaccatgtcaaccgaagatctcaaatacttggatgttaagcaggccttggccgatgtggccgttttcattgagacctttaaggcggagaacccccagctggccaactccaaggtgattctggctggcggttcctactcggccaccatggtggtttggttcaagcgtctgtatcccgatttgattgtcggtggctgggcctcaagtgctcccattttggccaaggttgacttcaccgaatacaaggaggtggtgggccaggccttccttcagttgggcggccagaagtgctacgataggattgagaacggtattgccgaactggaatccatgttcgctaataaacgaggagctgaagctagggccatgctgcgcctgtgcaacagtttcgatgatcagaacgacctggacttgtggaccctgttctcaagtatctcaaatattttcgccggagtcgctcaataccaagggtagggttttgtattgctatattgcggattgtaaatttaatcttatatttcagcaccggcgacattgagtactactgtgactaccttctgagcttcaatgatgatgccacggccattgcgaactttgtgtactgggcctggggtatgggcaattgcatcgatgccaggtacgaaggtagtgttgagtactatctctggggagtggaccactttgacgccagtaagtgaccaattcaatgctgatccaagaaagctttcttaaatacttgccaaatctacaggtcgcccgtggtactatcagacctgcaatgagtatggctggtaccagagctctggctcaaggaatcaaccttttggcaccaagttccctgccacactttacatcaatctatgcggtgatgtcttcagttcgcaatacggaaatgaacagatcaacaacaatgcagccagtaccaacgaatacttcggcggcatggagcccggcgtggataatatctacatgacccacggcgaactggatccctggaacccgatgggtcatggagtggagcagggagccacggtcatcgccaacgcatcgcattgctcagacttcggatcgatcaagtccacagattccgacgaaatgcgggcctctaaggagaaacttgctgaattggttcgacagtggttggcctagatatgttggctattaaaaaatccgtaagagttttgtcaaccagaaaaaatatttttggaaacggtcttagaaatttagttttctaaataaaatcattttgaaaaagttacaataactactttttatttctttaatatgtatctttggcataaataaactatgaagaaaatatggcatatatttaaatcgtttttatttcagacactattttaggcttttcttgaacgaaatttaaaagttatttaccaaaaactctaattaaaatggggttttaaacaatggctatcgcaatatttcgtaatacgccgaaggttatgctattaaagctaagtcaaaaacaaagtaatggaactcaaaaaaaaaaaataaacattctaaatatactgtgtagatattttagtgtataaatccggttatacacatatttgtatatgtatgtttctataggttttgtcttctaagttttgctaatagtttacttttttgatagagctataacgtttaacgtaactcttttgtttgcacttacataaaaatgatagggaatgaaattgattcatttttcttacatcattttaagaccttagcttattgaccaaggcccctaaaaaagtaaatatttggtaacaaaacaatgccaccaataaattgccacttttgcttatataggattaaattgtggaagattgcagggcacgtgtacatgtaaactattcaacaaactaaacttttatactattaagaaaattggtttcataaaaagtttgagaaattatttcatatcgattatgacctttcccttcaatattggagtttcatttaaattttaaaaccaaaagtaacgcaaagaagagtattaatctaatatataaacgtgggtatccaggctagttcaccaagaactttagtcaaatggtgtcccttaaaatttaacataatccactacttgctcgcttttttttaccttttaaatgaatccctcttttaaaatgtgtgtttataaacattgatataaataattgacggtttaaatcaagaaaatctgtatataacatttaaacatagttatataaatacgatatatacaatcagagacaatcttctttgtctttgcgtggacgaaacgcattctaatgaacctagatcaattaacgtgatgcaagacatgatacgaacaaagaaccctcgactttatcagtgtaatatatttccgatttttgtttgctttgcaattcagcgcccaaaggccctatctaaggttaatgttactgtcagtagcgaatattttccaataaatagtcggccaccgatggaggaaaatcattcgcaaacttgtgaactatccagcaatatgaagtataccctagtagtgctcgccctgcttgcacctctgactgcagcagctagtctgggtgaacagaaaccggaggcgaatgcgttcgtcaaatctctgagagaactgcaccgaggtcctccagttgaaccaatgaagaccagggctaaggtggaggagcgctggatcacccagaaactagataacttcgatgacagcaacaacgccacctggcaggatgtaaggattggcttcacataaagtatggtcagctttattcatagctttattttattccctagcgaatctatatca

SEQ ID NO: 40268 - DNA, 1472 bp, DROSOPHILA
gttacctttaaaaccataatcgaacccgatagttgcctcaatggctgctctgcgtttggtctgcctttttgtggtcttggccataggacttgtccaatccctggacattccgaagatcaaagatgtgcctcttttggtcaagactctaaagaatttgaaccgtggtccaccacaccaggtggtgaccaagcgtgccaatgtccaggagaaatggatcacccagaaactggataactttaacgcgagcaacacgcaaacctatcagatgcgttatttgctcaacgatgagtttcaaactgagggaagtcccattttcatttacctgggtggcgaatgggagattgaggagagcatggtaagcgctggtcactggtatgatatggcccaggaacacaatggtgttctcgtctacactgaacatcgttactatggtcaaagtataccaacatcatctcaaatacttggatgttaagcaggccttggccgatgtggccgttttcattgagacctttaaggcggagaacccccagctggccaactccaaggtgattctggctggcggttcctactcggccaccatggtggtttggttcaagcgtctgtatcccgatttgattgtcggtggctgggcctcaagtgctcccattttggccaaggttgacttcaccgaatacaaggaggtggtgggccaggccttccttcagttgggcggccagaagtgctacgataggattgagaacggtattgccgaactggaatccatgttcgctaataaacgaggagctgaagctagggccatgctgcgcctgtgcaacagtttcgatgatcagaacgacctggacttgtggaccctgttctcaagtatctcaaatattttcgccggagtcgctcaataccaaggcaccggcgacattgagtactactgtgactaccttctgagcttcaatgatgatgccacggccattgcgaactttgtgtactgggcctggggtatgggcaattgcatcgatgccaggtacgaaggtagtgttgagtactatctctggggagtggaccactttgacgccagtcgcccgtggtactatcagacctgcaatgagtatggctggtaccagagctctggctcaaggaatcaaccttttggcaccaagttccctgccacactttacatcaatctatgcggtgatgtcttcagttcgcaatacggaaatgaacagatcaacaacaatgcagccagtaccaacgaatacttcggcggcatggagcccggcgtggataatatctacatgacccacggcgaactggatccctggaacccgatgggtcatggagtggagcagggagccacggtcatcgccaacgcatcgcattgctcagacttcggatcgatcaagtccacagattccgacgaaatgcgggcctctaaggagaaacttgctgaattggttcgacagtggttggcctagaataaa

SEQ ID NO: 40269 - protein, 143 aa, DROSOPHILA
MAALRLVCLFVVLAIGLVQSLDIPKIKDVPLLVKTLKNLNRGPPHQVVTKRANVQEKWITQKLDNFNASNTQTYQMRYLLNDEFQTEGSPIFIYLGGEWEIEESMVSAGHWYDMAQEHNGVLVYTEHRYYGQSIPTSSQILGC

SEQ ID NO: 40270 - DNA, 40766 bp, DROSOPHILA
atttagatttagaccagggcgttgtagttaggtttgtggcagtggtgaaagtgataaaaaatgtaaagaaaaaacaaaaatttgccgtcttttgcaaacaaaagacctacatcattaaatcgaaaactaccgtatcttttacttgaatagaagaaactctggtgcagagtgaaataaacacgatgtgaaacgtgtctgagttttaaaataatgagcttaacatattaattataattaaatacgcgtctagataaataatcgtagtataatgtatgtgtgtgtatgttatcgtaggaaaagcctctgggcgcaactttaaacctaattgtgcttaacagcgtgggtgacagtccggactcatcttaagttctttgggtctatgctaggccctgtatactagttttatatgcaggcattccatagagccaaggaaccgatctgtcaaaaaaaatggtcggttgttcgaaggcggaaactttgtataacgtggtgtagttacgtttctatcgaagtagtcgaaagttattcaccaataaaaacttaatcgttttaggattaggatcgaatattaatattatgtatgggtagtagtatgcatagtacagtaaacagttaatatgttgtaagctttctgtaacatttctttcaattcaatttgtatgtgtaggtttttctgtttgtttctttctttttaaataagcaaaaataaaacattctttcttgagatcaaacttaacgatactttgcaagctttttctttaaggtttttaattacggagagttatataattaatttagacaaatattttgctttcaaagtgtcggaatttaaagggttttctttcgttttgtttgagtctcttgcggatctctttacacttttatgtgatcttggcctcaatgaacttttgcattcttgcatttatttattcaaactttagtttgcatgtttcagcttgtttacgtttttgttgtgttttgttttcctttgcttttttttaaacttttgcttgtttaatcgctatttaaaattacttaaaatactagaagagcgtaacatgtttttgttggtttctttatctggttcctcttatgttgtcgtgtaagcctgtgaagtttaacatctgggtatattttatcgttcaaagtccgtgggtttggttgttatagtggtttagacagtagcgatgacaatcaggaggtgtgcaagctcagctacgcgattcttaagatccggagcggcgcgctctaggttttcattagcaaaatcgcatgatggaaatatgtgtaccacgtaggctgcttgttcacttcctggaatgggtatgttcactatgccggctgccattttctgttgcaaataggtaatgaaaccggtctggaggttccttgaatgctgcagtacatcggcgtgatctcttccgcatggcaaagccaaaagcatgcaatgctccttgtcaacctgggtgttttgagtaaatgatattagtgatgatcacacctttaaatttgtttgtatatacatacctgcatcttcttggctactccctccagttgtgtctgctctagtcgcattctttgcgcaatcctcagcagcggtgtattagtctccaccaaactgggaagcgacgctcttgccacattagggtttccgtgcacaaagtgcatttggacagcggcctgatctgttttaagggccaataagccctgccacattaccggatatcgctgcagcagagtaaccagcgaatcacctggtggcggtgccatcgctggtggtgcttgctgggaggccaattccatgcctgcaggcaaagcaggtggcagatgttcctgctgttgttgaactgcgattgtaaagtcattcgttaaatatacttcattacattggtttgcgatcagtagatacttaccgacagctgcaatcattgacatgcggtccatctcatccaactgcatatccattgccttgcctggatgatggtggcttcctggctgcacgctcccatcacgaccgataaacggacttccagaggaaactgcaggcatttgttgtggcaccaccacactaatggttgcagttgggcgatgggccggcggtggttccagttgtaaggcaccactatcgtacaagccccttgatgcaatttcgctgaaatgggccgggggaatgcgcgtattgtgtacgtaaacctgagccatttgtggagagtctggaagaaataatgggttgttataagatttaaagagtcaataaaactgtaagaacctaccagctgcagtgcgatcctgaggactctgcaaactgtggggaactgcgatggtccttggaggtccactaccggggcgtcgtaactctagcggcggactgctgcccatcttgtcatcgtagtcgccacctcgcattaaatgatgctggtagagcataaaatccctggatgcagtcactcctcgatacgtagaatcattctgaaaaaaaagagtggcagacaattttttttgtaagtaaatgcttcaatcaaaatacccggattaatatgactacacgaagaacttaatttggttacgctacatgaaagctccgcaagtaaaacttgtgtattaccggtgttatgggcgaagcctgctgatgagctggaggcggactctgggttcgccgtccactgacataagcacccaggtcatgctgaatccaaagttagcaattcgattgtaaaataatttaagggttagtaaagaactcaattttaatttttaaaggttagccataattaagtttaaataaagatacattttaaggacatgtaattcgcttaaattaaaagtattattcgttgttacttaccagactggcgtcaaaaggtggtactccagaaatgccgggtggtaaaaccaatggagatactctcggctggctctgcgggcttatgtttgggatggctgtgcgtatacctgtcaagattttaaagttagctatggccgtaaaggacaatatgggtattctgcaacttaccagctactggtacgacggaattgacctgctgctgagctgttttcaagactgcagctgataccggtggtgggctgcccacacttcctggcataatctgtccagactgtagtccgtgcagtacgggatttggctttccaggcggcggtgaagggttcaattgatgctgctgaggctgcagatgtgctggtagtttttgctgcagtagcatgccaggatgggtaggcataattattccgtgaggaggcatttgtatctgagctcccttttgctgattgttttgcttatacaaatgctgttgttgctgctgctgaacggctggcaaagtgggtgtcaaaacagtgggtgcatagctatagttcggtttagccaactgcaggtgggggcctgttgatgaagttggtggtagctgctgttgttgcggttgaggcaccaccgacgcctttgagctgaccacgtgcaatatttgcggctgggctgctgatgccgcttgcttgatcaccaccgtttgcggctgctgctgctgcggacttatagaagctcctggccccaattgttgctgctggctaggaattcttggagagtgcggagagtgtgctgttggtggcggcacgttgacctgaagatgttgttgctgctgcaggtgacgtgcaatgatctggggctgcactagttgttgatttcctgcagtatccgtgagcaacatgtgaccggaatgcggtgcgtgctgtggtggttgagctactgcttgctttgtgggcgtcaattgctgctggatattcttttccctattcaggacgtgagctttcagtggttgaggtggcctaacagtggtatgctgcgcatggtgcagcacagtgggcaggggattctgttgtaggattatgggttgttttgctggagccacaatttgcggttgttgctgctgaataacctgcgaggcgtttcctttcaccagaacacttacaggtttgttcaacaaagcggctgccgaggtctcaagttgtaccgattttcctaaggctgtaataggatttggaagtccagatggaatcagagtagtatttatctgtaaattagcttgttgttgtggtggttgctgcggatgttgttgctgctgctggtgttgtagctgcgggggaggagctgcttgaccgtcttcattgctgctgttggcaggtgcagcagcggtagctgctggaagattaccctctttgccctggggcattccagcggtgataactccagtaactggatcaactagagccttgctgaccgcatccgcaaccccaccggttatcttttgagtagcaggggccgctgtctgatgcatcggaagccccccactgggaatggatgagttgatggcctggtaagattcaatctctgctgccgcaatagcttttttcttgggatgttgaggcattgtaggtttgacggggaccatggctggcacaggaacggtaaccggggcagctacactaacaggcgctggtgtagaaattggtgtcacaactgataccggttccacttctttagcatctaattgggggacatgcgactccacaccagctccttctggtggtgccaaatgactggcggcaacagttgcattagacgcagtaacttcttcaatcaagtttgctgtttgttcaccgattgtttttctgtccttggaacgccttggacgacccactgcattaatgatctgtaccgcatccgtctttttggcttgagcatttctgccagaacgtcgtggtggagtttgtgcaccttttggcaaatgtggtcctgttccagttggcgtgttggtatttcgaaccacatcttcaatgatatcgtctactgtgctgcgatcctccttttcttgtaaacggcgagatttgcgtgtgttacaagactcggagttgtctcctccgattggatcagtatttgatataacctccgactgctgctgttgttgctgctgaattgtttgctccatttcactaatattcttaatcgagggttgcgttttattgatggtaagaataagtcgtggtcgttggtcctcagcactgggggcaacagatgatattgtcttgggcttgggctcttcaccaccgtcttcatggaactcgtagatatcctggccagttcctacttgacttgcgacttggttttgttcttgagcctgagttagggcttgattcctcgcctttttctctgcagctgtcaacacagagctggtaggaataggagttggcagtggagtcgaagatgttgccgacgtcaccatttccattccctttcgctgaatatcgagctgctgctgctgaagttgctgttgctgcaatagtagattccttggaggacgtcctttcctgcctctggttacaggagctgttacgggttttcttagcctggtttgcaccccattgtcacccggttgtacaaccaatgaatccactccaggcggcgcagctgttaccgagttaagcgggaatcctcccactttcttcgcccctcttggctggcgtcctctcttagcactacctccccttcctggaggtctcccaacagtgggtataggtggctttgcagggggcaactgcctggtctccgtttcgtcctctgtatcatgatcgtttgagttgttcacactcattgaagttgttggaagagcagtttcttgggccatagactgattcccaggctgcggattgggaataggagccggtgcaattgcctgcatttccactgctcgcttcgcatccttactagccaatggagtatctaatttcttaatgacactgtctatatttacctcctttgctgaccagtaatcgctgtcaacttcctttgagtcctgttcgatcaactcatcctgctttggctgcgaaatcttaattagattctcctccgttaacagagagccaaccgtatttgccgagattactgccaaacctgttgtaggagtgggtgtgcgaatcaccgaaacactttccgatgttttctgagcggacatagctggtgttggttctacatgaccaggtggagtgctatccttgccctggttttgaggatagtgtatggcattaccttgggtttgtggtggtggaacttgattttgtgcaacaatatgttgttggacaattattttcggtgtattttgtatcacattcaaaggcgtttgaagaggaagatttgctcctggcgacgacagctgtttctgatgcggatgaccagacgacgattgctggtgtggtaattgttgctgttggtttggctgcgaatgagatccaactcgtgttaatatggcgggaggctggactccctgattaacagaaaccaaagtattcggtttgcaaggtgaactgtgggacaattgttgaggatgttgctgctgaggtacacctcgcgctggaagctgggaattatgttgttgggatgcaaaaatcgacgtagaacctcccaaatggccgactccttgaggcgacttttgctgttgctggggaccatgcatttgctgcagcttttgtatttgctgcagttgctgttgctgagcctgatgctgttggttcaactgctgctgagattgatgttgctgttgggataggtgttgttgttgtgcctgattttgttgctggacctgatgttgctgttgggattggtgttgctgaatttgttgattaaactgctgctgagcttgatgttgtttctgagtcggatgttgttgggcatgaagttgttgatttaaatgttgctggttgtgatgttgttgctgctgctgagcttgatgttgctgatgcatttggtgttgcggggctgacgttatttgttgcgactgaccgtgaagttgttgctgctgcatgtgttgctgtcgttgtatcatttgctgatgcatgaactgctgcatgtgctgctggtgctgatgtgcagtcatcttggctatcacctgtggctgctgctgattctgatgggcatttaaatgcacgttcttgtgcggcggaaggctccccaagggtggcgagctggccacttgcgattgggttgcctgttgaggctgtacggtgaccactttacttatgatcgtcggatgatgtggcacctgtatcggtgtcattttttgtagcggaatagtcattaactgcggtgtcgtctgcacctcagccacagatttcggcgagggttgttgtggtacctgctggtttctgggttggtaactgtttactttgctggtagtaggcgaattgctgctagacaacactcgagtcgtgggacttgccaatggactaatgttgctactttgcgggctggttattagggcatgttgctgctgtgtctgctgaacctgttgctggggtgatggttggcttaccattggacgcccaacaggactcagttgacccaccagcctactttgggctacaccacgacctggtgaatgaagcggactgtgtggggatggggctcgaatgccaaccatataagttccaggttgctgaggatgatgtgactgaggagacaacaccatttgggggaccgcaaagtgaggtgtttgttctggtatagatatcgttggcggttgcattatcaaagattgcgtccggattgcttgctgaggtgtaatcggaccctgcttgggagttgaagcctggggcatggcattctgacttgcagttggacttccaaatgatatggatgcagacgctgaagctgtggcagatgccgcgctcgtgttcgagcaactgcttatcacgttggacagatccaagttgatcacggaatttgcacttatgccgcttcccgttgaatgcggtgcaggcaggacggtctgcacaggctgcaccaaaggctgttggagtttacttatagttggtggttcaatcttaacaggagaagggggtaggcctgctggtactgtttttggcgtatccaaaaatggcaacttagtgatcacggaaggttgcggtgtggactcgttgctgagcttcggttgagactctacgttaggtatgtctatatttgctgtttccctaggagtaggactgttattgctaattgatttctccggcgacgatgagctctgcacagtttcatcaatcttgagactaggcccactactatccgcttcgtctggattctcttctgtgtcagtatcaatctgcagatccctttctgactgcggagtatcagccttgatgtccatcatatcctcgtgttttaaactttgcactgccttgttgagttcttccggatccaagacctcaacgacaggttctgattcaatttctgcctcaggatcggggtctggttcagcctctctttcgggttccatttctggttcctccagaatggacgcaggctctccagctgtttcaatcgcttttgcagctaaagctgcctcttcatccggttctgctatgactaaagttggtgtttccaattcatttacagagctcatttcatccatgccatcgagggagtagtccgtcgtagaggaagtgccaaagctttcccccaacagtgcggatacggcactctcagtctcctcctgagagatggtcacgcgggacttgctttcctctaacttatccaacggtttagtcgcacgtggaggggatgctaccggaatttttggctcatctgcaatgttatctagtaaagatgtagaattaaattctgcggaaatggattgcacggccgattcactaatcctatcgtcaagctgaccatcgaaaccgggaatgaagctttccttctttttgcattgagcagaagcactggtaggcgaattatctaatcccggggctgcactgactcccgctgctgtcgaagatgtaggagtggtagccaaagcagaagaggaaataactgtaccactgcttacaggtgtttctgcagactgagtggatagcgtggaactgttggctatggttggagttttgggtatgggactaattaggcggggtttctcacgtgaaggagtgagaccatcgtttccacgactcgagggcgttgtaggtttcgcttttggggtgtgcaacgcatcatcgtcatcgtcgcctattagacatggtaaactaggagatggcttacaaacgggtggcgatgagatatgcttggcgtccaattgcaggtctgcatgtttgctagcagcttgaacgttgacagtaagctttccaggagtaggaggtgcggatgaagtggaagccacatttggcagggattcccttcgctgttgttgcaacaacttttcttgcttttcctccttagaccgcttcttctttttcttcttgtctttacttttatgctgttcctgctgctccgatttgacaccctgtttagtcatatccactgagttgttgtcttcgttatcagagaatcggaatacatctgtcatatccgatctatatgtggcggccgttgaaggagtggcttcttctgaaatcggcttggtatcaaagtcactcattagttgagcctctagagccctccctgcttcatccatatccacgctgttatcatcatccaccttagtttcaaccttggaagatttctggtgaatttgattttgctgttctcgttgagatttctcgcgtctctttttctcgcgcttctctctccggtgtctttccctatcagcatgagaagatgagctgctgcctcccgataggcgacttctctccagctgctgttgttgctcaggctcatgcacagttaattgaatatgtgcttcctcatttttgctgttaggtgtggaaggttcttgtttgtacgtttgcaaagcagcggagacaattggaccagtagtagacacggaactaggtataatgtctttattggtttccgcttgctcgggaaactgtgattcttcttcatcggaaataatgccaaatataaactccattttatcctctcctctttttgaagtttgggccgtcgaaggcgctgacgttggagtggcaggcaaagaaggtgaggtagaaggatgggctccacttgagttgtatattttggtattgcaggaattatccatgctcttcgatttctttgacttttttagtcgatgccgctcttctttcgataacttttcggaacttgtatcattggtggtgggcgaattgggtacagtggcttccgtcatatttctaagcttctcacgtttcttttccttcctttccttatgctttctcctttcgccggctgaaatctctaacggtattgaagaacactcagtttttagatcatcaaaattatcgaacttcgtcttgcactcggaggatgaatgaacatcaaatatggagggagttaacggggtcatcaccaaaggagtttgagctgctgaagtatccgctgtggaagaggatttcaaacgtcgcttgctctttttatgttttttgcgagtttctggagagtactctttaagctttccagtataggtgtattcagaagaattatagaaatctccaagctctgtctttatttcacgttccgtcttcagtttcctctcctctattgaagaatttgaatcatgccgagacttgaacttctgttcctcgtcggaaagctgttcccgcttgatttcctgagcaggagctataggatgctcttgcttaatagtcaaatcaggagccggctgggattgagactcagaatcagatgcaatcctagtggagttggagttcctttttccaaaatggctatgcttcatcacattccttcttatttcatcttcggagctatcatcaccatcgcaaagtcttcttaaattctgttgcatctgacgtactcggttagcatcagctagggtgcttgcaccctggttatcctgacctccgtgctctgcatccgaatcggaggaaattcgccgttggtgggtctcctcatcgtcatcatcatcgctgctagacagtccaggataacgaccatggaagctgctactaccactatttcgatgttgtcgatcctcgaactcagtgtccgagtctccatcatagctagtagagcgcttctttttggcgcgagattgctttagctgcgagaacttcgccttgatctttttttcctccgcctggcgttgcatattcttgcagctcctggcttttactttgtcgtacatagatacatttggacaatcatccgggatatcaaagatggaatgcttcttggaggcatcatctgtgtcgtcagagtctgcggagctcaacatcatcaatttggcgcgaagagatttagatgaagaatgatgtccttcatcagatccccgtgatgacttccgttccacacttctcctgtggtgttgatgatggagttttccgctcgaagtattagtggctgctgagctgagctctccagcagacccacttcccgcagcagagattctcctgtgaggattatgctgctgtggtgtatgctcttcatctgtattcgtggattccgccaccgaatgccgctttttttcccgatggtgatgatgatctcgcttactcttatgcctagaagatgaactatttgcatgactactgaagtgctccctctccttttctcttttgggttgatgagactgcagctcctcctcacttgtgtttaagttgtgcttggtttgggaaatgggatctaccaccacttcaatggaggagttcgtttctatggagctggcactgcccttttgatgatgtttatctcgacgatggtgatgttttgaggacgaggcggaacttcctccacaaccgtgaggccttgaaatatgtgaactactatttttatcttctttgaaactgctgctcttgtgttccttggagtcccggcgatcatttaatctttgattactgctgtgaaccgagatgttctgggagttctccattcttatgcgctttacataatcctcatgatgaatttgatgactcgatccgccgcatgatccaccacctccagcactgtggttgctttcctgcgagctaagtcgtcgcttatgcaggcgcactggggaatttctagacaactttctcgagcgctccttcggggtgttgtctgaaggagttgatggggatgcaccaggagttccttgagcaatggtgtccatggcattttccttgttgtgctgacagtcgattgcggtgagactactagcctcgccagcaatatccattttgcttttttggtatgaagatagctcacgcatccttcccccacggccttcttgctcaacatccatagctcggcgagattgttccttctctcgatgctctctttcgcgctgatccttttcgcggtgaagctccttttccctttgctccttctcacgcatttccttttctctcaagtctttatcacgcagctccttctccctgttatctctctctctttgttctttttcgcgcagatctttttcacggatttccttttctttttgttccttatcacgctgctccttttctctaagctctcgctcttctctttcctttttttcacgatcctcttgggccttcttctcccgttctctttctttttcctcttctttagcttttcggtcttctttttctctttcctcctgctgagccttacgatccttttcctcccgttcaacctgtttacggagatccttctcacgcttttcctgacgctcctttttctctttctcgtggcgctggttcttttcagctttgtccgccgtatcatcggcctcgctggagtcgtcttcaatgcggggagtagctgacttagaggactgggaggtagacgagttctttcgcttgtcagaggacgatgcatttttgtcagacttcttgattttcttgtcgctttccgatctattgttgtgcttgctgtgcagcttgtcgtgggtgctgctgatctttttagagctagaactcgaggattgggatgtggaggtgccacttttttttgtatgctcttcctcaacaaaggtcgactgttgcggcttttgtacgtgaatcgctgctgaggttaaggaactgttaccgttggacgttgatgatgaaatagatgcagatgtttccacagaagctgtggttgaatccaaggaaaggctgcttggggcgcctacgtttgtactacctggcactgaagcagatttctgaagctgaactctcgctggcgatgactgaggaccatctggcacgcttaagctcttcgttagattatttccagagctctggccagttaatctagattgttttcccatttctggaagaggtggaggagcaggctgtacagctggaggaggagcagcggtgttcggcaaaggcgggtgactgggaaacgggtactgcaatccttttgtaggtcccgagttggcagctggtgaggatgaggaggcagcagttcccccacttagtcctgcacttgcggttcctggtgctgcaggtttggtaagttgtcccaggcatgcggtaactcctcccaccgaaggcgagggtgatgggctgttgtagggcgacatcgaagcttgaggagaattcatgggtgataaactacttagtctttgaagcaatcccgcagatttgctacctgtcgagttacccaatccaccactacagtttccaataattggagtagccttggtcgccgcgagattaggcaaagcaggtgaggtgtttccgctacatgggcctccaggatgtcgggacacattagcgaccagcgaagatcctgtaacgatattggaactcgatcccaatgcaaaatcagagctggatgggtcgtaccattggtttttatttagccgttgaaaatcgtcatcaaaaacacttttcttggctagcacagatttgacaatgtcagagggctgcagttcatcaatatccaaaaacttgtgccgtgaattgctcgctgaactggatactgttccgctggaactgttgctatttccggatgccgagcttgtctgatgggaatttagaccagtactcaaattcatgtgcatagagagctgccaagaaggcgtggcactcgagggcgtatgaccggagatatgttctctactgcttcccccagaccatcgttcatagttttcctcaaagttgcgcagtctttcatctagtgaaggacttcctccggcattttggccaggtacatccgaatcgctggagttggaactcagtgatcgtggacgtgctggactggccatcaagcaagtgttagaagatgaggatccgtgcaattgctgcgactgttgttggtgattattttgttggttttggtggtgtgaagaggaacgccaatatcgcgaggatgggctgggcaggaatgtggatccagaacaggagcccattccctgactggcgttaagactagagttgttaagggagcatgccgaagaggaagcagctcctatgcaccccaaccctccggtagatcctcctcccagttgctgctgcagatagctatttcctgctcctcctcctccactgcttctggactgttgttgttggaagaaaagcactccaaactttggaagggggagccacatcacatccctggttctttcccgaactctttctctgggcggaggcaatcgacgtggctctgtgggcagcacttcaggtcgctcatcacacagcggcgtaccagggcgagatccatccgcactttcgccaccgctagcctcgtgtgagtgatgggaatgtagttgatgtcccctacctctggagacatgatgatgatattcatccgccggagttaaactacttatcccacccaatccagatccactagaactattagtggttgaggatgagctgggttgttgcatagtagtggtcactcgcctcctctttgctgccgccgaggcattcatcatgtgctgttgatccatgctgctggctcccacgattccgtgccggaaagccgaggaactagagagcgccgacaaagctcccacatcgatggaagggcgccggcaactgagcatcagggattggggagccgagggcaggtggccaggaaacttaatgcttggtgaaccacttggcgtctcggatacccttcgaatctcgcttttgcggtttaggggatcgtgtatcacatcacagttggacagtaaaagagggcttggtttattgatgctgctgtgctcgccagtggactccacctaaattaaaacgatattaccaataagaagttattttttgtattttaaagactgttccagttttaatgctttagcatagagaaaataagaaaaaaaaaaagctagatttggcgagtccaagcttaggtacattgggtacattagagtgatatgcaccaaaaaaataataacacttaatgattaaactttctaattattttatattgtattaaaatattttttttcttgtaaactaacttgaaagcatatccattcaaaacgtggaacaagtcgtgtccttgttaaaacatttacttaccccgctagcattaattattaatgattaatgattaatgattaattaatgattaaactttctaattattttatattgtattaaaatattttttttcttgtaaactaacttgaaagcatatccattcaaaacgtggaacaagtcgtgtccttgttaaaacatttacttaccccgctagcattggaatgatggtggtgatgatggtaatccattttgatgcgcttacggggactgacaacgccttcatcaccactggacgggcattcctcaacttgttctgccaattggatacgttgattgtgcactgggtgcaagtctttaggtgtcttaccgcaacgtctcctgctcagaatgctgcctccggatccagtaaacccttcagctccacccgtaatttgattgttatttaacgttccatcaatagattctccaacggctgctgtaggtccagtaaaacaatttacagctgaaccttgtcgagcggtaactggagaatcgcagcggacatcttcaaactgcgtggaatttcctgcacctccagaaacctcctcggagctacgaaaccggaggcgaccaacttcattgaagtcacagtcgacggtttgacgcgcattacgaaccattcgatgtctttgggccagagcggccggagacataggcaatgaacttgaagaggagctaacccctgagggcatggatgtgctcgctggtaccgttccggaggcgttgacattacagctgactacagcggacgccaggctgggggctggcatcgcactgcaggcattagtaccaatgtttgaaatgttgatgctggtgctttggttaattaaattgctcgcgctggagattccactgcttgctcctcctggcgtgttaatgggagagcagtcatcgttagagttgttttgatggcggctaaaggaagatgcacgagatcgagattgcaaagaagaggcgcttgactcatagcgactaaagcgcgggttagaacctagatgagagtattgcattaataagaaaggtgttgtatttaataaaatttgcaaaatattgcatttacccgaactttgttgttgctgtttctcttgtttatcgtaaaatgcgtcctggcactctctagatgcaaaatccacttgaagcttttttctccgtaagatcgttccacgcatatcctttaccgcggcttgggcgttttgtacctggtcatacaaaaccaaagctaactgcctgtttctgtcgatgctcactttagtaactgcaccaaaccgtgtaaactgcgactgaagaaacgactcggagactttttcgtccacaccatcgatccagacgcaattggtgggcatggattttccaaagcccaattttatcctgttgctgcccaagtgctcaccgtccattttgcgcattgcctttaccaccgagacaatgtctgaatactgacagaatgcataggcattcaggccctgcttcttgatatcgatctcaataatctcgccaaatgcttcaaaatgactacgcagttcgccggctgtaatgtccttctcaaggttcccgataaagagtgtccttgtcgacttgggatgatactcatccagctcggcttcgtagggtcgaaactcgttgtcctcgacatcataaccctggtacggttccacttcaattttgcagccgaagaagtgtttgtcatgagagacctccaacgctttttcaacgtcatctggctttttaaagcaaaccaaagcatagcgttcagaattttgtcccacaaccttaacccacgtaaccttgccgtgctttttgtactcatgaaatagaccatccttgagggatgtgtccgaggaacgggcaggcaggttgcggactcgtatcgctagcggccggttgtcttcggaatgcacgacgggattggccgtcagacaggaggatccgctggaactagagctactgcttgaagatgaactggacccacatccccctccgacgcctgcactgctgacggtaacagctgtgccactgggatttgaagagttgcctgcgggagtaaacgaaagacatttaatacgacatatttctaatataattttgtatgatcgcaacttactggttactgtgacagaattaacggtgcgactgctgcgcccctctgccatcgcacaattgcccgaagactggacgggactggacgcgtgcgagtgggatgaggagtgcgatgaggaggaggagctgtgcgaactgctgtagctactcggtgagcgcgagtgcgagcgactggaggaggtggtgctgcgtccgtgcaggttgtgtcgtgtccggatcggatgcgttggcaccccattgtccacggcggcggccaaaacagcggccacatttagaatgtcaccgctggctgtaccggaattggaacatactcccgcttctgctccagatcctaaccccaccgatcctgctgctccagaagctatcgtgggcattgttggagtcgccgtggttattgtattatttaaactattactactaaaactattgtttgtgattgtacttgtcgtagtcaaaggagtagctcctccagctcttcctggtgattccgaaccagagcgttctcctccgcttcccgttgctcctgcccccttaagtagcttattgagtttgctgctgtgcagaagcatatttcgtgaggtggcggtgttcagtaagtcatccgcagcacttcccgcataggccacgcttcgatgcacggccgtggtctgcgattgcgactgaatctgtggctgtccttgagcggcggagggacaagatccggctcctaccactggactgctggtgtagtgcgggtgttgaggattctgaagatgcggatgctggtgcggatgatggttgatcggtgagctgctcattgtgaagcccacggctgctgaggcgccggcattgccactgccaccagaacttttcaattgggccgtcgttgcagcagtggcggcttcgtaccatgactgtggtggagccacccgcgcgctctgatggttctggtggatattctgggtgctgctgcggtcgcctagcgcctgcggtactcccccaggacctgagcctaccaaacccccagtcccagttccaattgctcccgatccagatcctccagctgtgcaggctgctgtcgtcgtcgtcgtgttgctgctgttgatgccgccgccttgaacgctggcagaaccattcctgtacgggcgatctcggttgcgtgatctctcggaagaccctcctgccgccgtagcgaagactgacgcggaggcgctcacggacgagggactggagtttgaattggccaaggaagttgagttgttcgcttgatactgcgtgactaaacggctggtggtgcggtcgtaataattccgttcgaagctgtttgtcggtggttcctctgtagacctaaaatagtgtagaacaattcatcaaatttcagaaacacattaaaatgtatgtatttgttatagcgcacaaataaggggcaaaaatacgttttcattttatgacatagaataatacgcataattaatttagcttttactgctttttctttatatgtttgtaacacttttttttttattatctaggtaaaaacatatacgcatatacatatagtacatacatacatatgtatatattgaactagggttgccaccacattgttttgtttttttttttttaactacgaatgtatgttcatcgcattaccaatgttcatgatgcttgccagaatagtaacccaccttcgcatattatttaccggttctcgctgggaaaatcgtcgttgtaagctttgctacataggtaatcccggtttaatttatcatccccagaaacgggagccccaacatttagtgctaacatcgggaaacagtaatgtaccaaatctatcgttttttgttcgcttatccgttcccgatttcttcgtactattgataaatcggcactacgaaaaatttcacttggccaaataaataaacgagcgccaaataaactgacgtgcggctcaatccgccaacttcttcctttatttgtctgcgtctgtttacgcggctacacatacaaacaaatatctcacacactgatgcgtttgcacacacgaaagctgctacgaagaagcacaaacacagaagcaaaaaagccgggagagccacgtttttctttgctgctatatttaatagccaaccggtttttagtgttaaatattttattattccgtcactcttacacggttaaaggcttgccttacgttatttgtccttgcgatttgctcttcatttaataaacagttcgttcgctcggcgcatttcgctcactgaccaccccgatttcattttgtgccgatattcgcgtgtagtgctgccagactgtctggtactaccgtaacgtaaacaactctttgacgtaacgtaccccttaacgtaaccatgtaaaaattgtgtctattttctgagtttacatccagagccattatgtgtatttttttattttttaataattgagtattttttcatacgtttagttgtatttatttatatgtttaactatgtcaacaaattaactctgccaaattttgggttacgaaagggcaaacgctttaaaacaacaagttgtagttatctgaccagataattaccgaaatatttatttgtctatctgatgtaagctacatttatatttttcacaatgataagaaaacattttctctcatactaaaccgaataagattcggaagataccaggtaaaaatttaaatgttttacctgaagtttcgagtaacaatgacattcaattcaagacgcaaaaaccaacccccatataaattaaggcgcagaaggctcaatttattccataaaaaggacaatgggtttcagttgtacatcgttttcaggctcaccatatctccaaatataaaagattaagtttcctactaaaaatataacatagtgctaaatagcagcttattcttaattagtactaggtttgatgacttttacaaaagatgtgacgttttttcttatatatcggaaactcgggatatagtagacttttcttttcttttttttttttaattacttcaataacacactaatattcctcaagctattcttgtacttataatacagtttttttttataattacaatggttatgggatttttattaattttcaataaggatttaatattgtcataaactttctgacttataaagaagaaagagaaattctttgggaaagagcagatagctttataatcgtaatcattatttacccagactagctcatatttctacagtatacaatgaacaagctgatgaattgaagccatcttatttagattgatgtctcaagccctcagaagctgctggaatgaatattttttaaagccgcattaggcgctttaaggaacagcacttagaatatggccaaacgcatcatgcaccaagaagaaactgtttacatatgtttatacatatgtactgagtatatgcacaggcatggtggtggtggagctgaatgcagcattttccagccctctgctcaggtcacataagttggcgagcagcgccagaggcagagaattcgactgcagcaggaggacgtgccagacaaagtggctgtggtgcacatagctcggggcctaactcaggcggttgccactgaagtgcggtacagtctttcataaatttatggtaaatttttatacaagtatgaagtaacttacattttgagatacgttaaaggatgttccaaaaagatatttaccttacgaaaatgttcatatgtttatcgaaaacgcagtttggaggcgaaacaggggctatgatgagtaggggagaatgattgtccggcatgcgcagttgaggccatcagaaaaatcaattcagctaaaagagcgcccggttcaaggaattgcagggccacaccaaccaaaacaacgacaccgagaacaacaacatcgccagtaataacaacattactgcgcaacatttgttgcgcccaggagaaaaggggaggggggagcttgcggccagtcgaagaagcgccgtcgcccaaaaccacgcattgaacaacaacaacctcgaaggtgggtggacatttttgggcgtctgtaaattgcattactgccatgcttccagcgctactgtggttgcgggagcgcttatgtaatacacgaccaagatgactgcgcagtaaatggctgattagccggtgaagagaaacaaacctaaatagcggtggttttgggtttaggttttatacgaattttgatactttaaacgaaacgttcaaatacaaaccaaacagctaaagactatattaaaatttgcatgaatcctttatgtcaaaagcccagcgatggtaagctatcaagaacatatctgcattaaaaaggctctcacaaatacatttattgtgtttatttttagcacacaattggttggttggatcctcagcccacagtctcccagtcattgtcctggcaaaagtttctcaccgaacgtccttgtttgaggttatttatgtgtatatttggcttccctagaacataagagaaggagaagctaaaaagaagccccgtatgtacttagcctgccgggttttcccgcattccatacacattcacactaccgtgttcatggagttgaaatttgtgtaaccctttttaagtcttattttcaatcatagccggacgacgttgcccacccatttcccaactgactgcagtcaaagtaatttgaacgggagaacattcactaaacgcgtctccccttagggcgtgaaatttatcaatatcacggaattggcagtaggattaggaagatcgggatgaagaggttacagaagcattgctgcatagagtgcacccctgcatgcaaaagttgaaggacgcgggaatgacaggacgcgcaggatgtaaacacgacattctgctaaaggaataagataaacattaacacggaagtgacaggagagccccacccaaaataatttcagattataggacaatttctcattattagtatatttaaaatatttcgtatagccccatgtaggtcacaaaaggggtgatcaccaactgagcgctcatgaatacaaaatgcaatggtcaagacaaaatcccacatagaattaaaaaatgactgaaaaaataataaattggcaaatcgatagaaatttacaaaactaaggaaaatatgagataatataaaaacatatgggcgtggcagcatgggtcaacaaactttcgctgcgtctttgtctttagattctgtacgcttaatctcaaccttctagcttttttagttcctgagatctcgacgttcatacggacagacgattccttttgcctattacatacttctcagctaatctattatagccttttactccacgagtaacgggtataataaccattattgattttaaaacatattagcttggatttatctaaatagtagaactacaatattttaaactaacttcggaactaagaaaacgggatatcctattaatatattaatattgttgtttatattaatttagacacaaaattaaattattagttattccaactggcgacctcaattaaagtagtaacatgctagtgaattggtgtgatgtgtgtccaaggtatgcgacaaacaaagaaaggcgaggaaaaccaggggatgttctgaaaaaattcgcggctctgcttacccgagccaaagtgacgcaaccggaagcggcaaaaaagcgggtggcaaaaaggtaggggttacatatagcaacaacaagcagggctaggagcacagattatcttccctcccaggccggttcaaaccattgaatgaaacttatgcaaggcgagtgcctaagctgggagagaaagctaggggaaatccgaaaaagggcagagaatttaccatcgtattgcgcttgcgctctctgaattccagtacataatctggacagaaaatgctacggactgcgttacatgcttggcatatatgcacatatatataaaaggccaggacattggttatctttcatatcctggcagccacccacagccgcagggccctataaacaacaacagggtaaattgccacaataaaatcactgaaagattcaagtaaaaaaaatgtcagatcagaagctagaaaaaataaccgtcttcctaacttagaggctaggattgcttgaaaacgaggtcgtggaaatggaaaatgaaagcacttttaaagacactggcgacgacatgatgagttttacaggaagcagctctgccgcgccctttctgtagccagactgtcatttttctcggcgtcacacaacctccagagcctatgccggcaagaggaacttccagtgcactttgtttttccacatgcgttggggtttcttatcatgccgcttctaatgaaatggtaacaaaaagctaaattgcagtatggaaaagatgttatcttaaggaattctggtctataataacaagcaaaagttagtcactataacgaccaggaaaatctaacacggatttaaatatatcttgcgttgtaaaacgaaacccagaagagtaagatgtggtagtcgttgtgttaatatcttcgtcagatcctaggcatgcgatgcaaagtggcatcacatatatacgaattgagtaaactaatataagcactcttatttttatgaaaacaagagaaaaagctttctcgactatcagatacccgttactaagcttgagagaagggtttgcgggggtaaaagtggcaaatttctgaaagctgcatgcttaataaaatgttctcgtttttattgttcccgagatctcgttcgtacaggcagacatacggacggatatggctagatcgactcggctattgatcctaattaacaaaccttaagcctttgagggtcgaaaacgctattaagcgctgttttatatttttcaacgaatctattatacccttttactctgcgcgtacggatatagacacatcaacatcacttgaattaacttaactgcgacttttgataacccttcattcaaatgaaaccaaggattcgagtttccccagcactggcagaattcggtatttactgccaccatttattctggttaatcttaacttgtttggctgcatttaaattaattcgatttggcgaaaatggagtccaatggagacaaaatcgcaaactttgtttgctaaaaccattcaagtgaaaacaggcgacagtgcaatgcaattacatgcagggagatgaaaatacacatccacagatacggatacaaacgcacattgcgaatgggatacataatcacctcctttggggggctgacaatttaattaaaattgattttccgatcaatattttccagggaaatgcacagttgcaattgacgtggctgtatgtgtgttctgtatctaaacttgcaggcgttctggttatataagtaatacatacactaaaaaatataaaaatgatattgtgcggtggatttattcatcagtgtgtaaaatttaattgtatgcacctccttctatctgtctctcctacgtctacaactaaaatttagtaagcaatacatatatttttctggggaaaaaagaaatcgttccttatcttttccagctacccatatccgagggccaggaagcatttccacacacataaagattgattatagctggagttttcttggttttggtaatttctttccattcacttcttttatttaatgtttactgcaatttatttcaatgcatcgaaaaggattttaggacacacccaaagtattcgaatgcggctaccatagccatggcatccttataatggcagggcgataaattaaaggggaagattggggtgggataaagatccagaacctcttcaccatagtcacgagagcctgaatttgtctttattccacaacgatgggtttggcaaaggaatcctggaaaagcaatttcttttaataaagaactcggcaaattgtttctgatgcaaggttcacatttttgatagataacttggaaatctaaattagtcggtaatgctgccaaaataagtgaagaagacctcaaaaaaccaaagccaacaatactcgcagaatacaagggcgagtcatcattaaaattattattttaattgcatttttctcatacacacatggttattgtaattgaaaagattaaacaaataataaataaatcgaaatctgaatcctgcaaataggggcgtgtgtacaactttatgtaacgtcacagatacacagtaaaccaatataactggtttactcacatgtccatgttagagaattaaattaattattataattttttttcaaatatcctttttgatgcattgaatgttgaatttagtcttcaaattttaaaatatattgctgtgttgattgtcaagcttttttaaacttagccgcatttcagtttgtgcacatgtaatataacgtttacttaagctactgcctgcttgaattagttgtataaaccatcttttaattttactgttgaataaactcgattgattacaaatgcatttctcagttacatacattatattgcgttaatctataaaaggcaactaggtgtaaaaatctaccttggagaaaccatatacccattctctatttttatgcaatgataattaaactccaagatataaaaacattgtaaataaatatagctgtaagccccgtagctaatgctattttatttaagttagtctagttttgtaaactattctatctatcataataaataaataaataaataattaaactctaacttaagacactttaaatgcacaattctcaaaatgcgtagattaaaaaaaaagaatattctagatttgttgaaaagtacatatgtatgtaacaagtattgttacttctttctgttttcatattattcatttgacgatttgcataatctttaagtggcaaaaataaactatgtatatttgcccaattggaaaacatttcgttgtcctcttctttttagttctcaagcatagctgttttcctttgcctcgtgtttagccacgaatacgacttcaagatgagtcgtcgagtcaaaaaaaaaaaaaaccttgaacatctctattaatttttgttagcctctatcattatttgctaatatatttaagccggcgtatacatatctgtgtaccgaattcgatattatttgttcggatttattgtcattttagagagtgggtctctttttgggcttggtctaacagcatgtttgtatttcatttcctggttatgaccggttttcgaaaatctattataatcgctaagtgggtcacacaacaccgagtgatatttaaaatgctatcgattcacagacttccgaaaggtatttttcagctgtcatcagttgtttaagtcaagtgcaatcagcacgcatcaaaaaatacaggtgagcaggaattgagctcaattataaaattctttcgagggtaaacgaaacggcaagtgcttaagcgaaagaaaagggtgatgcggcatattacgatacgttgcacgaagctgataagaagtaccctttgccaatgatacttattatttttatgggtgagtttcttgcaaggaggaagatagaaacatgtaacacttaagtaacttaaatacattttagccatttaattgaacggtagattttcaatatataaacgaaatacttcactgacatgtaaacttacattactatcaacattactgtcgtcactcaatggctgcctcaataatccaggacttgaggcaggcagtgtcgctttaaggatacgcacctataaataaaaaaaatgaaaataaaattaaaacattgccatattaaaaaaaattttattgctaaattttcttaaagtttcccataagttttctcgatttttgtacatttctcaaccaaaacagtctgtctccatttgccaaaagtacaaaagttcaaattgtttaggacgagccaaaaattgtaaagccaaaaggtaaaaataaatacattatttgtatttgcttgttactatttttagggacaagagaagagagggaaaactcacacaccgaaaaaaaaatacattactaaatcgaataatagcctgaaaaccattaaaaggtcgagacagctaaaacaaaacgcacaataaataccgtaagcaaaaaatgtctattaaattgatgtcaatgcaagaaactattcaattttgcgaatttgtgttattcaacaaacaatcagtgatgatttctacctttgtatatgtctttaatttaagaacaactatgtataaattcgtacctttgtgaataatattaaataagtattcataatatagacatctaattggttgtaattttgttttcatattttccggaaaaattgttaaagatttaaaatggtgcgtgcatattatggcatatttatttctgttgtggcctctggcatacacaaaaaactttaatgacactgacgctgacgctccgttcgccaaaaatatcaggagagaaactgagatgccaaaaaaaagcagcagggtagaaggaaaatagaccgttatgtattgtatacacaataagtcttgaattttgtattgtttgtgattatataaaaagtagattttacaccccaaacccccttcccatttcacgctttatgtgtcgaaactttggctgctatttatttcttttcgctgtaatctgttttttatgcgctttaatttgttttcttttctcgtattttttcgtttcttgttatttgccaaaagtttattgatctcttgctgacattggagagtcagccgccaaatgccgagcagacaaaagagatacatagaaaaacacaaaaagtaagcgggagatattataaatgcacatacaaatatgtattattgtttgtctattggtacatacatatgtagtacataaacgcaaatatacacctgggaacgttttactccaagctgtaaagggtctttactaaagactctagattattttttttaaaagaagtcgtgtccaaaatttcaagtgcaaattgattaaagtagcgaaaatgaaacaatgtttataatcatcatcaggggtccgtgaaacgtttcacatggcacaggaatgacaaacgaagcaaaaattacaaactgtaggcaatatttggctaaaattaagcgaattaaaagagaaattaaaattagtggggagagaatgtacatatagtgaaaattatataaaaatcttgtacgcacaattttgtggtaaaaaaagacgatccgacctattggatttttccaacattatgatttgggaatttggggagtattggccggctatttgaaacggtaaatcggccttaaagggtcttccttcagaattgagagtcttgttcgtcggtataaacgtcgagatcccaggaattattttttatttattttgagttttcttgaccatttgcactactggactatagcgttctcccgggctttgtctatttgtcgtcgcagccgcgacagctaaacataattgagagcagaagaacgaatgtttcagccatggcagtagaaataaaaagcttttgccggatttttgatatgtgtaatttagtatgaggggccaacaaacccaatctagaacgtgggtggtgaaacttaaaatcaaacccaatttcaccaatatactttatgcacacggcataaaaagaaaaaacgaagaaatgtactataggttggggctgcacgcgacttcaaaacaactcacgcgtgcaaattgcataaggtaacaccaaaaatatacgctgaaatcatggagtacataaaagaatttgactttatataactaaaatagaagaatagttggcaccaagaaaaaattagtcccggtattaaaggaccttcccatggatatacacctaaaaaaaactgtgcgttcactcgtgtgagtgaaaggcgtgtggtagatcacgaaccctcagaaaattgagaactcgatgagatacagataccattacgaatttcggtccagccacagctgcagatacaaggtggtaatttttccgatagcaattttggtttaatatgaattacataagtccaaacggaagtcaaacaaaataatgcacataagtcacattatggccactgcttctgctgctaaggaccaacctccttaaatcaatgaaaatgcagcaggtgggccaactcaaaaaatcacaggtcagaacagacgatacgaaatctgtctgctcatcctcgatctcgtgagttaagaaaactggttatgcaaatgggtttgccagagttcagtattttgaattttaatcgtgtttccaaaggaaacggcacaaaaaaaaattaagaaatgaaatctagcgttcaagtgctctaaaatcataaaagatttaggagtacgatctgtgtgggaaggtagtattaaagaaaaaagttccttgactatcagattcccgttactcagccgagattactgcatgcatacggacggacaggtagacatgctcagaccgattcacctaatgatgctgatcaagcaaatataaatataagaaatttatacacttaatattgcctgtaacgcttcccagaatgtggtagacccatttacttaacgagtaaggtgtatacaaaatatcataatagttatttatgttaaaaaaaaaattgtaagagcaacaagagtactctaaaaacatcatacaactaaatttgggcgtcgtttacggccggtcttggcaaaatcgatcgggattaagaatataagatatatacatattacttaggatataaaaatattactttagacaaacacctcacaaaatttgtaaaaaaaaaaaaaaaaaattttccttgcaatgtatgaaaacgcgtaacaacactaacaacataaactggtttaaatagccaaccaggagcagcgagcaataactgaagagaagtcagttggtaccccttttttcgagactaaactatatggcgcatatattgaagcaaggaaaaataattaaaccgaaactaccaaattactattccaatgtttaatctgcaccaaattaaaaccaagcttaaaataaataaataattaaaagagcattattttacatcgatcaaaaagatataaacaaaatattgatttatgccagaataatttttcatttgcctgtattggataattattctggtctgatatgctcttttcttcttttttcttttccgctggcatcacgacgagactaacattatgttttctgtttttgttttgtgagttggcagcacctacgtgagccgctaaccggtttcaagtctcaaaggtaacttgaataacatttaaacttactgctggtttctttatatttttctgtctgtctccttggtttttttttcaacgcacaacaggtacattcgttgttgttggtaggtaacagtcagagctgaaggtatacacgtatggtatatacggtggcggtatgtttatatggagatttcctcagtctgttcttctgtcattctttccgcctgtgtttgccttggtcttttgtggctcctcgaaatgtatatagtcgtatatacatatttgtgattcgctatataaatatacacgtatgtactggccgttcatggataccatgacgaaagaactcagcttaaaagtgttttgcatttgccttgtcgtgtgtcttaaaatccagtatatagataagtatttactagatatatttcacgtgtatatttatggttatttatattaaagattgcttgccattctgattgatccttttataaacagatataaaaataaaattgtgcagattaatttttcttgttatgctacttgtcaaatgaattccgaaatttctttcgaaaattttttattaagttggcagcaatcgtgaaatataagaacatcggcttgtgaaagctactattattatcattttctagcctttgtgcaatgtgtaggcaattactatttgatgctcactggtatttacattttttaattattgtgtaaatttataagtttagatgctcaaattaacaatgcaaatccggtgcttggcacgacttagaaccgaagaaaaagaatggacaaccagaatatcaaattataataaaaaaaaaatccccaaagagttgaaatgatttattaagatcgagataactaaaagtaacccagttgggattaaaggttgcttttaactaattcatcctcataaattcaaagaataagttaacgtcaaactgttaaaattttgtcattttgttattacttcattcgaagtatgcaatttgctaatcagccttagtaaaaggccactagccaaccttaatgtttcattcccccttatcaatcacttaagttctgaaaccatgtcgctagataaccaaatccttgcaaaagatttagagctcgaaacatgcatcatattagccaaatgactaatggattcttttaaacagactattattattagactattagactattattattagaacaaactgttaacgttccttatgtaaacacatacagaaatgcttttccccactctgcgacgaactcgcctacagttaacgtagtacgttactcacatgtttaaatttcttatcagcaggacccttatctaatcgtcggagggaaacgcagttgttcatcatatataaagtatgtacaggcctatataaacgcgtaagcttttatgagctgataaaaagtgcgactcggacatttaatatgatatgataagttctttgttaacacttaattgaaaaatagataaaatacgataaaccgcctaagtattacaatgcaactctcaaaatattactttactagctgttgaaattaattcaaattttgtgtattctaactatttttgaaattaatgttacgtcatcgttaactaaataattgacaaaaggacaaaggacacaacaaaaaacatgtaatttataaattaaaatgtttgaaatgatctttctaagttctgtgataagatatacttaagcctccacgaaattaattcatatttaactatctgaacgtgtgaggagttaaataaaatgtttcctatgtaactaaggtggttttatttactgctttatcaggatgacacacataccgccgcactgtatttggtatttggatagttatacttcagcaaaatcctaaagatgtttattatacgaataaaatcaaaagttagtcgttaagaatgtttactatcgtcgtttaaagatagagatacacacacgcacttattgtttataacggcagataaaagtcaaagtaagggatatctaaaccgatagtatttaatatatgtacagcagcctgaagaatttgcactgttagacagagaaaaacacaataactcgaccccatttgcagcggccaaagccacaacaacgacaatgtagagacatttaaaggcagttgcaaccactttgactgacagctgcagtttaatatcgaaaaaacacaggaaaagctctgagaaactcagaagagcaacgcagaaatctcgcagaagaagcgaacgttgacagttcgcgaactcagtttcagacggcaagttggtctcattcttcagcccgagacaaaaacacaaagatacgccagctgcaatagcaataaaaataatgaaaactagttgcaactagtgcaaacatccaaacgggtttcactctgcttcaacagctgcaagctgaagtgggtgttcttcgtttgtcggtcctcttccatcagtataggtaaatttaaagttgttcgatggagaaacacaattcggtgcttaggcgattgtatgatgtccacagactttaaaatctagaaaattcatgtaggactcatttgtactttaatcacttgcattcaaaatataagcaacaggagagcacgctatagccgagtcccttgactattagactgcgagggagacattaaaaattacagtccgatctacgttcgatgtattcttttgggcgacttagaccatatggttattataaaagtaataaatgatcgaaacaagccgattgctaatatgcttgattttatgtgaattaatgttggaaaaattgcaatattattttattgtttagatatattaacatatttaatataatgtgcctcaggcttaatttattatatacatatgtataattcaaattgattccaaggcacaaaatatatgtaatattgtatgtgtacaaaaaagcaaatgtgaaactttatgggataaaacaagacctgcacaacccagcacaaatcaaacgatatagatccaaaaaagggtagaaatatagaaaccagtaacaacacatggtttcatttatagaattcagttccagaaaaaagggggaaatgtattttgccagcgttgtatatttgcattcgagcattctttttgccttcgcatattgcacagctgcttgttgttctcatttccctctccaccactcattcccttctactttcatccacatattccactgctccgatattacgttgggtgtattttattttgaatgtcaaagtttctttggtgctggataataaacaggcgcaagctaaaggggttctttgaatgcttcctgagcagaacaagtttagcttcattttcctctcggtgattccagaatttgcaaaacaaagagcgaacaaagctcaaggtccgaagaccgcttggcgggagcaagaagtaacataaaatagaaaatggaatattgagaacagaaaaagctttgtcatcgaaccatgaagtttgcacgccgcagatagtcgcagaacaaccattcaagagttcatgtacatatggttgtatctctcgcatttttctggacagtttttcccattatctttgcaagtagctcagctttttctttgtgctagccacagtcagacagatatgtggagggattcggcagacatatgtatgtatatttatacggaatgagtgttagcttatgaatgaggctgaaagcgaaaggccactgtaaaagtagcgagtcaatttacatttggcaagataagagagcaaaatacaaaccaacgagtaaagtaaattttctaaattatttagtttaaaatgttatatagttgaataaagatgaaaaatattcacgtgtacagttggaaacccttctttctacctgttgcatactcttcaacaaatttagaaatgtaagtagaaatttagtgtgtaagtaacatattacgaaggaagacaatgacctctcatatatatttctacttccgaaatgcaatgaaagactgacctctcattggccaaataaaacaagacaagtcataagagttgtaacgccctctcgccaactaatcaaaatcaattagcagagcagtactacataaattacagcagaacactccggttggacttgtggtgtctgtgtctccccttctaacttttaatgttacagttattatttgattgattgattgattttgattttacttcttcattttcaatatttggtggtctatcaatttccaatatttcactctaaaattgcaggaatttttaacacgctagtaatagaaatatgtaaagttaagtaaagtgcattgttaatataaaatattgtttgcggtcaacttgttattgttgttattgttctaaatggtcaacttgcaattcttgtgggtttatttatttatattcattgttaattaacattattatatttttatttacaccgtttaataagctaacagggaaaaacgacgaaacgcagtccagaagttatggtcgccgctgtaaaggcgataagtggaaaaaatcgaagtaattttcattataaatacagaaattattgtcaatcattgcaattgcagttgagaaccctcccatatggcaaaaaataaattaaaaaaatgggattttggtatttgctcgggtgaaatctaccagcaaaaaagtaaaagatagaaatcgatttatttatttatcaaagatgcgggaggaagctgagaggacatttcctctctttcttgtccaattgattaaaaacgtatttttttgctaatcagacatggactttgaattgtacaagtgtgcgaatatctgtgtgtgcatgactcatttgcaattaaacgacaaaagcgagagagccaaaaggagaatgaacggagagagagcaaattttaagtgccgcaaaaatgtcagcataaaaataaagtagtcgctgttataaaggcagcagaggaggcataagacggcgacaataacaagaagaggaaaacctacaaaggcagcgaccacaaaagcaaagatacaaaaatccatactcagatacatttacaaaactacaccacacacaaacaaaaactggctcgctcgcacacatactgcggcgtcgacgtcgactgcagcagagtcagagactgatgtttacacaacgtgcggtatatttgcaagatactcgtcgaacaacaagaaaaacagcagcaaatgctgcttgtattttttctttctttttttcgactctaattgaaaacaagcagagagtgtgtgtgtatagaaaaaacaagaaaaacaagcacagcgagcgtctacagctggctctggggtattattgtatctgtagatgcgaaattgcaaaccccaccaacagacaacgttgccaaacttcagtgtattgctttttttgttttttcctttttgttttctctgcagctttgtagccgcgtagccatagtttgcgtacatggtgtgtatctgtgcctttgtggcgcggcgttctctcgcctaacgatgaaaattgctgcaacaatgtcgcttaattttcatgcggccagcagtgttattatgtatgcacctgatcgggcctttatgataggcctcagaaagtcgaaaaaccggttagcttcgtccaccagccccctcgtcatcatcatcaaccatagtccaacccaagtccaggccccaactggttattattaaacaggtagaagaacaccaaaaccaagcccaagagaatccgagccgtcttcatcatccttctccaatttccttactcgatatcacgtatggctgtttttacagatgcgaccacaagtttattttgctatgctatgattttcccaaatcgcaattcctggaactgtatatatagttcgctgaattaatataatcaactacttccgagacagagaatgatatttgtgattccaaccaatttatgatgggtaacatttatgtatattttggacaacttctgtataaaaatcaatatttttaagcccctccgtcagctctttcggaatataatcgattgttgctgtgcattctttgtgctggctctgtgcctcgacgctcggtctcacgaacacagggccaaacaatctcatacaatcgccccttgacgataatcttttgtgtctgtccggttctttagcaccttttgtcaacgagaagtttggcaacgttgcgcactgtagagactgtttcacggatccggagattttgcctcatctccacttctctggcttctgctccagagtttagctcatctcatgtgcgaaataatttgggaaatttctaatttcccatacaaatgcttcgccgtctcacgccttcccgcctctagacccctgcctctttcgaacgacttcgtcacgttcccttgtgatatctcaatcctcgcattgcatgactctttttcaattttttgctatttttgtttttgtcgtttggtattacgacactgctcaaaaaacaatgaaatgtgcagtgcccggcataaatatgtaaaacaatagcaacgaaaatcaactataagaaaatgcatttgttattgcacaactggctggaaccaacataataatcactatatactcgcgaaattatttcttacgctagtgaacgttcgagagcaatattttgaattcatatactgctggttcagttcctgtcgtcgttggatgaatgggatgagtaatcatagaccccgtacggatcttctgtagattaaaaaaactacctaatcggaccacaatcaatgactaaacttttgaataataataaagtacgatagttcaaagtatggtaattatttggaatagtagacagctaacttgctataaatatacgataattgggttccaaatgctgtatctctaataaactataactttaagaagtcgttccttagatttttactactctggtctctttttagtctctatctaatctatatttttgactttgagagaggagaaatctcaatgccatcaagaacaaaaggcgggcaacgcaaactaaatattttctcatgtagcacaacaataaaataaataacaataaagaaagccaatctaacgagagcaacaattgtaattgtaacatgacattgaaacaagtcaaaaacattataaagcaatacatacaatttcgtctacataaaatcgtatgtagatcattattatttttgtttttgctttctgcccatagcgtgctaaaaagccgagcacgaaattcaatttaataaagtaatattagttcacgttgatggggttacatggacgaggtgaacagccaaggaagaacgaatactaaatttcaaaatcaacaaaaatcttcaacgtcttaaaaaaagtttaagtcttcttcttttaatattcttcttctgcttctctttttaatatttgccagctaccaatgaaattttgctcagtgtcaagtactcaagaaacaaattcgaaaaagagtagatagaaaagtgcgtaatttagggttgcagctgaaaatataattttattttttgctgtttatcagtgtttcatgtgtttgctggtgcctcacttatttacttaggccacagggttcattgtcaatgtcaaaaaacaattactgttttcaacccgcgacgattccacgatttctgttggcaattaccgcaaaactattaaatggagctttgccctctgttgtcgtctttccttgatgcgggcttaatgcatcagcagccgccctgaaaagaagcaaatacaaaatgtgttggtctggtctttgttttaaaggaaaccaaattaatttttgctgtggctaatgaagcaattaagtcatttttcttttgcactgaacgaaaatttaaatttaataggggaccgtaaaacccgtttaactaataaaagaaaaacacaaaaaaagcaacctaaaaccggcagaaaagaacaagttgctcagaaaagttctttagtttgggccgaacatcacataaacaaatcacaaaagttattatgaaaaagtattacgcaataataaaaaggaggcattttatacctgtatacctgggggacagtctgtcttccctcaaatactttcaattcatcacccaactttcagttcatttaaaagacaaacaaatttgtgacaatcttaaaaggtttattgaatctcgagacagacttatgcaaatccgaaacataaatgcacaactaaaggtaaaaaaaacgtagggatctgtgggatatcatcagagcagcagcagcaccattcccatataccgtattcccattacttcctactaatatcagttcctgactcgcattacctcttatgtgtactcgttagtcactcacacacaaccctgccaggtgaaacccactcaggttagatactaagatagaaaagccaaggtaaaaagatacgcactatttttcgggcatggccagccatttgcatttgtgcttcacgcattgcctgggttggaggttcgttcgaggaaggggtaagagaatagcgttctgacgcagccagcttaaaaattcatatcacacagacttttttatatcccaacgtaatgataagagctagctcgcgtggacagtcgctaacacaggtagctgttagtggcctacgctgacattttctaagagacattatttacatatatgtatttatatgtttaacaatttggagcttgcttttttcggttttatatttgcgcccaaatgcacccgccaatactttcgagagtgctggtctcggtgtttgaagtgtcgttaaaactattaatttagctatataaaaattcgatgaatagatagttcagtaagtatatacatgtatatcatattatttattatattaaatatatcttatgcacattctttaaataaggcttaccttttcaatttttgattattattattattgttgttattgttgttgttatttataatggtgctgctatccacaacgaactgttgttgctgttgttgttgttgtgtcgtagtagtttcggctaattttccaaaacaaatgttacggctattgtcgcgtaccatgtttcgacaacggaacattcgcagcagaatcttcttctatttaggaggagcattgcgtcgtatgccgcgaatggaggggcatcattttaaatgggcgccctccttcccattaaacattatgcactctttttatatattccagtgtgaggattgttaagatactcggcttgtttgatttaagaacttttatggatatttttattttattttctttggtaagatttccgcttcacttgcacatttttaacactatataacgaaatggggataataaaagatagagggaatatgtgggttagatccagcggacactaatttttattttacactgcacgtgcactttatatagaagctttttcattgtgattacaatatttgactttttcttaaagcgatttactttattacacaatttttttttccactaatgccaatttgccttaatttaccaactaaaaatacgcttttaatttaattcaactagagcaatttaaatttattgaaatttcaatggacccaagatatgttctcctccttttgcctcaatttaagcacggaatacggcatgtactaaatatacatatgtatgtatgtatattcaaagataaacttcttgtatagggccatttcctttgcaacaatacgaatgcgagaaggtggaaaatgcgagcagcgacgtcagcagcgcgttattataatcccccatcccccgtaaagagggttggtggtacagcatgttaaaattccatgcactaaagaagcatggaaactacaagaacaacacgcagtcgacgctgaagtttggcaacgttgccgcgaagcgccatttcgcttgctctcgctctgcctcgctgcggctttcgtgaaatgaggcaacgtcgctttgtttgcttataattgacgtttgccgtctgacgtggttgctagagcgagatagccagctgttgttgctgcttcagcgcacaaagtacatagggtgtttgggtttgtgtgtgcgtgccatatactcgtgtacata

SEQ ID NO: 40271 - DNA, 16857 bp, DROSOPHILA
atgttccgttgtcgaaacatggtacgcgacaatagccgtaacatttgttttggaaaattagccgaaactactacgacacaacaacaacaacagcaacaacagttcgttgtggatagcagcaccattataaataacaacaacaataacaacaataataataataatcaaaaattgaaaaggtctacagaggaaccaccgacaaacagcttcgaacggaattattacgaccgcaccaccagccgtttagtcacgcagtatcaagcgaacaactcaacttccttggccaattcaaactccagtccctcgtccgtgagcgcctccgcgtcagtcttcgctacggcggcaggagggtcttccgagagatcacgcaaccgagatcgcccgtacaggaatggttctgccagcgttcaaggcggcggcatcaacagcagcaacacgacgacgacgacagcagcctgcacagctggaggatctggatcgggagcaattggaactgggactgggggtttggtaggctcaggtcctgggggagtaccgcaggcgctaggcgaccgcagcagcacccagaatatccaccagaaccatcagagcgcgcgggtggctccaccacagtcatggtacgaagccgccactgctgcaacgacggcccaattgaaaagttctggtggcagtggcaatgccggcgcctcagcagccgtgggcttcacaatgagcagctcaccgatcaaccatcatccgcaccagcatccgcatcttcagaatcctcaacacccgcactacaccagcagtccagtggtaggagccggatcttgtccctccgccgctcaaggacagccacagattcagtcgcaatcgcagaccacggccgtgcatcgaagcgtggcctatgcgggaagtgctgcggatgacttactgaacaccgccacctcacgaaatatgcttctgcacagcagcaaactcaataagctacttaagggggcaggagcaacgggaagcggaggagaacgctctggttcggaatcaccaggaagagctggaggagctactcctttgactacgacaagtacaatcacaaacaatagttttagtagtaatagtttaaataatacaataaccacggcgactccaacaatgcccacgatagcttctggagcagcaggatcggtggggttaggatctggagcagaagcgggagtatgttccaattccggtacagccagcggtgacattctaaatgtggccgctgttttggccgccgccgtggacaatggggtgccaacgcatccgatccggacacgacacaacctgcacggacgcagcaccacctcctccagtcgctcgcactcgcgctcaccgagtagctacagcagttcgcacagctcctcctcctcatcgcactcctcatcccactcgcacgcgtccagtcccgtccagtcttcgggcaattgtgcgatggcagaggggcgcagcagtcgcaccgttaattctgtcacagtaaccagcaactcttcaaatcccagtggcacagctgttaccgtcagcagtgcaggcgtcggagggggatgtgggtccagttcatcttcaagcagtagctctagttccagcggatcctcctgtctgacggccaatcccgtcgtgcattccgaagacaaccggccgctagcgatacgagtccgcaacctgcctgcccgttcctcggacacatccctcaaggatggtctatttcatgagtacaaaaagcacggcaaggttacgtgggttaaggttgtgggacaaaattctgaacgctatgctttggtttgctttaaaaagccagatgacgttgaaaaagcgttggaggtctctcatgacaaacacttcttcggctgcaaaattgaagtggaaccgtaccagggttatgatgtcgaggacaacgagtttcgaccctacgaagccgagctggatgagtatcatcccaagtcgacaaggacactctttatcgggaaccttgagaaggacattacagccggcgaactgcgtagtcattttgaagcatttggcgagattattgagatcgatatcaagaagcagggcctgaatgcctatgcattctgtcagtattcagacattgtctcggtggtaaaggcaatgcgcaaaatggacggtgagcacttgggcagcaacaggataaaattgggctttggaaaatccatgcccaccaattgcgtctggatcgatggtgtggacgaaaaagtctccgagtcgtttcttcagtcgcagtttacacggtttggtgcagttactaaagtgagcatcgacagaaacaggcagttagctttggttttgtatgaccaggtacaaaacgcccaagccgcggtaaaggatatgcgtggaacgatcttacggagaaaaaagcttcaagtggattttgcatctagagagtgccaggacgcattttacgataaacaagagaaacagcaacaacaaagttcgggttctaacccgcgctttagtcgctatgagtcaagcgcctcttctttgcaatctcgatctcgtgcatcttcctttagccgccatcaaaacaactctaacgatgactgctctcccattaacacgccaggaggagcaagcagtggaatctccagcgcgagcaatttaattaaccaaagcaccagcatcaacatttcaaacattggtactaatgcctgcagtgcgatgccagcccccagcctggcgtccgctgtagtcagctgtaatgtcaacgcctccggaacggtaccagcgagcacatccatgccctcaggggttagctcctcttcaagttcattgcctatgtctccggccgctctggcccaaagacatcgaatggttcgtaatgcgcgtcaaaccgtcgactgtgacttcaatgaagttggtcgcctccggtttcgtagctccgaggaggtttctggaggtgcaggaaattccacgcagtttgaagatgtccgctgcgattctccagttaccgctcgacaaggttcagctgtaaattgttttactggacctacagcagccgttggagaatctattgatggaacgttaaataacaatcaaattacgggtggagctgaagggtttactggatccggaggcagcattctgagcaggagacgttgcggtaagacacctaaagacttgcacccagtgcacaatcaacgtatccaattggcagaacaagttgaggaatgcccgtccagtggtgatgaaggcgttgtcagtccccgtaagcgcatcaaaatggattaccatcatcaccaccatcattccaatgctagcggggtggagtccactggcgagcacagcagcatcaataaaccaagccctcttttactgtccaactgtgatgtgatacacgatcccctaaaccgcaaaagcgagattcgaagggtatccgagacgccaagtggttcaccaagcattaagtttcctggccacctgccctcggctccccaatccctgatgctcagttgccggcgcccttccatcgatgtgggagctttgtcggcgctctctagttcctcggctttccggcacggaatcgtgggagccagcagcatggatcaacagcacatgatgaatgcctcggcggcagcaaagaggaggcgagtgaccactactatgcaacaacccagctcatcctcaaccactaatagttctagtggatctggattgggtgggataagtagtttaactccggcggatgaatatcatcatcatgtctccagaggtaggggacatcaactacattcccatcactcacacgaggctagcggtggcgaaagtgcggatggatctcgccctggtacgccgctgtgtgatgagcgacctgaagtgctgcccacagagccacgtcgattgcctccgcccagagaaagagttcgggaaagaaccagggatgtgatgtggctcccccttccaaagtttggagtgcttttcttccaacaacaacagtccagaagcagtggaggaggaggagcaggaaatagctatctgcagcagcaactgggaggaggatctaccggagggttggggtgcataggagctgcttcctcttcggcatgctcccttaacaactctagtcttaacgccagtcagggaatgggctcctgttctggatccacattcctgcccagcccatcctcgcgatattggcgttcctcttcacaccaccaaaaccaacaaaataatcaccaacaacagtcgcagcaattgcacggatcctcatcttctaacacttgcttgatggccagtccagcacgtccacgatcactgagttccaactccagcgattcggatgtacctggccaaaatgccggaggaagtccttcactagatgaaagactgcgcaactttgaggaaaactatgaacgatggtctgggggaagcagtagagaacatatctccggtcatacgccctcgagtgccacgccttcttggcagctctctatgcacatgaatttgagtactggtctaaattcccatcagacaagctcggcatccggaaatagcaacagttccagcggaacagtatccagttcagcgagcaattcacggcacaagtttttggatattgatgaactgcagccctctgacattgtcaaatctgtgctagccaagaaaagtgtttttgatgacgattttcaacggctaaataaaaaccaatggtacgacccatccagctctgattttgcattgggatcgagttccaatatcgttacaggatcttcgctggtcgctaatgtgtcccgacatcctggaggcccatgtagcggaaacacctcacctgctttgcctaatctcgcggcgaccaaggctactccaattattggaaactgtagtggtggattgggtaactcgacaggtagcaaatctgcgggattgcttcaaagactaagtagtttatcacccatgaattctcctcaagcttcgatgtcgccctacaacagcccatcaccctcgccttcggtgggaggagttaccgcatgcctgggacaacttaccaaacctgcagcaccaggaaccgcaagtgcaggactaagtgggggaactgctgcctcctcatcctcaccagctgccaactcgggacctacaaaaggattgcagtacccgtttcccagtcacccgcctttgccgaacaccgctgctcctcctccagctgtacagcctgctcctccacctcttccagaaatgggaaaacaatctagattaactggccagagctctggaaataatctaacgaagagcttaagcgtgccagatggtcctcagtcatcgccagcgagagttcagcttcagaaatctgcttcagtgccaggtagtacaaacgtaggcgccccaagcagcctttccttggattcaaccacagcttctgtggaaacatctgcatctatttcatcatcaacgtccaacggtaacagttccttaacctcagcagcgattcacgtacaaaagccgcaacagtcgacctttgttgaggaagagcatacaaaaaaaagtggcacctccacatcccaatcctcgagttctagctctaaaaagatcagcagcacccacgacaagctgcacagcaagcacaacaatagatcggaaagcgacaagaaaatcaagaagtctgacaaaaatgcatcgtcctctgacaagcgaaagaactcgtctacctcccagtcctctaagtcagctactccccgcattgaagacgactccagcgaggccgatgatacggcggacaaagctgaaaagaaccagcgccacgagaaagagaaaaaggagcgtcaggaaaagcgtgagaaggatctccgtaaacaggttgaacgggaggaaaaggatcgtaaggctcagcaggaggaaagagaaaaagaagaccgaaaagctaaagaagaggaaaaagaaagagaacgggagaagaaggcccaagaggatcgtgaaaaaaaggaaagagaagagcgagagcttagagaaaaggagcagcgtgataaggaacaaaaagaaaaggaaatccgtgaaaaagatctgcgcgaaaaagaacaaagagagagagataacagggagaaggagctgcgtgataaagacttgagagaaaaggaaatgcgtgagaaggagcaaagggaaaaggagcttcaccgcgaaaaggatcagcgcgaaagagagcatcgagagaaggaacaatctcgccgagctatggatgttgagcaagaaggccgtgggggaaggatgcgtgagctatcttcataccaaaaaagcaaaatggatattgctggcgaggctagtagtctcaccgcaatcgactgtcagcacaacaaggaaaatgccatggacaccattgctcaaggaactcctggtgcatccccatcaactccttcagacaacaccccgaaggagcgctcgagaaagttgtctagaaattccccagtgcgcctgcataagcgacgacttagctcgcaggaaagcaaccacagtgctggaggtggtggatcatgcggcggatcgagtcatcaaattcatcatgaggattatgtaaagcgcataagaatggagaactcccagaacatctcggttcacagcagtaatcaaagattaaatgatcgccgggactccaaggaacacaagagcagcagtttcaaagaagataaaaatagtagttcacatatttcaaggcctcacggttgtggaggaagttccgcctcgtcctcaaaacatcaccatcgtcgagataaacatcatcaaaagggcagtgccagctccatagaaacgaactcctccattgaagtggtggtagatcccatttcccaaaccaagcacaacttaaacacaagtgaggaggagctgcagtctcatcaacccaaaagagaaaaggagagggagcacttcagtagtcatgcaaatagttcatcttctaggcataagagtaagcgagatcatcatcaccatcgggaaaaaaagcggcattcggtggcggaatccacgaatacagatgaagagcatacaccacagcagcataatcctcacaggagaatctctgctgcgggaagtgggtctgctggagagctcagctcagcagccactaatacttcgagcggaaaactccatcatcaacaccacaggagaagtgtggaacggaagtcatcacggggatctgatgaaggacatcattcttcatctaaatctcttcgcgccaaattgatgatgttgagctccgcagactctgacgacacagatgatgcctccaagaagcattccatctttgatatcccggatgattgtccaaatgtatctatgtacgacaaagtaaaagccaggagctgcaagaatatgcaacgccaggcggaggaaaaaaagatcaaggcgaagttctcgcagctaaagcaatctcgcgccaaaaagaagcgctctactagctatgatggagactcggacactgagttcgaggatcgacaacatcgaaatagtggtagtagcagcttccatggtcgttatcctggactgtctagcagcgatgatgatgacgatgaggagacccaccaacggcgaatttcctccgattcggatgcagagcacggaggtcaggataaccagggtgcaagcaccctagctgatgctaaccgagtacgtcagatgcaacagaatttaagaagactttgcgatggtgatgatagctccgaagatgaaataagaaggaatgtgatgaagcatagccattttggaaaaaggaactccaactccactaggattgcatctgattctgagtctcaatcccagccggctcctgatttgactattaagcaagagcatcctatagctcctgctcaggaaatcaagcgggaacagctttccgacgaggaacagaagttcaagtctcggcatgattcaaattcttcaatagaggagaggaaactgaagacggaacgtgaaataaagacagagcttggagatttctataattcttctgaatacacctatactggaaagcttaaagagtactctccagaaactcgcaaaaaacataaaaagagcaagcgacgtttgaaatcctcttccacagcggatacttcagcagctcaaactcctttggtgatgaccccgttaactccctccatatttgatgttcattcatcctccgagtgcaagacgaagttcgataattttgatgatctaaaaactgagtgttcttcaataccgttagagatttcagccggcgaaaggagaaagcataaggaaaggaaggaaaagaaacgtgagaagcttagaaatatgacggaagccactgtacccaattcgcccaccaccaatgatacaagttccgaaaagttatcgaaagaagagcggcatcgactaaaaaagtcaaagaaatcgaagagcatggataattcctgcaataccaaaatatacaactcaagtggagcccatccttctacctcaccttctttgcctgccactccaacgtcagcgccttcgacggcccaaacttcaaaaagaggagaggataaaatggagtttatatttggcattatttccgatgaagaagaatcacagtttcccgagcaagcggaaaccaataaagacattatacctagttccgtgtctactactggtccaattgtctccgctgctttgcaaacgtacaaacaagaaccttccacacctaacagcaaaaatgaggaagcacatattcaattaactgtgcatgagcctgagcaacaacagcagctggagagaagtcgcctatcgggaggcagcagctcatcttctcatgctgatagggaaagacaccggagagagaagcgcgagaaaaagagacgcgagaaatctcaacgagaacagcaaaatcaaattcaccagaaatcttccaaggttgaaactaaggtggatgatgataacagcgtggatatggatgaagcagggagggctctagaggctcaactaatgagtgactttgataccaagccgatttcagaagaagccactccttcaacggccgccacatatagatcggatatgacagatgtattccgattctctgataacgaagacaacaactcagtggatatgactaaacagggtgtcaaatcggagcagcaggaacagcataaaagtaaagacaagaagaaaaagaagaagcggtctaaggaggaaaagcaagaaaagttgttgcaacaacagcgaagggaatccctgccaaatgtggcttccacttcatccgcacctcctactcctggaaagcttactgtcaacgttcaagctgctagcaaacatgcagacctgcaattggacgccaagcatatctcatcgccacccgtttgtaagccatctcctagtttaccatgtctaataggcgacgatgacgatgatgcgttgcacaccccaaaagcgaaacctacaacgccctcgagtcgtggaaacgatggtctcactccttcacgtgagaaaccccgcctaattagtcccatacccaaaactccaaccatagccaacagttccacgctatccactcagtctgcagaaacacctgtaagcagtggtacagttatttcctcttctgctttggctaccactcctacatcttcgacagcagcgggagtcagtgcagccccgggattagataattcgcctaccagtgcttctgctcaatgcaaaaagaaggaaagcttcattcccggtttcgatggtcagcttgacgataggattagtgaatcggccgtgcaatccatttccgcagaatttaattctacatctttactagataacattgcagatgagccaaaaattccggtagcatcccctccacgtgcgactaaaccgttggataagttagaggaaagcaagtcccgcgtgaccatctctcaggaggagactgagagtgccgtatccgcactgttgggggaaagctttggcacttcctctacgacggactactccctcgatggcatggatgaaatgagctctgtaaatgaattggaaacaccaactttagtcatagcagaaccggatgaagaggcagctttagctgcaaaagcgattgaaacagctggagagcctgcgtccattctggaggaaccagaaatggaacccgaaagagaggctgaaccagaccccgatcctgaggcagaaattgaatcagaacctgtcgttgaggtcttggatccggaagaactcaacaaggcagtgcaaagtttaaaacacgaggatatgatggacatcaaggctgatactccgcagtcagaaagggatctgcagattgatactgacacagaagagaatccagacgaagcggatagtagtgggcctagtctcaagattgatgaaactgtgcagagctcatcgtcgccggagaaatcaattagcaataacagtcctactcctagggaaacagcaaatatagacatacctaacgtagagtctcaaccgaagctcagcaacgagtccacaccgcaaccttccgtgatcactaagttgccatttttggatacgccaaaaacagtaccagcaggcctacccccttctcctgttaagattgaaccaccaactataagtaaactccaacagcctttggtgcagcctgtgcagaccgtcctgcctgcaccgcattcaacgggaagcggcataagtgcaaattccgtgatcaacttggatctgtccaacgtgataagcagttgctcgaacacgagcgcggcatctgccacagcttcagcgtctgcatccatatcatttggaagtccaactgcaagtcagaatgccatgccccaggcttcaactcccaagcagggtccgattacacctcagcaagcaatccggacgcaatctttgataatgcaaccgccaacgatatctataccagaacaaacacctcactttgcggtcccccaaatggtgttgtctcctcagtcacatcatcctcagcaacctggaacttatatggttggcattcgagccccatccccacacagtccgcttcattcaccaggtcgtggtgtagcccaaagtaggctggtgggtcaactgagtcctgttgggcgtccaatggtaagccaaccatcaccccagcaacaggttcagcagacacagcagcaacatgccctaataaccagcccgcaaagtagcaacattagtccattggcaagtcccacgactcgagtgttgtctagcagcaattcgcctactaccagcaaagtaaacagttaccaacccagaaaccagcaggtaccacaacaaccctcgccgaaatctgtggctgaggtgcagacgacaccgcagttaatgactattccgctacaaaaaatgacaccgatacaggtgccacatcatccgacgatcataagtaaagtggtcaccgtacagcctcaacaggcaacccaatcgcaagtggccagctcgccacccttggggagccttccgccgcacaagaacgtgcatttaaatgcccatcagaatcagcagcagccacaggtgatagccaagatgactgcacatcagcaccagcagcacatgcagcagttcatgcatcagcaaatgatacaacgacagcaacacatgcagcagcaacaacttcacggtcagtcgcaacaaataacgtcagccccgcaacaccaaatgcatcagcaacatcaagctcagcagcagcaacaacatcacaaccagcaacatttaaatcaacaacttcatgcccaacaacatccgactcagaaacaacatcaagctcagcagcagtttaatcaacaaattcagcaacaccaatcccaacagcaacatcaggtccagcaacaaaatcaggcacaacaacaacacctatcccaacagcaacatcaatctcagcagcagttgaaccaacagcatcaggctcagcaacagcaactgcagcaaatacaaaagctgcagcaaatgcatggtccccagcaacagcaaaagtcgcctcaaggagtcggccatttgggaggttctacgtcgatttttgcatcccaacaacataattcccagcttccagcgcgaggtgtacctcagcagcaacatcctcaacaattgtcccacagttcaccttgcaaaccgaatactttggtttctgttaatcagggagtccagcctcccgccatattaacacgagttggatctcattcgcagccaaaccaacagcaacaattaccacaccagcaatcgtcgtctggtcatccgcatcagaaacagctgtcgtcgccaggagcaaatcttcctcttcaaacgcctttgaatgtgatacaaaatacaccgaaaataattgtccaacaacatattgttgcacaaaatcaagttccaccaccacaaacccaaggtaatgccatacactatcctcaaaaccagggcaaggatagcactccacctggtcatgtagaaccaacaccagctatgtccgctcagaaaacatcggaaagtgtttcggtgattcgcacacccactcctacaacaggtttggcagtaatctcggcaaatacggttggctctctgttaacggaggagaatctaattaagatttcgcagccaaagcaggatgagttgatcgaacaggactcaaaggaagttgacagcgattactggtcagcaaaggaggtaaatatagacagtgtcattaagaaattagatactccattggctagtaaggatgcgaagcgagcagtggaaatgcaggcaattgcaccggctcctattcccaatccgcagcctgggaatcagtctatggcccaagaaactgctcttccaacaacttcaatgagtgtgaacaactcaaacgatcatgatacagaggacgaaacggagaccaggcagttgccccctgcaaagccacctatacccactgttgggagacctccaggaaggggaggtagtgctaagagaggacgccagccaagaggggcgaagaaagtgggaggattcccgcttaactcggtaacagctgcgccgcctggagtggattcattggttgtacaaccgggtgacaatggggtgcaaaccaggctaagaaaacccgtaacagctcctgtaaccagaggcaggaaaggacgtcctccaaggaatctactattgcagcaacagcaacttcagcagcagcagctcgatattcagcgaaagggaatggaaatggtgacgtcggcaacatcttcgactccactgccaactcctattcctaccagctctgtgttgacagctgcagagaaaaaggcgaggaatcaagccctaactcaggctcaagaacaaaaccaagtcgcaagtcaagtaggaactggccaggatatctacgagttccatgaagacggtggtgaagagcccaagcccaagacaatatcatctgttgcccccagtgctgaggaccaacgaccacgacttattcttaccatcaataaaacgcaaccctcgattaagaatattagtgaaatggagcaaacaattcagcagcaacaacagcagcagtcggaggttatatcaaatactgatccaatcggaggagacaactccgagtcttgtaacacacgcaaatctcgccgtttacaagaaaaggaggatcgcagcacagtagacgatatcattgaagatgtggttcgaaataccaacacgccaactggaacaggaccacatttgccaaaaggtgcacaaactccaccacgacgttctggcagaaatgctcaagccaaaaagacggatgcggtacagatcattaatgcagtgggtcgtccaaggcgttccaaggacagaaaaacaatcggtgaacaaacagcaaacttgattgaagaagttactgcgtctaatgcaactgttgccgccagtcatttggcaccaccagaaggagctggtgtggagtcgcatgtcccccaattagatgctaaagaagtggaaccggtatcagttgtgacaccaatttctacaccagcgcctgttagtgtagctgccccggttaccgttcctgtgccagccatggtccccgtcaaacctacaatgcctcaacatcccaagaaaaaagctattgcggcagcagagattgaatcttaccaggccatcaactcatccattcccagtggggggcttccgatgcatcagacagcggcccctgctactcaaaagataaccggtggggttgcggatgcggtcagcaaggctctagttgatccagttactggagttatcaccgctggaatgccccagggcaaagagggtaatcttccagcagctaccgctgctgcacctgccaacagcagcaatgaagacggtcaagcagctcctcccccgcagctacaacaccagcagcagcaacaacatccgcagcaaccaccacaacaacaagctaatttacagataaatactactctgattccatctggacttccaaatcctattacagccttaggaaaatcggtacaacttgagacctcggcagccgctttgttgaacaaacctgtaagtgttctggtgaaaggaaacgcctcgcaggttattcagcagcaacaaccgcaaattgtggctccagcaaaacaacccataatcctacaacagaatcccctgcccactgtgctgcaccatgcgcagcataccactgttaggccacctcaaccactgaaagctcacgtcctgaatagggaaaagaatatccagcagcaattgacgcccacaaagcaagcagtagctcaaccaccacagcacgcaccgcattccggtcacatgttgctcacggatactgcaggaaatcaacaactagtgcagccccagatcattgcacgtcacctgcagcagcaacaacatcttcaggtcaacgtgccgccaccaacagcacactctccgcactctccaagaattcctagccagcagcaacaattggggccaggagcttctataagtccgcagcagcagcagccgcaaacggtggtgatcaagcaagcggcatcagcagcccagccgcaaatattgcacgtggtcagctcaaaggcgtcggtggtgcctcaaccgcaacaacagcagctaccaccaacttcatcaacaggcccccacctgcagttggctaaaccgaactatagctatgcacccactgttttgacacccactttgccagccgttcagcagcagcaacaacagcatttgtataagcaaaacaatcagcaaaagggagctcagatacaaatgcctcctcacggaataattatgcctacccatcctggcatgctactgcagcaaaaactaccagcacatctgcagcctcagcagcatcaattgaacccttcaccgccgcctggaaagccaaatcccgtactgcacggactacagtctggacagattatgccaggaagtgtgggcagcccaccaccggtatcagctgcagtcttgaaaacagctcagcagcaggtcaattccgtcgtaccagtagctggtatacgcacagccatcccaaacataagcccgcagagccagccgagagtatctccattggttttaccacccggcatttctggagtaccaccttttgacgccagtctgcatgacctgggtgcttatgtcagtggacggcgaacccagagtccgcctccagctcatcagcaggcttcgcccataacaccgaatgattctacgtatcgaggagtgactgcatccagggattttatgctctaccagcatcatttaatgcgaggtggcgactacgatgacaagatgggcagcagtccgccgctagagttacgacgccccggtagtggacctccaaggaccatcgcagttccccacagtttgcagagtcctcaggatcgcactgcagctgactctccacaaatggctcaggtttacgtacacaatacgcgcattcccccggcccatttcagcgaaattgcatcaaggggcttgtacgatagtggtgccttacaactggaaccaccgccggcccatcgcccaactgcaaccattagtgtggtggtgccacaacaaatgcctgcagtttcctctggaagtccgtttatcggtcgtgatgggagcgtgcagccaggaagccaccatcatccaggcaaggcaatggatatgcagttggatgagatggaccgcatgtcaatgattgcagctgtcgttcaacaacagcaggaacatctgccacctgctttgcctgcaggcatggaattggcctcccagcaagcaccaccagcgatggcaccgccaccaggtgattcgctggttactctgctgcagcgatatccggtaatgtggcagggcttattggcccttaaaacagatcaggccgctgtccaaatgcactttgtgcacggaaaccctaatgtggcaagagcgtcgcttcccagtttggtggagactaatacaccgctgctgaggattgcgcaaagaatgcgactagagcagacacaactggagggagtagccaagaagatgcaggttgacaaggagcattgcatgcttttggctttgccatgcggaagagatcacgccgatgtactgcagcattcaaggaacctccagaccggtttcattacctatttgcaacagaaaatggcagccggcatagtgaacatacccattccaggaagtgaacaagcagcctacgtggtacacatatttccatcatgcgattttgctaatgaaaacctagagcgcgccgctccggatcttaagaatcgcgtagctgagcttgcacacctcctgattgtcatcgctactgtctaaaccactataacaaccaaacccacggactttgaacgataaaatatacccagatgttaaacttcacaggcttacacgacaacataagaggaaccagataaagaaaccaacaaaaacatgttacgctcttctagtattttaagtaattttaaatagcgattaaacaagcaaaagttt

SEQ ID NO: 40272 - protein, 5560 aa, DROSOPHILA
MFRCRNMVRDNSRNICFGKLAETTTTQQQQQQQQFVVDSSTIINNNNNNNNNNNNQKLKRSTEEPPTNSFERNYYDRTTSRLVTQYQANNSTSLANSNSSPSSVSASASVFATAAGGSSERSRNRDRPYRNGSASVQGGGINSSNTTTTTAACTAGGSGSGAIGTGTGGLVGSGPGGVPQALGDRSSTQNIHQNHQSARVAPPQSWYEAATAATTAQLKSSGGSGNAGASAAVGFTMSSSPINHHPHQHPHLQNPQHPHYTSSPVVGAGSCPSAAQGQPQIQSQSQTTAVHRSVAYAGSAADDLLNTATSRNMLLHSSKLNKLLKGAGATGSGGERSGSESPGRAGGATPLTTTSTITNNSFSSNSLNNTITTATPTMPTIASGAAGSVGLGSGAEAGVCSNSGTASGDILNVAAVLAAAVDNGVPTHPIRTRHNLHGRSTTSSSRSHSRSPSSYSSSHSSSSSSHSSSHSHASSPVQSSGNCAMAEGRSSRTVNSVTVTSNSSNPSGTAVTVSSAGVGGGCGSSSSSSSSSSSSGSSCLTANPVVHSEDNRPLAIRVRNLPARSSDTSLKDGLFHEYKKHGKVTWVKVVGQNSERYALVCFKKPDDVEKALEVSHDKHFFGCKIEVEPYQGYDVEDNEFRPYEAELDEYHPKSTRTLFIGNLEKDITAGELRSHFEAFGEIIEIDIKKQGLNAYAFCQYSDIVSVVKAMRKMDGEHLGSNRIKLGFGKSMPTNCVWIDGVDEKVSESFLQSQFTRFGAVTKVSIDRNRQLALVLYDQVQNAQAAVKDMRGTILRRKKLQVDFASRECQDAFYDKQEKQQQQSSGSNPRFSRYESSASSLQSRSRASSFSRHQNNSNDDCSPINTPGGASSGISSASNLINQSTSINISNIGTNACSAMPAPSLASAVVSCNVNASGTVPASTSMPSGVSSSSSSLPMSPAALAQRHRMVRNARQTVDCDFNEVGRLRFRSSEEVSGGAGNSTQFEDVRCDSPVTARQGSAVNCFTGPTAAVGESIDGTLNNNQITGGAEGFTGSGGSILSRRRCGKTPKDLHPVHNQRIQLAEQVEECPSSGDEGVVSPRKRIKMDYHHHHHHSNASGVESTGEHSSINKPSPLLLSNCDVIHDPLNRKSEIRRVSETPSGSPSIKFPGHLPSAPQSLMLSCRRPSIDVGALSALSSSSAFRHGIVGASSMDQQHMMNASAAAKRRRVTTTMQQPSSSSTTNSSSGSGLGGISSLTPADEYHHHVSRGRGHQLHSHHSHEASGGESADGSRPGTPLCDERPEVLPTEPRRLPPPRERVRERTRDVMWLPLPKFGVLFFQQQQSRSSGGGGAGNSYLQQQLGGGSTGGLGCIGAASSSACSLNNSSLNASQGMGSCSGSTFLPSPSSRYWRSSSHHQNQQNNHQQQSQQLHGSSSSNTCLMASPARPRSLSSNSSDSDVPGQNAGGSPSLDERLRNFEENYERWSGGSSREHISGHTPSSATPSWQLSMHMNLSTGLNSHQTSSASGNSNSSSGTVSSSASNSRHKFLDIDELQPSDIVKSVLAKKSVFDDDFQRLNKNQWYDPSSSDFALGSSSNIVTGSSLVANVSRHPGGPCSGNTSPALPNLAATKATPIIGNCSGGLGNSTGSKSAGLLQRLSSLSPMNSPQASMSPYNSPSPSPSVGGVTACLGQLTKPAAPGTASAGLSGGTAASSSSPAANSGPTKGLQYPFPSHPPLPNTAAPPPAVQPAPPPLPEMGKQSRLTGQSSGNNLTKSLSVPDGPQSSPARVQLQKSASVPGSTNVGAPSSLSLDSTTASVETSASISSSTSNGNSSLTSAAIHVQKPQQSTFVEEEHTKKSGTSTSQSSSSSSKKISSTHDKLHSKHNNRSESDKKIKKSDKNASSSDKRKNSSTSQSSKSATPRIEDDSSEADDTADKAEKNQRHEKEKKERQEKREKDLRKQVEREEKDRKAQQEEREKEDRKAKEEEKEREREKKAQEDREKKEREERELREKEQRDKEQKEKEIREKDLREKEQRERDNREKELRDKDLREKEMREKEQREKELHREKDQREREHREKEQSRRAMDVEQEGRGGRMRELSSYQKSKMDIAGEASSLTAIDCQHNKENAMDTIAQGTPGASPSTPSDNTPKERSRKLSRNSPVRLHKRRLSSQESNHSAGGGGSCGGSSHQIHHEDYVKRIRMENSQNISVHSSNQRLNDRRDSKEHKSSSFKEDKNSSSHISRPHGCGGSSASSSKHHHRRDKHHQKGSASSIETNSSIEVVVDPISQTKHNLNTSEEELQSHQPKREKEREHFSSHANSSSSRHKSKRDHHHHREKKRHSVAESTNTDEEHTPQQHNPHRRISAAGSGSAGELSSAATNTSSGKLHHQHHRRSVERKSSRGSDEGHHSSSKSLRAKLMMLSSADSDDTDDASKKHSIFDIPDDCPNVSMYDKVKARSCKNMQRQAEEKKIKAKFSQLKQSRAKKKRSTSYDGDSDTEFEDRQHRNSGSSSFHGRYPGLSSSDDDDDEETHQRRISSDSDAEHGGQDNQGASTLADANRVRQMQQNLRRLCDGDDSSEDEIRRNVMKHSHFGKRNSNSTRIASDSESQSQPAPDLTIKQEHPIAPAQEIKREQLSDEEQKFKSRHDSNSSIEERKLKTEREIKTELGDFYNSSEYTYTGKLKEYSPETRKKHKKSKRRLKSSSTADTSAAQTPLVMTPLTPSIFDVHSSSECKTKFDNFDDLKTECSSIPLEISAGERRKHKERKEKKREKLRNMTEATVPNSPTTNDTSSEKLSKEERHRLKKSKKSKSMDNSCNTKIYNSSGAHPSTSPSLPATPTSAPSTAQTSKRGEDKMEFIFGIISDEEESQFPEQAETNKDIIPSSVSTTGPIVSAALQTYKQEPSTPNSKNEEAHIQLTVHEPEQQQQLERSRLSGGSSSSSHADRERHRREKREKKRREKSQREQQNQIHQKSSKVETKVDDDNSVDMDEAGRALEAQLMSDFDTKPISEEATPSTAATYRSDMTDVFRFSDNEDNNSVDMTKQGVKSEQQEQHKSKDKKKKKKRSKEEKQEKLLQQQRRESLPNVASTSSAPPTPGKLTVNVQAASKHADLQLDAKHISSPPVCKPSPSLPCLIGDDDDDALHTPKAKPTTPSSRGNDGLTPSREKPRLISPIPKTPTIANSSTLSTQSAETPVSSGTVISSSALATTPTSSTAAGVSAAPGLDNSPTSASAQCKKKESFIPGFDGQLDDRISESAVQSISAEFNSTSLLDNIADEPKIPVASPPRATKPLDKLEESKSRVTISQEETESAVSALLGESFGTSSTTDYSLDGMDEMSSVNELETPTLVIAEPDEEAALAAKAIETAGEPASILEEPEMEPEREAEPDPDPEAEIESEPVVEVLDPEELNKAVQSLKHEDMMDIKADTPQSERDLQIDTDTEENPDEADSSGPSLKIDETVQSSSSPEKSISNNSPTPRETANIDIPNVESQPKLSNESTPQPSVITKLPFLDTPKTVPAGLPPSPVKIEPPTISKLQQPLVQPVQTVLPAPHSTGSGISANSVINLDLSNVISSCSNTSAASATASASASISFGSPTASQNAMPQASTPKQGPITPQQAIRTQSLIMQPPTISIPEQTPHFAVPQMVLSPQSHHPQQPGTYMVGIRAPSPHSPLHSPGRGVAQSRLVGQLSPVGRPMVSQPSPQQQVQQTQQQHALITSPQSSNISPLASPTTRVLSSSNSPTTSKVNSYQPRNQQVPQQPSPKSVAEVQTTPQLMTIPLQKMTPIQVPHHPTIISKVVTVQPQQATQSQVASSPPLGSLPPHKNVHLNAHQNQQQPQVIAKMTAHQHQQHMQQFMHQQMIQRQQHMQQQQLHGQSQQITSAPQHQMHQQHQAQQQQQHHNQQHLNQQLHAQQHPTQKQHQAQQQFNQQIQQHQSQQQHQVQQQNQAQQQHLSQQQHQSQQQLNQQHQAQQQQLQQIQKLQQMHGPQQQQKSPQGVGHLGGSTSIFASQQHNSQLPARGVPQQQHPQQLSHSSPCKPNTLVSVNQGVQPPAILTRVGSHSQPNQQQQLPHQQSSSGHPHQKQLSSPGANLPLQTPLNVIQNTPKIIVQQHIVAQNQVPPPQTQGNAIHYPQNQGKDSTPPGHVEPTPAMSAQKTSESVSVIRTPTPTTGLAVISANTVGSLLTEENLIKISQPKQDELIEQDSKEVDSDYWSAKEVNIDSVIKKLDTPLASKDAKRAVEMQAIAPAPIPNPQPGNQSMAQETALPTTSMSVNNSNDHDTEDETETRQLPPAKPPIPTVGRPPGRGGSAKRGRQPRGAKKVGGFPLNSVTAAPPGVDSLVVQPGDNGVQTRLRKPVTAPVTRGRKGRPPRNLLLQQQQLQQQQLDIQRKGMEMVTSATSSTPLPTPIPTSSVLTAAEKKARNQALTQAQEQNQVASQVGTGQDIYEFHEDGGEEPKPKTISSVAPSAEDQRPRLILTINKTQPSIKNISEMEQTIQQQQQQQSEVISNTDPIGGDNSESCNTRKSRRLQEKEDRSTVDDIIEDVVRNTNTPTGTGPHLPKGAQTPPRRSGRNAQAKKTDAVQIINAVGRPRRSKDRKTIGEQTANLIEEVTASNATVAASHLAPPEGAGVESHVPQLDAKEVEPVSVVTPISTPAPVSVAAPVTVPVPAMVPVKPTMPQHPKKKAIAAAEIESYQAINSSIPSGGLPMHQTAAPATQKITGGVADAVSKALVDPVTGVITAGMPQGKEGNLPAATAAAPANSSNEDGQAAPPPQLQHQQQQQHPQQPPQQQANLQINTTLIPSGLPNPITALGKSVQLETSAAALLNKPVSVLVKGNASQVIQQQQPQIVAPAKQPIILQQNPLPTVLHHAQHTTVRPPQPLKAHVLNREKNIQQQLTPTKQAVAQPPQHAPHSGHMLLTDTAGNQQLVQPQIIARHLQQQQHLQVNVPPPTAHSPHSPRIPSQQQQLGPGASISPQQQQPQTVVIKQAASAAQPQILHVVSSKASVVPQPQQQQLPPTSSTGPHLQLAKPNYSYAPTVLTPTLPAVQQQQQQHLYKQNNQQKGAQIQMPPHGIIMPTHPGMLLQQKLPAHLQPQQHQLNPSPPPGKPNPVLHGLQSGQIMPGSVGSPPPVSAAVLKTAQQQVNSVVPVAGIRTAIPNISPQSQPRVSPLVLPPGISGVPPFDASLHDLGAYVSGRRTQSPPPAHQQASPITPNDSTYRGVTASRDFMLYQHHLMRGGDYDDKMGSSPPLELRRPGSGPPRTIAVPHSLQSPQDRTAADSPQMAQVYVHNTRIPPAHFSEIASRGLYDSGALQLEPPPAHRPTATISVVVPQQMPAVSSGSPFIGRDGSVQPGSHHHPGKAMDMQLDEMDRMSMIAAVVQQQQEHLPPALPAGMELASQQAPPAMAPPPGDSLVTLLQRYPVMWQGLLALKTDQAAVQMHFVHGNPNVARASLPSLVETNTPLLRIAQRMRLEQTQLEGVAKKMQVDKEHCMLLALPCGRDHADVLQHSRNLQTGFITYLQQKMAAGIVNIPIPGSEQAAYVVHIFPSCDFANENLERAAPDLKNRVAELAHLLIVIATV

SEQ ID NO: 40273 - DNA, 5621 bp, DROSOPHILA
aagcaatctgcgtttgttgttggagcgttggtccgatcttctgctgcctccctgcatgtgctggtggtgttgctgtggttttagccggttgcgttccattacggagctgtcgctccggcgccgttgatcggcgttgtgtccaaaaggattgcgatcgtacggcttgccgttatgcaaactgtgtcgggcgtgacgcagtggcgatggctgcggtagagcctccatcatgaactgattgcgcagacgactttggttgtaggcaggtagctgcttgccgccctgctgcttgatggtgactttcttttggaacagttcaaggccctggtacaagtctagggcaaaaggcaccgcacacaggcgttggtatgtgacaaacccgaaattccggggacgcccattgttatcggtcggtatccgcactccttcgatggggccagcttgcaggaacacctcgtaaaggatctcctccgtcacgcgctcgtcgagattcccgcagaacagagtccgttgctcctcgtcctcctcctcatcgtcgtcgtcctccagttgcccaaccaactggtcaccgttttcattgggcaggaaagggtaaattggctgctcttggtgctggccagatggaataccgtatctgtaaccatctatgttcgtttccgaaatcgtcatgaccgacgcaccactatacatttgctgcattagtaactgcaagtccatttatcttcgacaagtaaacacacaacaaatcggacgtagtgatggcagaagataacatcggtaatgtgtgagctgtttaagaactagttactagcgcgaactacctaagaactagatcctagtggggagtttatagtctttaaaatcttcggttattaagaactagttcctagtggggagtttcgagtctttaaactttcccgtaatgaggtgaaatataactttgcttccgcggtgcataagcattgctgataacaaagacattttaattattcgtcccgccggctgatgttctcgattgttgtcgatgccgcctctttttattgagcttcccttgtagtgctaccttcgcacacttcatctatcaactcggcgatataaatcaaaccgaatatttactcaggggactctggatacaagcacaaacacaacgccacaaattcaattgagaggtgagaattcgcgacggaccgacccaagtgtacccttcattcatcaacattattgaatgtttgggcttaaactgtttgggctgaaaaaccttaaacttttaattggcaatttgaacactacaatttttcgtacaaataaaatggaagtgggaaaagatgatcgggacattgtttaaagaagagaagctttcaagctcatcgagtgagtactgagtacgttctatgagcgttatcaatgccacttgagctaatatttcgcgtagcgtcgcaatttgacaaataaactagaccaccacatagaaaagagcactacgcttgtggatttaaatacctttcaaattgtgcacagctcagggtagaaaagcacgtttacgcggaatcgtcgtcgaacctattcagtcgccttttacgcgtgtagcagtacaatccgctccagaaatgggagaagttccgaaaatcaagaacttgccacaggtgatcgagcctcacttgccagaagggtgtacgctggactcgtactccactagctacctaaccaagcccggggacaactatggcagcattatgttatctgtccaagcgaaaatccgcagtgcagacggtggtattcgggatttgccgctgatagccaagttgccgcccctcaccaacgacctttactggcagatcttccaacccgagcggacttgcattacggagaacgcggtgtaccagtatctgtcgccggagctggataagttgcagctggagtcaggcattctgcccgcccaaatttttgacggctttccgcgatactacggctcccgcgtatcactggacaaccgcgctacaaaagtggatcgggatgccgttctggtccaagagaacgtcactacgcgcggctatcgacctggtaacagacaccggccgtacaatctcgcagaaactgtgcttattctgcactatttggcccaataccatgccctgcctatcgccctgcgcctgaaaaaaccgcaggtgtacgaggagtatgtgcggccatacttcaagaagttcgatatgaactctaatattgatcaggccgagacggaaataatgaacaaggaaattttaaaggacataaagttggtgactagcgacgaacgggacgtaaatcgcgtcaaggagctgctggacattttccaggcttttcaagctagcaacgatgtggacgacggcccattcactaccctcgtgcacggagacctgtggatcaacaatatgatgctaaaatacggtatgaggggttagttcttaaagcaaaacaggctatattaatactttaagaattttgtcaggtgaggaaggcactccactcaaggtgaaaattgttgactttcaaatcgcgcagtacggatcattggtgcatgatatcatctttgtgctgttctcaagtgtggacgtaaatgttctcgaggacaatttctacaatttcctgaccatttattacaacgccttcattcagaccttgcgcagcgtgaatgtggacaccagcaactacacatacgaattgtaagacgagtttccgcagccaatgggatgacttttttcatcgaatttgttgcaggtttctcgaagaggtacagcaaactgcacacgtgcagttgcctcacgcgatctttatgatgaaggttatactggctgataacagtacgattcctaaagactataaagacgtggatttctcggtgctcacaaagaacacgggtgcaaaaactattgtgacaaaatttgaggctatcttgcgactagggaaaaagtttaatatattttactgatctatttttgccagtcacgaaataaaaatttcaccataaagctggtcacctttatcacattctcgttatttacacgtgtttgttatcaggcatcgaattagcgccttgtttgtgtgcccactgaaagaattcattttagtctttccggaagattatagtcttcagttggagcacaatctttcgcaagctgaagaacatgggtgtggacaagctgcccgaaattcgagctcttagtgaagtggttgaaccccacgtttcagggtcccgcctccttaattatcacacaagcagtctgacgaaaccgggcgataactacggaagcgttctcctggcaattcatgcccggctgcagaaatccaatggtgagtcgtttgaagagcagctggtggctaaagtgcctccgatcgaccccaagtactggcagtttttccagcctgagcagacatgcctcactgagaacgctgtttacaagattttggcccctgctctggccacccttcaagatgaagctggcgtccctgacgagagccaatttaaaggattccctcgcttctatggctgtcgcgaatccctcgaatccaactcatcaaaggtagatcaaaatgccgtgttggtgctggaaaatttgcgtagcagtggctacgtctccggccagaggctaaaagctttcgatctggcccacacgttgctagcacttaaatatatggccgagttccacgccctgtctctagctctgcggatcctcagaccagaggtgttccgggaacaggtccgtccgttctttaaaaagttcgattggcatgctgaagcgcccgagtggaagtcggtaatgaaggcagagactctggaggacattcgtcgagccaccaacaacgactccagacttgtagcccgaatgaaagagttgtcggaccagttttttgaattcttagcagccgccccagatagacccgatgggccttttaccagcattatacactgtgacttctggataaataatataatgtttcgttacggttagtatcactagcacaaatgatcgccctagcacgtaataacattcaataatacgattttacataaaaagagcggaaaactaattatttctttggaattgttagcataacaaaatttctaaaatataagaaacaagtactattctttgaaatctttagggcccactggaacacccgtcgagctgaaaattatcgactttcagacggcacagtacgattcagtggtgcatgacataatctcgtttttgctatcaagcgttgatacggctatcttggaggtagagttcgaacacatgttagaggcctactatgaggcttttgagcgttgtctgcgacgtgtgggagctaaattggaggttcacacttttaaagagtaagataaatgatcaatatataactgagtacgaataggtcggattttcgcaggttccggctggaagtgaagagggtggcgtacatacaagttccccacgcaatctttatgacgcgctttatattggctgacagcgcgctcatcggcgattcagaggctgaggaacgccccaagcttacggacgtgctgaagaatacgggatcggagcgtattagccgcaaattaagccaaattctgaacttggccgaaaagtttgacatattgtactagggcaataaattgatacgaaaacgagatttgtaattgactaatggcaatttgatggggaaccctaattattttattattatctcagctggtttagaaaataaacgtgaatacagtagtagtcagttttgggaatcatgagcgctacctgggtaacgattctcagcatctcgacttgtgtggttctgctgaagctcagtgagatcaggagcaaggaggtctgtattcaagaaaggtctccggatgtctcaaactaatattgaataaccgaatagagctgttattatgtgaccttcacgtatgccaattggacggatgaccgacctcggtttgttgtgaacatgaccttctcgaatcagactggcatcggctcagtaaccaccattaacgaggagattgcctcaccggtgtctcgcatcctcatacttcagcactccggtcggggtaagcctcgcaccatatacaacgcctccaccaaactgtgcgacctgcagaatgtcttcaattccgtaccgctttttaagccagccaaggacaacatgctcaagcaaagtaactacacgctgagctgtcctctggtcaaaggcacatacgtcatgatcaacatgcgcgtaagccccaaaaacccacttctgagccttctctaccaaccgaaacaaacgttctccgtgagtggcggcttgtttgaagaactttcacgtggccgcagactaagggcgctgtccacctacttcatgactggaaaggttgtgaaaaagtactgtggatccaatgaataaagatcgaccgaaataaatcagcacaagtaaatcgaacaagaaaaaattcaacgttttgcagtaataatacaaatttattatttttcctactatttctatggcagctatatatcagataaagtagtctgatacggcttgtgttcaacctgcaatagagagaagacatttggaatatcttctggaagatagcactatgagaatattttatgcagaaacgtacagac

SEQ ID NO: 40274 - DNA, 2959 bp, DROSOPHILA
tgatgttctcgattgttgtcgatgccgcctctttttattgagcttcccttgtagtgctaccttcgcacacttcatctatcaactcggcgatataaatcaaaccgaatatttactcaggggactctggatacaagcacaaacacaacgccacaaattcaattgagaggtgagaattcgcgacggaccgacccaagtgtacccttcattcatcaacattattgaatgtttgggcttaaactgtttgggctgaaaaaccttaaacttttaattggcaatttgaacactacaatttttcgtacaaataaaatggaagtgggaaaagatgatcgggacattgtttaaagaagagaagctttcaagctcatcgagtgagtactgagtacgttctatgagcgttatcaatgccacttgagctaatatttcgcgtagcgtcgcaatttgacaaataaactagaccaccacatagaaaagagcactacgcttgtggatttaaatacctttcaaattgtgcacagctcagggtagaaaagcacgtttacgcggaatcgtcgtcgaacctattcagtcgccttttacgcgtgtagcagtacaatccgctccagaaatgggagaagttccgaaaatcaagaacttgccacaggtgatcgagcctcacttgccagaagggtgtacgctggactcgtactccactagctacctaaccaagcccggggacaactatggcagcattatgttatctgtccaagcgaaaatccgcagtgcagacggtggtattcgggatttgccgctgatagccaagttgccgcccctcaccaacgacctttactggcagatcttccaacccgagcggacttgcattacggagaacgcggtgtaccagtatctgtcgccggagctggataagttgcagctggagtcaggcattctgcccgcccaaatttttgacggctttccgcgatactacggctcccgcgtatcactggacaaccgcgctacaaaagtggatcgggatgccgttctggtccaagagaacgtcactacgcgcggctatcgacctggtaacagacaccggccgtacaatctcgcagaaactgtgcttattctgcactatttggcccaataccatgccctgcctatcgccctgcgcctgaaaaaaccgcaggtgtacgaggagtatgtgcggccatacttcaagaagttcgatatgaactctaatattgatcaggccgagacggaaataatgaacaaggaaattttaaaggacataaagttggtgactagcgacgaacgggacgtaaatcgcgtcaaggagctgctggacattttccaggcttttcaagctagcaacgatgtggacgacggcccattcactaccctcgtgcacggagacctgtggatcaacaatatgatgctaaaatacggtatgaggggtgaggaaggcactccactcaaggtgaaaattgttgactttcaaatcgcgcagtacggatcattggtgcatgatatcatctttgtgctgttctcaagtgtggacgtaaatgttctcgaggacaatttctacaatttcctgaccatttattacaacgccttcattcagaccttgcgcagcgtgaatgtggacaccagcaactacacatacgaattgtttctcgaagaggtacagcaaactgcacacgtgcagttgcctcacgcgatctttatgatgaaggttatactggctgataacagtacgattcctaaagactataaagacgtggatttctcggtgctcacaaagaacacgggtgcaaaaactattctgaagaacatgggtgtggacaagctgcccgaaattcgagctcttagtgaagtggttgaaccccacgtttcagggtcccgcctccttaattatcacacaagcagtctgacgaaaccgggcgataactacggaagcgttctcctggcaattcatgcccggctgcagaaatccaatggtgagtcgtttgaagagcagctggtggctaaagtgcctccgatcgaccccaagtactggcagtttttccagcctgagcagacatgcctcactgagaacgctgtttacaagattttggcccctgctctggccacccttcaagatgaagctggcgtccctgacgagagccaatttaaaggattccctcgcttctatggctgtcgcgaatccctcgaatccaactcatcaaagaggctaaaagctttcgatctggcccacacgttgctagcacttaaatatatggccgagttccacgccctgtctctagctctgcggatcctcagaccagaggtgttccgggaacaggtccgtccgttctttaaaaagttcgattggcatgctgaagcgcccgagtggaagtcggtaatgaaggcagagactctggaggacattcgtcgagccaccaacaacgactccagacttgtagcccgaatgaaagagttgtcggaccagttttttgaattcttagcagccgccccagatagacccgatgggccttttaccagcattatacactggcccactggaacacccgtcgagctgaaaattatcgactttcagacggcacagtacgattcagtggtgcatgacataatctcgtttttgctatcaagcgttgatacggctatcttggaggtagagttcgaacacatgttagaggcctactatgaggcttttgagcgttgtctgcgacgtgtgggagctaaattggaggttcacacttttaaagagttccggctggaagtgaagagggtggcgtacatacaagttccccacgcaatctttatgacgcgctttatattggctgacagcgcgctcatcggcgattcagaggctgaggaacgccccaagcttacggacgtgctgaagaatacgggatcggagcgtattagccgcaaattaagccaaattctgaacttggccgaaaagtttgacatattgtactag

SEQ ID NO: 40275 - protein, 784 aa, DROSOPHILA
MGEVPKIKNLPQVIEPHLPEGCTLDSYSTSYLTKPGDNYGSIMLSVQAKIRSADGGIRDLPLIAKLPPLTNDLYWQIFQPERTCITENAVYQYLSPELDKLQLESGILPAQIFDGFPRYYGSRVSLDNRATKVDRDAVLVQENVTTRGYRPGNRHRPYNLAETVLILHYLAQYHALPIALRLKKPQVYEEYVRPYFKKFDMNSNIDQAETEIMNKEILKDIKLVTSDERDVNRVKELLDIFQAFQASNDVDDGPFTTLVHGDLWINNMMLKYGMRGEEGTPLKVKIVDFQIAQYGSLVHDIIFVLFSSVDVNVLEDNFYNFLTIYYNAFIQTLRSVNVDTSNYTYELFLEEVQQTAHVQLPHAIFMMKVILADNSTIPKDYKDVDFSVLTKNTGAKTILKNMGVDKLPEIRALSEVVEPHVSGSRLLNYHTSSLTKPGDNYGSVLLAIHARLQKSNGESFEEQLVAKVPPIDPKYWQFFQPEQTCLTENAVYKILAPALATLQDEAGVPDESQFKGFPRFYGCRESLESNSSKRLKAFDLAHTLLALKYMAEFHALSLALRILRPEVFREQVRPFFKKFDWHAEAPEWKSVMKAETLEDIRRATNNDSRLVARMKELSDQFFEFLAAAPDRPDGPFTSIIHWPTGTPVELKIIDFQTAQYDSVVHDIISFLLSSVDTAILEVEFEHMLEAYYEAFERCLRRVGAKLEVHTFKEFRLEVKRVAYIQVPHAIFMTRFILADSALIGDSEAEERPKLTDVLKNTGSERISRKLSQILNLAEKFDILY

SEQ ID NO: 40276 - DNA, 4897 bp, DROSOPHILA
ttggacgtccaacaggatctggcccaggagatgttcaaggattccaagtataagagcgaacagttgcccagcatctcgcagcagaccaatggaagggtcaccttgtatcgcctgggtgatcatatcgacatctcacgcggtccaatggtggcgtctaccagctttttggggaaatgcgtcatctcggctgcccacaaagttgcggaggagggtccctctggtgctttctatcgcattcagggcgttgcactgccgtctggcttccaactgaatcatgttgcatttggtgtattggaggagcgttctaagaaacctgtgagtatatctcgacgtttttcgataaagagctgtgtcacaaatttaaaacacattttagagccccgcacgactgcccaatgaaccatttgaggaacaacaacaactgcaattatcttaaaacgttctttaatatttaaaactatactgtaagtgttaaaaaagtaaatcattaaagagcgtcctaatttgttataacaaagaaaatccgtctttaaaaggatatgagcaaacaaaattctgcttttaccattttaacttacaagctaattatcttatggaatgaaattctggatagctcttattatttatagatttagcattcgtaaggcagaatttatataaaagaacactttggtcttattttacgatttaatgattctatattcttttaattgccaatgctagggtttctcttttttgctcacagttcttttattttaattgtctctttaaaaacatttatattttaatattaaagtttcaataacactaaggaaggtgctgtttaaatcatacataaagctgaccacagactaacatttggtaacgatttcatctctaacaagtaaggcatgcttaaagaagcaagagaatcagagattccacagaaacatattcttaaactactatctacaataagaaaacaaaattaacaaagctgtttgagactcagagctattctttaaaagctcttgaacaggccctctaaatcgtgttcattgagggcaatagccaacattatcagtccacccagaaggataccaaaaatttgtattattataccctttggatctttggccttttccggattgtgggccacactcattgtgggcaccagatcggcaaaagcaatatacaggaaggaaccagcggtggctgcataaatccattgggtcatgccgtctccaattccagcaataaagagacccaccgacatgcccacaaagctaagaactgagctaacaatgttcatatagacggctcttcgcatggagacacctgtttgcagcaacagagcaaagtcgcccagttcgtgtggcaactcatggcagagaacggcaaaggcggtagcaaatccagtgaccggatcacttgcgaaggctgcacctatggccagaccatcggtcagattgtgcaagccatctccgatgattaccatgaaggctactggggtgagcggtcgatcgggggtcttctcatccagcttggcctcctgcaacatcacattgagctctcgaggaggtggcagatcaatagcatcctttgcagctggcttctccatatgtccatgactgcggccgtggctgtgaccatgtccgtggctatgtccatgacccggcttaccgccctttagcagcggaatcaggttctccagcatatacatgaatagagcagccaggaaagtacaaccacatagcagagccgcctcattgctatgtttgtgatcagattccaagggattgataccagtgacttcctcctcgtgcttttcctccttgaaaagggcatgggggagcaagtgcatcagggcatcgccagctaaagtgcccacagcgatggaaactaggaacttgagaatttcctgataggcagccgacttcatcaaaggaaccagaagaatgcccagcaatccgcaagcggacagtataagcatagtgatgctggcatagatccaagctaaatcgatataggtaagttatcttgtataacaaagtgttaattatagatacctaccgtaccatatcttctggttcttatcgttaaggtttactgatcgtacagctggttgcttgcaaactccattatcgatctgggctaatagagctggacagagtttcataaaagctcgcggagtgatccgcaccgagttgatgaattcgttgtattcctcttcagaattgtggacgccatcagttgagctaacgtcattcttaatgagcagcttgcggtaggcaatgtttttgtggagatcgttgtggttcacgatgagggaaagtaaagacttcggtgataagcaagcggcaacaggttctgaaaataaaaagtgtaaaagtaatgtaattttaagaaccagagaaaatatttcctgtttaaggtaaaagtctaaggaataagcaccttgggactgcattgagtaattcttgttgcatgtgaattacttgtgatttctgcagtttgcaatttaatctatacgttatgcattactatatagcgctggctgggttcacattatgagcagcaactgtttgttctaatttaaaccttttaagcactttgtttataatgctaggtatggggaattttctttttcccatgtttacactcattctatggaaatagcaaacgtatttcttcgactccgacacgttgccctctctcagcagtcgattgttatccaattcgcatgtgcaaacttgccattaatccagtcggctgtttagtgttaactttatatgggacaacgttgtaatgattgtgtgcacttcaattaaaactgtaaggcttagccaacaaaaataaataacaagcgaagcgattgaggcctgtttgtttctcgttttgtatctgtatctgtatctgaatccgttcaattgttgttttcttttggatttccgcatccataatgcgtccgtttatcgtgctatcgccctgttttcgtcgcctgctgacaatgatctttcctacctgttgatttacggctacatttacggcccaaaaggagaaagaaaaacgcatctgatactaagtatatatacgcacatacatggtaatgataatttatgcgacaaggccacgatcacagacggaacttcctatcaaccaaatgagatgggatggaggatgggatggcataattgaattgatgatagaccgcagtcgccggtcgccttgcacttggaaatcggccaattgatggaaagagtcgagtcaagtcgagggcttcatctatttatactatatatatatactatacttctgccgggctcaattttgtattgtgccacaggtggctggtgttttatcatgtatatatgcttgttattaactgccagtcaagtgagcttcaatccgcgtattttttggaatttctcagacctggtggattctggagaaccggaataagtgttaaaacaaattatcctaagatttatgaccatgttgtctatcctggcgtagcttaggtattatcagtcatagctgatggtcggcaaatacatacagtaatacggttggaaataaagtgcgaaatccccgaccattaagataagactggtgcacatcttcattaaatattaaacgacgccactcaccagaactctccctcggatgtcggtgcttggggtcatgaatttctaggaactccggaacctcggcctccgactgtgaatttgagtgattgccacgaggagagatttgcagctccaaagcttcctcatcggtggcattgactcgtgtcggctcaaagtaatacgttacatttgtggcatgcggcatctcgttcgagtatccctgaggtcgatgctgatcgatcgtgtgcgagggatcgaattggatttgacccaagttcaggctgaacatcaaatgctcaagaccctggaaaatattttagttcctcatttaataggcatttaaagcagcattacagcatatttagagagcacttagacgttatctggaagttttccaagatacaaaaccaaagtaaaacaagtgtgattaaggcacacgttattgcaaggcgcaaaatataagtaaactatctaatgataaggacagatagcattatgcttcaataattgtagacaaactattttcttttaacgataattaagtatttgataataggtattaaaataacattggcaatgataaatagacttacaaatatctatgcacaaattctcagaaagtttgataattcaatagttttagatagttgtgatttccctaaactatttaaacagtaagtgcaaccttgaagttttaaaacccatttaaaaacaacaattaatctcgaagtagctggagtaaacgcaacaaaacaactgccagctgttttgttttcggtgagcgtcctgaaatcgtttttaaaaacaaaccttaacctgctgcacatttttcacagtagctatccacgaaatttcacgccgacaaatcgatcgcatttgctatttatttaactaatttgtcaaagtatatactctggctgcgatctatcaccgataattacttgatttacttgtcaacgtgccaggcaattatatttacatctgaattcatttgtttattgttattcctccattctgtcgcatatttgctgtcgctaaagtgggtggagattccccggggcggcggtggagccccatctaattgcctcgacagcgacctgtcgccggggatcggggcgtgtgtccggcgtgtgatgagtggctccaaagaattgcccagattcccaagatcaggatggcggaatttgcatatgaacaaacattagacacacacgcgctggcacacacaaaaaaaaaaaactatttattatgtagctcatgaagccaccaaatggcgaattttactttca

SEQ ID NO: 40277 - DNA, 1560 bp, DROSOPHILA
atgttcagcctgaacttgggtcaaatccaattcgatccctcgcacacgatcgatcagcatcgacctcagggatactcgaacgagatgccgcatgccacaaatgtaacgtattactttgagccgacacgagtcaatgccaccgatgaggaagctttggagctgcaaatctctcctcgtggcaatcactcaaattcacagtcggaggccgaggttccggagttcctagaaattcatgaccccaagcaccgacatccgagggagagttctgaacctgttgccgcttgcttatcaccgaagtctttactttccctcatcgtgaaccacaacgatctccacaaaaacattgcctaccgcaagctgctcattaagaatgacgttagctcaactgatggcgtccacaattctgaagaggaatacaacgaattcatcaactcggtgcggatcactccgcgagcttttatgaaactctgtccagctctattagcccagatcgataatggagtttgcaagcaaccagctgtacgatcagtaaaccttaacgataagaaccagaagatatggtacgcttggatctatgccagcatcactatgcttatactgtccgcttgcggattgctgggcattcttctggttcctttgatgaagtcggctgcctatcaggaaattctcaagttcctagtttccatcgctgtgggcactttagctggcgatgccctgatgcacttgctcccccatgcccttttcaaggaggaaaagcacgaggaggaagtcactggtatcaatcccttggaatctgatcacaaacatagcaatgaggcggctctgctatgtggttgtactttcctggctgctctattcatgtatatgctggagaacctgattccgctgctaaagggcggtaagccgggtcatggacatagccacggacatggtcacagccacggccgcagtcatggacatatggagaagccagctgcaaaggatgctattgatctgccacctcctcgagagctcaatgtgatgttgcaggaggccaagctggatgagaagacccccgatcgaccgctcaccccagtagccttcatggtaatcatcggagatggcttgcacaatctgaccgatggtctggccataggtgcagccttcgcaagtgatccggtcactggatttgctaccgcctttgccgttctctgccatgagttgccacacgaactgggcgactttgctctgttgctgcaaacaggtgtctccatgcgaagagccgtctatatgaacattgttagctcagttcttagctttgtgggcatgtcggtgggtctctttattgctggaattggagacggcatgacccaatggatttatgcagccaccgctggttccttcctgtatattgcttttgccgatctggtgcccacaatgagtgtggcccacaatccggaaaaggccaaagatccaaagggtataataatacaaatttttggtatccttctgggtggactgataatgttggctattgccctcaatgaacacgatttagagggcctgttcaagagcttttaa

SEQ ID NO: 40278 - protein, 519 aa, DROSOPHILA
MFSLNLGQIQFDPSHTIDQHRPQGYSNEMPHATNVTYYFEPTRVNATDEEALELQISPRGNHSNSQSEAEVPEFLEIHDPKHRHPRESSEPVAACLSPKSLLSLIVNHNDLHKNIAYRKLLIKNDVSSTDGVHNSEEEYNEFINSVRITPRAFMKLCPALLAQIDNGVCKQPAVRSVNLNDKNQKIWYAWIYASITMLILSACGLLGILLVPLMKSAAYQEILKFLVSIAVGTLAGDALMHLLPHALFKEEKHEEEVTGINPLESDHKHSNEAALLCGCTFLAALFMYMLENLIPLLKGGKPGHGHSHGHGHSHGRSHGHMEKPAAKDAIDLPPPRELNVMLQEAKLDEKTPDRPLTPVAFMVIIGDGLHNLTDGLAIGAAFASDPVTGFATAFAVLCHELPHELGDFALLLQTGVSMRRAVYMNIVSSVLSFVGMSVGLFIAGIGDGMTQWIYAATAGSFLYIAFADLVPTMSVAHNPEKAKDPKGIIIQIFGILLGGLIMLAIALNEHDLEGLFKSF

SEQ ID NO: 40279 - DNA, 7029 bp, DROSOPHILA
tattggaaaaagctcaagaaatgtcatgtgagcaaccaaaacagaaactccagaacgggagagtaaagagcggggttctgagaagaaacgttaaaatgtttgcagttgatattaaaagataaatagtcaattgcactgcaagaaatttttgactcttctttttttagaatatttatttagatatttaagatagttttattaaattttcgtttaatcatatttatattttgtgggaatgatcgatttatgtatactattagattacgatgtttttaaaagaatttagctctcttgtttgttgctggggaaatgttgttcttattttgacttggttgctagagtaaccgttattgatcttcatcaataaagtatttgtttttttttataataaagagaatacttatgtatatgtaatgaatttaaactaattgtgcttttttttatcggatttatgatggcccccttcgtggataaatcgaacttaaaaccgatcttgccctgtttctctaagtgtgagagccgaaaagctcagcaacaggtgagcttgctgagcggaccgattggcagtggaacgcggactgagcgcgcctttgagccgagcttttcgctctgagccaagtgagttttttttcttgctttctaccgtacgtgtgtgtgggttttttgtctctgttttttgttgctgggcgcggcagcagcggcagttcgacgtgaactcgcgagcggccaacacgtaagcggcgcgttgtgcagctgtttaaaaaactcggcagcaaaataacaaaaaaaaaaatacaaaccccaacaacagcaaccaactcgataataggcagcggcgcaactgaagtgtgaattcatattgaggttatgtaacgccatatagtgtaaaataaggcgaaaacaaaacgcactagctgcattagtcaggtcacacgctcacctgcaaaaattcagataattccaagcacgcgcatcgattcggtcttattacgcattcgcaatggaggacacaaaagctccagcggcagcgcaggcgcaaagtcatcctttggaggatgtgtccctcaatgggaacgatgacgacaagcagacgcccaaaaattgggttaaattcgacgacgaagcggatagcggtgaaaaaaacaataacagtaacgacggcgatgccacacagcagcaacaacaacaaaacaagttaactctgccgccaccgccgtcggtggttagtagcaacaacaacaggagggcgcgctcgcgcagtccgtccgctacagtaacaacaaccacacctgtccaggtaacttactcactctctccatcctcgcatctttctcactcgctctctgtcccgcttactccactgcgccctctcgctaacgcaacgaaacgcattccaatgcaagtcaggcccttgttggccctctcgctcgcacacccgtttgacggtacagcaaacactcgcattagtagaatgctttggttttaagaaaagaaaataaacattttcaatctttaagcgtaaataaaacaagagaggcgaccccaattttatgaattttccaatttaatattgtcaactgaacgtaggatttaatactcgcatgtaggttatattgagtcaaaacctataatgaagtacagatgtacgagatagcatgaagtcaaattattaaaattgtagtaatacaattgtagttaatcaatatgctttaaattggttgctatttatagttttctagtgaatacacaaatttgttcgtttgcttgttgtgaattagcacatcatctaatatcttatagcacagcaaattttcttctgcttctctctctcagagcttgtaaaagcacctttatcaagtcctcactgttcttttgctgatgccgcttaatggagttgttatgtgaagtggcttgggttcttaactttcttctgcttgattttgggaacgttgcacgcatgacaaatgaagttgggggcccagctgagagttggagttgaaacgggtcccatccggtgataaactctgactcaacatacctttacttgcgatgcttttcatatacttgtttctacaaagaagtaaacacaagattcttctgagagcatactttctgattcagttcttttatactacaaacgacatagcttagttgtagttaaacgattaaattcactttttttttttaactttttatttagattactcttactgtggtaagacgtcaataaaacgagtactgcaattgttaaaatatttccgcggccatgctgattatttgcttttttgtcgtaaatatttgtcatttatctttttatatttcatttcgctcacttcgaagcttgtcaacacagtctgggagcttcaattactttgcacaaccctgacactttcagttcaaaattgtttataatgcgatagaatttcagggtattgcagttgaatttaataaaataaacgaatgaatttaataattttaagcatcctgtttagtttaccttattactctaatttttactttgcgatctcaaactaaactaatagagcatctaagtactaatatcattcatatgactgctactttgcccacttatcttttgtttcaaagtttaccccagattatcagaagttttgttttggtttgcctacctaatagtaaatattaatttaccgaatataaactttgtttagattgcttatcgaaagtgatagtcaaactacagaaaagtggaatgccaaaaaagtttgcagttgtaaaatattacgaatttctagagagaattagatactacgtagagcaacgtcggatttgcccaagagctgaacgaaaaccaataaatcgcatttggcttttcaataacaggccttttgaagtcagtggattgccttcagaaatctgtttttgtcaacggagaacgtgccctgccccaaattgctttccgttttattgtcgcaattgaatgcgaacttatagttgtaagttttaagcttctagcattttaaagactgactaaaaatcaataaaattgattttgcttagccatttgcataattctcatggtggctggccagcgtttgacccttgggccattgtcgtcttaagggcaagaccactgcaatgctaaaccatacttgtttgcctttccccagcgcccggcagtttcctcgaccacagctgcgacaccgggcgaagtgcagccgcatgcccctccgccggatgtggcgcccgctgttctgacaaccgagagcacgcacgttaatctgagtgcatccggcagtggcatcgtcagcggagcaagtgcgaatgcaagtgcgagtggatacgcacctggcccggtccgccataccccgcagctaccaaaccaaaaagccgccgccgccccctctctatcgtccgctggcgcggcatcctccggacatcagcataatggaggtggcgccaacggaactggaattagccagccggcggaccagggatccgggatgcgcacaatcgaattgtcaacgggtcgtatacgcgagggattcggtgagtgatagacatgaattttcggaaacatctatagtcagctagtcaaaaatatcataattaattcattggtaatgtttgtttacttgttttgatttgaataattcatttcgatgacaaatatgatgtcctcttttagtaaaattttacagtttaattaaaatagacatataaactttggaaatgcaaacagtttccgagctgtcaaagaatttagttgctattcaaaatttagagctattaaaatattacttaaaatatatatgcttctaaagtattcagtataacttaaagtgggcaagaaagcttcttatatttatattttacaccctatagcaaatggcgatgtgattgtcacacttctgccggccaacacgaagtggccgtggataaccccagccatattccgtccggaactggtgcccgaggagctgatggctcagggtctgacggtaagtcgggcaaactgttctaactggaaaatagttaaataaaattatacttttccagctcactgtggaggactatgtgaacgcgatggagacgctggtaaacgactaccgcttcaccgtgtacaacatctgctacaagcgcatcctggtctgctggatcctgttcgcatttacggttttgctggccctgctcttttccggactgcagggtgtggccctgttcgccctgggagtgggctggctattcctgaacgcggcggccatcttcctgtgcatgtgggtgaagctgcgcttgtcgcgcggccttgagaagtgcctggcaagagtgaaccggcagctaatgcgccacaagatcctgctggtgctggacgatcggggccgcatctcgtgccacaaggtcaacctgtgcttcatgtactttgatgccacacagtgcgttaatttcctgaacgagttcctggagcatacggagcaaactggtggcgatgccatcaaggcgggctgggaggcgaagctggacattgacctaaacgatattgttatccagggcagtcagccggtgcgaatgccccgcaagcaggtgagctagaagtttacgttaactatcggagggggttgtttctaagtaggggtagttgacttcatcttcatctcccgggatcgcactcgcaacccaaattaccacgtctttctctcactcacgcccctcatgatccaaatgtccaactactctctttaggccgtggcccaggagctgtttctgagctacctgcagcgctggggcaaggacttcctgcgccgccgtctggattggactgtccaggaggccggcgtccacgagacgccccgccatctgcaatcgtccatctgtccgtgccaatacgaggaggagttgttgcgcaacaagatcaagatcagcctgcagcaccgccactgctgcggcatcaactgcatgggctgctggctctaatccctgacatgtaatcctcaaaaaatgtttcgtttcttagattgccgagaatctattaaatgcctagccaaaaaagattaaaatggttattttattaccaatattctcttttatgtatacaataatcgaagtttcttttgttttccagtaatagtaaactaatttataatatttttaataatttaaagcttaaacatatatcatatgtttttaaaaacattattatttttaaaggaattccaaagcttatgagaatgcaaaatagtgtttcccaagtacattttcaaataattgattaatagaatgtatagatagtagtataaagtttttaaataagttttccgactgtatattatgcgattgttttaatagtattaacattatgtaagcgtgtttatttatgtaatgtatctattgcatttatatcccattgtatcttatgcattgtattcacttacctacgtatgaaatttgtacgaatttcagctgctgccggaaagtatgcagcatccttagagtgtaattccggcttactaacctcatgcaccatacaatcatcattgcccacgttcctaacccaactcaccagcaccatccacatgcacccagccctatctgtttaccccgtgtctcaccacccgatctcccccgaatctccgcaggagcgcggcctgcagctgttcctgcgctacggatcccgatggggcatggaggccctgaggggcctggtggacgtgacccccttggagccgggacgccactgcggacagttccagtgcccctgccagtacatcaaagagcacctgcagtgcaaaccgcgaggcaagttcaagtgttgcaatttagtgcattgggtgatggcatctgaacgctacgatatcgatagttaaatcttgttgttcttgtgaatgtctgtgtgctgtaactaaatgaatttaccgagaggctttgtttggaacccatgaatttatataacaatcctacaatcgcgtgatgctacatggataaacttcctacttttccacctattatgccaatgatcgactctctttcgtttcagatgttagcccctagggctgaggcgaaattttgggggtccattggcatccttaatttctttccttatctataattcttccttctatgcctaattatatatgtgtgctaaattaacccaacagatatttcaaaatttttgatcaaacacgttcttttcatgcttccgcaattgtacacaaaacagttgccataaacagcattggccaagtagtttggacccgattccccttgtttggtggctagagatttagctgtttgttggccacaataatacccaagtacccacacgatttcaattggtgaaacacagaaatactaagccgtttcgatatttttatttcaaaaacaagattgcgctgcatattatataatatatattaatcaagcgaatgaacttctaacataagacctgtacaaattttcctctacgaagtacttataacttgttggtgtcacaaataaatgtcaaatatatgtgtacagattatatatgtattattattatttgtcagtcttttattaactgtcttccgttgcttaatgattctatatgttaactttcattgaacgcctcttacaggttatccatgtggttgcattgtctatggttcggatcccagttttcagtatcgttactagatatgttcagcctcattttatcatttaacccaactatcggaactcagtgtgtgttcaaaatgtgcagtttttaaattgaatattatgtaaggtttgccaaataaataaacagttcttccgcattttcagttttcctgcaaaacgtaataattgccgagacggcacaaatttgtatatagcatatgaaacttacctaaatgcacatcaatgtaggtaaatatttcaatataaaataattgttacaagtgaatttcaaaatttgcaccttaaaagagctacaaaagtctttccctcaaatatcgaattaatgtgagtttttttcaagccaaggacatacgtttatgacttgcaactgttcacatgtgaggctcctatatctca

SEQ ID NO: 40280 - DNA, 1809 bp, DROSOPHILA
atggaggacacaaaagctccagcggcagcgcaggcgcaaagtcatcctttggaggatgtgtccctcaatgggaacgatgacgacaagcagacgcccaaaaattgggttaaattcgacgacgaagcggatagcggtcagcgcccggcagtttcctcgaccacagctgcgacaccgggcgaagtgcagccgcatgcccctccgccggatgtggcgcccgctgttctgacaaccgagagcacgcacgttaatctgagtgcatccggcagtggcatcgtcagcggagcaagtgcgaatgcaagtgcgagtggatacgcacctggcccggtccgccataccccgcagctaccaaaccaaaaagccgccgccgccccctctctatcgtccgctggcgcggcatcctccggacatcagcataatggaggtggcgccaacggaactggaattagccagccggcggaccagggatccgggatgcgcacaatcgaattgtcaacgggtcgtatacgcgagggattcgcaaatggcgatgtgattgtcacacttctgccggccaacacgaagtggccgtggataaccccagccatattccgtccggaactggtgcccgaggagctgatggctcagggtctgacggtaagtctcactgtggaggactatgtgaacgcgatggagacgctggtaaacgactaccgcttcaccgtgtacaacatctgctacaagcgcatcctggtctgctggatcctgttcgcatttacggttttgctggccctgctcttttccggactgcagggtgtggccctgttcgccctgggagtgggctggctattcctgaacgcggcggccatcttcctgtgcatgtgggtgaagctgcgcttgtcgcgcggccttgagaagtgcctggcaagagtgaaccggcagctaatgcgccacaagatcctgctggtgctggacgatcggggccgcatctcgtgccacaaggtcaacctgtgcttcatgtactttgatgccacacagtgcgttaatttcctgaacgagttcctggagcatacggagcaaactggtggcgatgccatcaaggcgggctgggaggcgaagctggacattgacctaaacgatattgttatccagggcagtcagccggtgcgaatgccccgcaagcaggccgtggcccaggagctgtttctgagctacctgcagcgctggggcaaggacttcctgcgccgccgtctggattggactgtccaggaggccggcgtccacgagacgccccgccatctgcaatcgtccatctgtccgtgccaatacgaggaggagttgttgcgcaacaagatcaagatcagcctgcagcaccgccactgctgcggcatcaactgcatgggctgctggctctaagagcgcggcctgcagctgttcctgcgctacggatcccgatggggcatggaggccctgaggggcctggtggacgtgacccccttggagccgggacgccactgcggacagttccagtgcccctgccagtacatcaaagagcacctgcagtgcaaaccgcgaggcaagttcaagtgttgcaatttagtgcattgggtgatggcatctgaacgctacgatatcgatagttaaatcttgttgttcttgtgaatgtctgtgtgctgtaactaaatgaatttaccgagaggctttgtttggaacccatgaatttatataacaatcctacaatcgcgtgatgctacatggataaacttcctacttttccacctattatgccaatgatcgactctctttcgtttcagatgttagcccctagggctg

SEQ ID NO: 40281 - protein, 463 aa, DROSOPHILA
MEDTKAPAAAQAQSHPLEDVSLNGNDDDKQTPKNWVKFDDEADSGQRPAVSSTTAATPGEVQPHAPPPDVAPAVLTTESTHVNLSASGSGIVSGASANASASGYAPGPVRHTPQLPNQKAAAAPSLSSAGAASSGHQHNGGGANGTGISQPADQGSGMRTIELSTGRIREGFANGDVIVTLLPANTKWPWITPAIFRPELVPEELMAQGLTVSLTVEDYVNAMETLVNDYRFTVYNICYKRILVCWILFAFTVLLALLFSGLQGVALFALGVGWLFLNAAAIFLCMWVKLRLSRGLEKCLARVNRQLMRHKILLVLDDRGRISCHKVNLCFMYFDATQCVNFLNEFLEHTEQTGGDAIKAGWEAKLDIDLNDIVIQGSQPVRMPRKQAVAQELFLSYLQRWGKDFLRRRLDWTVQEAGVHETPRHLQSSICPCQYEEELLRNKIKISLQHRHCCGINCMGCWL

SEQ ID NO: 40282 - DNA, 22875 bp, DROSOPHILA
actttaagtggtggcgatgatgtcagggattagttggtgacttaagcagccaggggataagagaaaacattggattttgcgagggtaaattcctgcagagcaaagtacctttgtaaagagaagcaccaaaggaaaactgcacttgatttaattcattaaccaaataaggaaaagttttgaaaagcatcagctttatgtttgctaattgcaggaaaccgtgattaagttgaatgacttttcgctgcctcatgctaatattatgttttggatagtacctggtaaaatttaaagaaaatctatgatggggatagaatgtgaaataaggagtgaaaacattaaatggctatacagttgatatatttgattggagtctttaatttgtgaaatgtgtaaaagccactcatcaattatcccgaactttgtactattcaaccagccagcaacatttgcactttcaatcccgcccctttacatcgaatccctttggtgggacaactttgaaaagttttaattaaaccaactttaaagcttttagtgttcctgctggtcagtgctgtcaacatgtgctaggacatgccggatgggatggagagggccatgctccatataaacttccctgctataacttccccacataagcccccaagacctgcacatgggctttattaaatctgagctgttttacaacaattttgccattaacacatttggccaacagtgtcaccagacactgagctttaagcttttctggaaaaacaaaaattgcaaacaacccgcaggttgtcgagaggagcaacttttcctcgaagcggcagaagcagattgggttaaagcctaaaatcctttagcaacctgacagctgtagaaaagcgagtttggtcctttggcggaaagaagagggaaatgaagagcgggtagttggttgggtggaagatgcaaacaagccgtgtgaaggggtccatagacaatggaccgaggactttggacctgtgtcaaagttgcccatcgaagcgacaaaaaatgatgtatcaaactggacaggaaaaaggcagtcgagggggtcgcgtttgggactgcccagttcgtcctttttgtatttaaagttacacctacagaagcgtcagctgtgcttcggtgtcatcctcatcctagggctgtcatgttgcgtctttagacggttcagtgggcttggtgcaggtcctgttcttcctcgttatcctttttcgtttgtgatgtggcctatatcgaaaaactcatccagttgttgcggctttctgcggctttttatttgtgtggttttattagatatctatcataaattgatattttgttgttgttggtaggttattattttttttaagtacagatcttcttacgcttaacattccgttatgaagttggactgctttttgtgttctcgcatgcgattttggacgcctgttaatgctaacaacgtctgtaatggttcgtgtcctagctcaaaggtgactgtaatgttatcttatgctgttatgctagctgctatataacagagatgttacttgttcttagtattaaacaaaatgtgtaactaaatattagttacacatttataaaaaatattgtaagctttaaagtaatataacccatttaccgtttgcttgattaaacaagaaacttgaatgcccatttcctgggttggcttctgggttaatctctttcgcctccctgtctttgtttaatcatccccaaagtatctaaacttttgccctttatctcacctattatctccatcactgtccgaattcaccccccaatagggctctctttaatgccggcccaagtgtaaacaccaaaatctaattgcctaaggacacgcaaaatgcttctgggtttttcgcccccgcattttccgctctccatgtgttttcatagcacgcccttgtgtcagagatatttatggaatacgaaaggatccaagcatctttaactggataaacatggtggaaagaaagtttcataaattacaacacgtaagccggccgaaactgacgaaaatgcgtggaagcaagggattttagtgggcaatgcagtctcagctgttcggttttcatttgcattttgaagtttttagctaagagggcgcgccctttttatgccctgctggatttccgtattttccctcacgctttgcggttgtaaacaaacgctttccaccctgtaaaagtcaacagagtttatggcagtcttgtaggcggcactgttagcctgcataacttgctccccaaaatttctctctatcgatttgttatgcatgctctgcgcaatcgccactcgaattgggctgcaaactgggaccgggaaatatttttttggggatatagggtgccgaactgcgtctcacagcgcccaaaagtcaccctatcaccgctcatctcatcaaattagcacgccgaaacgagagacagtctttgcagatttttatagcaagggttctctcctcacaaatgcccccaatgtggcgctctctcacgctctctcgtacaatttcatctttgcaggggtggtatgtggataaattttagccgccatggatcccagtgctctacaaaacatggatcgggacgcattaaagaagcaaatcgagaatatgaaatatcaggcctccatggagcgctggccgttatctaaatccatagcagagtgagtaaaactaatgccaagaatattagccaaatattttaaacatcaaattgtgaatgttgtagaaaagtcgtaaagtgcaataattaaatggaattcagttcagaaactgttctattttcagtgtctgtgcttgtaattgtgaaagtgttggtatgtgcttgatttgacctacgaccccattaggcatttgcatctcgtctagacgaaacccagagcaaatctcagttttcccagattcgtcaagtgactgtccgcaaagtattcgcacacgtgtgttaaaagccaacacctgagttggccaagaatttttgccgcttgtttgctaaatatttacacaaatataaaggcgtcgtgttgttggcgttggctcactgctatttcgaatgacaacgacagcttcgtctcagactcccttctttctctgtgtatgtgcgtgtgggtgtgcggtccatccatgtgtgtgtgcatgtccttgtgtagacattggctagacatgaacggagccaacccgcctccgatccccctacacggaatagaggaaaaacgtcaagtgaaattcttactttgctacaagaaattactcaggaaacggattgcaaacggattttgccaaggtgcgaaggatttaaatggtcgccgtcggtaaattgcttttgctggatgacaaattccttccttttgatggctgtcgtgccattgactttggtttaattagcaattcagtggaactaagaaggagcaagaagttttactcagaggcatatctagaattcaacgtgtttttctttctaacaaattacaccgcaaatctcattttagttttgaaaaagggcttagccgatgatagtggatttaaaaaaaaaaaaaaaaagatttgtgattcatgtgagtcggaaattatgaatcatttaccatttaaacataccatcatatacgataatttaatatgctaaaactaaataaaaagagatggtatgtttccgatgagtcatttaatttaaaaatgaaatgtcttcgaagtacatacttgtgtacaacaatcgtaagtcttcgttccttaagaatacctatcataaaatttctaaaatatcgcatagcttttaaaaagtaatacatgttgtactaaaaattattactaaaaagtgatagaacgaatatttctgaaattttctagccgaaaattttaattaacaaacaacctctttatttacgaaatcaagataaattgcattttgtttcccattcaaacacatcagttttactaaaatatttgtgttttgcttatttatgtggtccatggtattgcaaataaattttgcagctatctttgcggaagccgtatattttattttaaacttttataggcgggaaggaaacctgcatcataaatcacaattaacactgctgctttctaatggccggcttttaatttagctctgggcccgaaggcaaataccctcccacgtttagccccacagattgcgtttctaatgtcatcttttaaataaacacccaacagaggacgaagcggacgtcctctgatttagttaaacatttagtcagcagctaattatgaataattaattggcacacagtgagtcggcgccctccgctccaccgttcttactcatccgggttggtggctcaactccgacttaatgtggcccaagctggctccaagtgtgtgcgttgctgttagtcgccggcggctttcataaataatttaacacccgactttagactcgcttaccgcccccttcaggcaatgttcggccacgcccacatacgcctaccgccaaaacccctcggatttgccaatttgcagttgagattctgtttctgtttactaatttgcaacgcgccgagatggggctcttttcaattaggcgaatctgctcacgcttctcattgctctcagcttatttggctgcataattccctgttttttgccagattcagttttcagtttgctactgagtcacgttggctcttagtttagaggtgttaattacagaaacgtacgtatctagaatctaccagggatggatgtaaagtgtaattaagcgtaatgctattaaatgtggccacatatgtgctagataccgcaaagattatttttcgcaacaaaatattattaaatctccgcgtttgcaagtaacgaagtattcaaaatgaaaatttgtgttaagtacgaacgtgtggcattctacaaacttagtttaaagactttatgtgtaatatacaaagagactagcaagtgaaatacggaatcatatttgctggcttaaaaccatattaatttgattttcaagcaacaatttgatgcaataatcgccggagcaactgccaattacaaaatattttcaattataaaatgtcaaaaccgcaaactctattattgtttcgtttgatattctaaaaataaagtgtcgccagtttgtcgtagaaaagttgataaacgaaatgtgaggaaaaaccaacgtcaatgttgaagtggctaaatttgcaaatttgttttatctggtatttcatgttttttgtttattcatcgcactccattttacaaaacagcaaccatttgccacttaatcagctcacaaagggggccaaattagacggtcatccgtcattgacatatgtcaaactttgcaaaatcaaagtcaattaaattttgagagcggtatcgagcgttactgattgatggtcgcaattgcacaagactgaccacaaagtggaagccaaaggatggtggatagtaggcggctgattggttgggtgggcgaagaatgttctcgttaagtgcagcaaacaccgcacattacgccgatttgttgcaggcaacgtagcaacggaatggaacccgaaacgggctcacacacacacacacacacacacactcaccaacttatgtggagtcctgcaacccatgattgatggacgagcatgggtttgtgttggaaccacagaaaccaccgtgcgtgacaagcttctgcccgcaatttcccctcattccgtttctgccaccgaactctgttccgttccgttctgtttcgttttcatcctgtcggccattcgggtatcgtagacaaaatgttgcatacctccaggcgcatacatttcaccttaatgtttggtcaggacgcatgtacgctggtatcgtggggcggttgcctcggatgcctccggcgcctttcagcaaaactttgccatggatcgcaggtgtccagcggcgaaacttttactttacatcgcctgaaatgaatttcagttcacttcactcggaaacttcttccgctgctgcatataattcttggcgcttcgcaatttatttgtggctgctggtgcttttttcctcgctcatgcaatgtgtggcgtataaataatgcagaatgagacactgggctacaaaatatgggaaacgctatggagcgcatttcaagcggaaaatgatgttacttttgtggctgtttgggtttggggcttcttgttcgaaatgtttcgcatatatctttatggcatttcaaattttactgcctctcactggcggtttatggccgcccgccacgcccccttttccttgcggtttattatgcgctgtaaatttttcccgcggcagcgaatgcattttgctccctctaatctttgttgcatttgggcttcggtatcgcgagcaaagtactttgcaaacataaaacacaataactccatatacccgtcgttctttatttccaattaaatcagtagatttacatccatttacttacgtcgcgtacatacaaatatggccaatcaattgggaaagtgcccataaataagccgaaatattcatatttttcttgtattttttttagggctttagatttgttattttcgataccaagcaccataaattgtttgctgtcaaatgattacttttggatatttcgataacttctgcaaatattcaatactaaaagagaaagtaaatttctgtaatactacaaaaatatgtattcccacaaaaaatttaacctattttcttgcgttttcttcaagccaatgtggatacccaaaataatgcagtatcatcgctgctaaagtgatgaaaagtttgccaaatcattggattttccagctcgcagcgatctgttttcttccagttcttgttaattctccattgatggcgcacaacttttcagctttttggctggctgccccgccaactggctttcttgaaaaatgtctgacaagaatgaaagctgcgacaaaaggagcacaaactttgattaagccagcgaaatgaagctgagttgaacgtggtacagcggatacaaatggaaaatcctctttggcatttttccccaatgccccattacgcgcgtaaaacactcatgcaggcattagatgcgatttctaaaatggcagttggaaacacggtcgagtttccatcgagcagaaagcgtctaagaaatgttttgggatttccaactggccagggaaatgtcgaatattcgtacgtttaaactctaaaatggctgcgcacgcaaattaattgccagtacgtacgcataatgaaaaacagcaggaagtaagtgtggaaactgctgctttcagttgtggttttggccacctctggcttgtggcttaacctttgtttgtttgtgttgttggcgggccacgcccacatggccaccaccgccctccggtggaccactgaattggattagcggcttattcaatttcatttaaatgcaaaacatttcgaacaaaaggttttcggtcagtgggacaaactttgaaagtaaaagtttaatcaatttgtggttctctttcttttaggattctttgtgaaaaatgacagagcattcctttacacatttataatttccgaagggctaaaatgttttaaatacaaattgtatctataaaaatgctcgcaaagaatatttcccatatcttaaataacactgtttatgccagaaaatttttattttgttccagcttaacatgaaatttggcgaaagaacccagtttttgttttctgaatttttcgcacatttttcaagtctccaatccaaacacatcaccccgaaaaccaattgccccacctccaagtaaaaataaaccgaccttacatagagaacaaaagcaacaaccatcagttatggagaataaattacaccggctagcggactgtgtcctggaatatgacaaacacctgctgattgctttatgactacgcagtcttccactcacctttccccacctttcttcgactttctcgaacgtcttggcagctatttatgagagcttttcgctcttatattcttttttgctttgcatacagccaaggagttccttctgttcctgcttttccggctgccttttgtgttgttgttgacacttttaatgctgattaatggttgcgaacgttgcatgccacatataaatgaattgtaatatggcagtgccatgaaattggtgggggaaaaccgtcgcaaccgaaggagccctgagttggcggcattcatctaccatgagttatgattattgggtctaattgtatgtttggtttgcgaaaatagaaactatagccttgggttaaaaaataacaaggaatgacctgcgtaactgtaacattattactgaaatgatcgataaaaccgtttatattttaattgacccattttttaataatatgcacttacgcaattacgtccagatataagaagaccgtaatgtgtatgcagttttataaattctttcgaagccaacatctaagtcaactctatcggcttcagaatgcttagttgcagctaagaattctaagaatgtctgagcttcaaaggaaattcgaacgtatataccatcgagtggcactttactaaggcaactgcattatctgccgcacgcgtttcactcgccacaaaaagtcaattccgaacggaattttgtggcaaacacatcagtgcatcaaagcagccacaatgatcagccaaaaacattcaattagctcccccaagaaattccacaagtgctggttctttgctcctctgccacatttaagcaggagcagcagaagccaattaagcagttgtctaatgagaaaaccctgccaacgaaggccacgccctccaactacaagctgcaattaccgccttctctttgctcctttcgcattccctcgccattagctaccgttgattagcccaatgattgaacaattggcccgagggacaagatggctgtaatgttggccataaagatgacgaccgccattccatcagcattgtcatttgcattaacgttcttttggttttccatcgttcattgtagacttaatatggttttcattctcgaagagcttttcattaagccccgaattccgagtattttactgcaaatgtgcaatcaatacagtaactaaattgaattatagtaattagaaataaattatatgtcaaagcacgatttttcgacttgagcaacataagcctttttcaagcatttatatctctgttgcaatacctatttggaaacatctggatctaccctcgcgctcaccggctggcatttcaaatatttatggcattatttgtacaatattattgcttttcttgctgtttctgcttttgttgccgttgttcttgcagcgactgtcagctttttgctgctgttaataaaaacagaaattatgaacacatgtaacgaggggagatgagggagatgatgggtcttctccgctcctgaattgtcctggaaaatcgcgatgctttggcgtttccatttttttttattgcgcgcatttttcccattgacacatggggggcaaagtaaaaaaacgacgtctgccgtgtgttctagcatcggcatccgcactcgcatccgcatccacatccgcatccgcattcgcattcgcatcagcgatggcagcacacattattgacataactacaaacaatttatgggcaaacaacggttacgtctcgttacccccaactgttggctgccatcgaggtcgtaattgaattttgctgcaagctgccgagcagcgccaccatttctgccgcccattttaccgctccacggcgattgcatttttgacagccacagttcgcggcttaaataataaatgaaatgacttaataccgtattaaagcattggccccgtgtccccgatccaatgaatcatgcacgtccttctgcaaatcccacggccatctatgctaacattctatatatagtggaaaggtcgaaatgttttcgcttctccgactgtctggggaattctcttggccctgttcctccagtttttggcggaaaactgccagaatacatgatgtgtagtggtcgggatcctactgcgagaatattttcgatggcttgcgaagattggcaggctttggaggttgagagaccttcttataaataatttccatcacttaataatttctataaatgttgtccgctataaactttctaatagaaattttcttttcgaaggtaagggtttttctctaaatggatttaatttccctttatttatgctgaataacttttgaaatttcgatgaataattgaataattaatagtgagaatctatctacaactcatagaggcaaccttcaggcttcacaaagtttgtgcttagtcaaactttaaactttaattcactaccaaacaaacattatgcgattcccctattttcctcctcacactcagatcagaacttagatgagctttttatgggcaattccccaaagccttttgcatatttcccgcctcggctggcaaatctcttggtcatggtcgtttcactgcgctgtcccttcctgtttgccagcatccttccttcacgccagccctcaatcctttaggtcttccatttttttaatttgttaaattgtgtctggctgggcgaaatgagcagagtgaatggaagacagacaatggcggagcgaggcaagagggtggtgattttaattttaagtgcagtcatgacttttgccagtcactgtgactgcaaatgtgactgcgactgtcgtggtagcctcaacgtgccacttttccacgcctttcttacccgttcgtcctcgttttcatttgcgaaattaaattttgcatacgtaatggtggacagtcacgtcgagagccttttgtcggtgactgtactggaccagaacctttcccctcacacatacatacaatgttgttcatactcacactcaaagccatgcattcatgcatggaagagtgtcagtcggttattaggagcagctgaaacggcaagacgttccgccttcgtctgagtttcatgtgccatgttccagtaattaaaacaacttttccccggcgatggcgtctcctttggatactttttgcacatgaaatgtgcgccataaaatctctggctgtcttcctgcatcattgtccataacaatgagacagcgttgctctccaaacacgaatgtttcctggtcggtaggtggtattacgatcacactgagaaaaaatacttgtaaatcatcagactattctttatgatgcacatatctgcattatgtatgtatacccttatgccaccaaatgctctaagcattgagcatttctaattgtgtctagaaattcattgtatcgattataaatatttttgattaattttggcttagtgtagttacacacagatacacaacagattcgagcacatatgtgtgctccatgatggccatttgggcttcatgatggccatttgggcccatggataaaatcgctttgtttccgccgcacccaggtgcttcagcgccaatgtgggcttaaaattaaattattgctttatttatgcagcgaaatggtcatcaaatcgagattgtgattgcagataaagcgacggaatcgctttctatggagagggcgtaaaaatgccgacgcacgcatgagttggataaaccaaaaaccatacaaaaaatcttaaacaaacattggtttgtctatttagttgtttcgcacaaaaatattgagaaataggaaatcgaatgtgtatatttatttattctgattctcttacgctgtttgattgttcagtggaaatatattcattgccatgcaaacactcggtaaatttgccattcatctatgtacttcgaaatggtgtattttaattctttttaatgtagaattaaagccagacatttttttactaaaatgtaaggctcttgaaatgcttgaattttattgttaggaaccctgttaggaacttctgttaccagaagttgttaaccaaagaccaaaaactaattcccacttctttgcacttcggctagaatttgacaattgaaaaaccaatttacgagaggtcttttgtctaggtttttttttggtgtccttcagatgccagcactttaaggacttcgtgccgtgtgccacccgaacttttcatcccgaccacgcggcactcattaagctactgcgacaggacttaacctgctgtagtttaccaacactggctgcggggtgaaaccgcagctagaagaatcgacaatgaaaaaaacgttagccacagaagacgatgggggaaaaagaggaaaagtttcacaacaaatgtccaaaagccacttaacggcgaattagagcgcaacaacaacaagaattgcaactgggtgagagcgagttgagagcagcgacaactaactaacaaaaaagtacagttaacgctaaaaggatacggcaaacttttcaagcgtacagagcaacaactttgtatcctcgtttgcaattgagcatcgggtgaaaaccgcaggatgtcagaaatgatggacacgcccctccccaccactaaagtaccaccccccttcgaccgatgttctggctgggaggtacagttgtgtgcgcggttaattgatgatgtcccatcaaactgtaacaactttcggcttgggccaaataaattgtatcctagttttcggcggatattggtgatacggacacacaactcgcacacacttttgctaaccaaaacgagggacagaattaattgtcgctgtggagaatttgcatttaaaagagcagcaagctgggctgctaaaaattgcataacaaagtgcggagaaccatcatcatttagcttgcaaattgcttttcggctctggacataccgaccacacactcatgcttacaccacccactcatccctctacatccttcaacttcctcgcaggcaatttgtcagggaaggcgtgcaaagctcatcctttttttttttgatggtttgatggtttaggaggtcggaaaaaaagcaatgcggaaagtttaattaagttttgcgtgccgattaaatgtgtataaatattaataaacaaagtgcgtgacgaacgaaccagaatttgtggagcgaagtgtcttaaaagagattgtgtggttaaggatattctgcggaagtggcgtgtgctaagcctcgaataacaaacttggttttctgcgggcttcagggctcattaaactcaacttaaactatcaatcatggcttgttcgctgacttggccatcttttttccgcatcaattaatcagtcagcgacagtctttggcctgaaagtacataaagccaaaaaatctactttgtattgtttcatagtttactaaagcttaagccatttgtcattatttgatgactgcaaaactttttgtttaagtttaatctttgtaagttatattcgaaaactggttgtaactagccatttgagaaattccgacttatttcgttgaagaacagcctactatatatattttccagcttaacgctctttccaacgaaaactgttggaaattaaattattcaaattttctcaaatcataagatggtggcatgtctccgatttgcatgtgtttaagttttatagttcgagcgaccgaaatgagattcattttcaactgttcccaaaagtgtatgacatgtgtggcaaagacacagaatgagttaaaagtggaggccaaatctggttgcagcagcaaaactggctctgctgcaaatcaaatatgcaaatacacataacaaccgaaacggggacaacaaaaacacttgggtaaccatttttgcatcaaacacacacgtacattgtatatgtggtatggcatgggtatttgggtgctggatggaggcggaaagcttccttccacaccgctcgacaagtttttgatagcaggaaatttgcaatttctggcattaaatttccgcctcaacattcagttcatcagcagacgagcattatgcatttgcattaaccgccttacccgggtcatgtgtacataactagaagctatacgatctgtaattatcgaagtgagcccaggtattatgtacttaagctctcttaaaatcgaatcccccctaccacaaacttcccccaacaattgtgcgtgccaggaatggtaaataagcgaacagctctcagatatatgtatgtacacatgtgcttagcgtttctgtttcattgctttcgatttctgcacagttctagttaaatcggtttgtggtcgtgcgattgggcggtggaaaatgcaaaatattgctttattccacactcaacttaagtctgtctccttcagtcggcacataaaatacgtgcgagttgagcttagcctgtttccatttaccattgatttctgttttccctcagcccggaatcggatttcacctggagaattgcgttaagaagtgggtgcaatttaagtgaaattgcatgtcaagtttcagtttgaaggattttgtgaaaattggtatggctataaactctaatgaatgtcttaattaaattattatttatgtattattccatagaagacgtgtgttcagtaaaatctgtaaatattttacccaacataaaatagtctcattttattaaaatcatgaatgacccatttatataatatcttaaataagatcgaataaattccaagtaaagtataggcttatgtacttgttcactagtaattaaaattgattggttccaaaacatctttaagttgagaatcccgttactcgtagactaaaagggtaaactagattcgtatcgacctgtccgtcactttaaagttacattttctcggctcaccacactgaatgttcattctatcgatgttgttgttttttttttatccttttatttatgtatattttccaaggtggccttgccagttgagccagttatttgtcagtgcctattcagagttgcttttcgcataaatatccttgcggaccgcacttgtcacacgtcatttgatttgctacttttgaaatgaacaaaaaaccggctacaattccatggcctaacctggggcaaactttgacaaacacttgacgacgacgttgagaactctgaatcgaaaactgagaagagctcggctcaagtgttttttgcacaatttcttttcaattcaacgaaagtggaccggccgagccctttcctgccagccattcccatgcctagtccaaccacctcccccatgctaaacatcctttttctcttgctgctttttgtttttaaggctttcatcctcgtcatcgtgctcggcgtagttttctatgcataaaacttgcgacttttgcccgttcaggctatggaccccgacctacggtatcccacagatcctagaatccggcggcagaatgtggggctggggctggggtgtggaaaagattttgtcttttagcctgatttgttattcatgaaaaggcagtagtggctgaggctgagcctggggccaaaagaatgccagcgagccaaggaaatggttaagaaaatgagcacacttttatggtgggccaaaaatgaagacgagaggggcttggatgtcggctagtgcataataaagctgtttgtaagtggagcgaatgcaaaggaaaaggggaaaaaggatacccttcattgaggtagggggccatccttctggcccaacgattagcgttttgtgcatttcggtctatatgacagattggataaggcgaaaccaacgaaattccccgctcactttcttgccaattgtgagtgcaaacaatgacccagtcagacgaacgtctgctaacagttgttcattcttgacttgccgtttagcaattcactgcacaattcgatgttttgtgattctgattgagtttttctacctttggaaagcagtcgtgacttgtagtttgattaacgccaaccattctactcagtaatctattaaagtccatgctgttgactttaaatatttaaaactgagctatgaaaaatgcgctctaagcatatcagagcgctgtccatcatatatttacacaagttttattatagctcagcacaaccgccatgatttgtgcacacctggcactatcctcctgttttactccatcttaggtatgcaaatctcacccacagcttacctaataaaatgcatccacatccatttaaggtgtaacaacggcgaatttgcatatcccatatgcaatttatttatgctaaatagataaacaaacaacgacagaggaattttatgcatatttctgtgttgcaagcacctgagaaatatgcaatgggcagctaaataatgcgcattaaaatgcaattagctaaaagagtacaagagcatggtggcttacaaataccaaaacaggtactcacatacacatgaccgtatacacccatatatgcttgtgtatgtaaattatggaaggaagaccctcaaagttttgtctgctgagttttaagtaccattttcgtttcttcggcgctggaattctgtttttcttgctgtggcgcttaaaagtgtgctaaatttagcagaaggccgcggcacatactcgcacacacacacacacaccttgttgcagatgagaaagggcacatgtgtgtgtgtgtgagggtgaaatgagctagaaattagtttatggcgaaggtcgtgccgagaaacacttgctaaatatgagtgtatgaaaactagccgaggacatgaatattttatttccataatgatactccgaaatgctctgcttcgagtttatttacatttattggtggtgaaagttctaatacatttttagaaaaacttaaaccattttgtatgcattccaaattatcattttgatcaaatatatataagagtataggaatatcaaccatgtaactcatgtatattgctaattcgtttactttgaatgaaatataatggatacctgatggaagggcaaagcaataggaatgttttcggatatcccccaccgtccgtggtgtgtaaacaattataataggcttcaaatgaaattttaagcttttcatttctgtcacatgcgtggcaaagataaacaatgtgtgccaagcgaattgaatcgaggggctgggactgagataaaggagagcagacagaggaaaacacaagcagatgcaaattgacatgtggctgacgcatttgtttacccaagctgaatatgaaatgtatgtgggagctgtgacagcgtttggggctttttatgggttttgggttgaggtgagctctgggcttttggaaaagcaggcaattctaatttctaagctgctggatctaagcttaatgctttcgaattcgaccggcttctgctactgcggctgccatcgataaataatgctttttgtagcatgctttcgggcgcttaagattgcgtgtgattacgtatacgcacagtggcatttgcgtgtgcttgtggttgtaataaatcaacatttacatcgtgtttatgtttttttgtgcagctgccagaccggaacaggtagaaaactttcaaaggtaaatgattgcttggatggtttcaggcgaaaaaggggaggaataccaaatgttgatttcgcatttaattatagattgtgcgtgtgtctctcattccgctgggcttagattgatgtgggttagctagaccctaaaatcgaatcgacgtttttgctgggagatatgtaacacaaattacttcattaatcgaaatcatcagcatgaatttaacgtatacttaatttcggttcaatgccaatcagataacggtgccaggttttctgtcaattagggtttgattccaattccacctacagattacacaaaattaaacacactttatatatgtaaatgaataattaatttctcctaatgcatacatccggcgatttccattattgtttaattttcatcatcttttgacgtttgtggatcgatcttctgttctccttcgtttggatttcattgttattcgccacagaacatcaatcgcctaaccctaaaagcaaaatgttgtcagggactcggtgatggtgtcggaaagtgcgtccaaatgacttttcattccaggctcttacagttattcagttctgagctccattccgcccaggaaatacatgaacgagtaaaggcagaatgggaaatgtgaggcatttcaattagcacataaaagcccagcatgttcgacatggccatgtggggcttgaggttagtaaaaggggctccagtcctgatagggaacgactatggtcttgcggtcaacatattaaattaacggctgctgaattagttttcaatgtgttcgccgctgaatggcagtttgagaggcaatcaacttgtgtttgcaaaggcacgatgttcggcaaaggcactcaaattaaatgcagatgacgaataaaagtttttatgtccctgtggcatttcgtctacttttacttacattcccattacctacttgtgttatgagaaaagttctccaaaacaagggaaactcataacagatgctaatgatgtcatgcacttgtgggtctgagcagcccgaaggcaaaaggaaaactcaagagcgaaattctagactatatcttggcttctaacaaagttagggaagcctctatgatggcaatatattttaattgctcttacttcatttttgcgccattttgatctaaatttccaaaccagatattccaggggtcccatgtcattgttccttgcccttttcaatccgctttgatattctcattaaaaatgcatgttcagcaacacgcttactaaaagggtttaacgataagagccagactggagtctatatatccttgggtcggcagaaggtccaagttccctaggtattttccaaatttacttttcggctgccaaatatccaacgtcatcataacaactttgtttactgcgcttcgacctggccttgactgccaagccgaatctcgaaccccagaaaacccttggcctttgtttacccttaaaaaagagcagagaaaacagcagaaaaccaaaaagaatatttcctaagctctgtggattttcatctttacttttctccaagtgtgtatgtgtgtgtgtgtgtgttttgagtttgcccgcttgcacgggctgaaaccgcaaagtcataagcccattagccaggacgaataggaaggaaaatggggtggggggcaaagcggtaggcagggggcattgttttaggcagtccttcatgggacatatatccccaaccgctggcatgacattgccttttgctctgttgatgcggaaaatgagcaaggaaatagagaaaatccagagcactggcatgaggataacgacaccggtgtaacaaggacatcgctgccgacgacatggtcttgttaagttaaattatgcatgcatgccacgcccactgttaaacgaggggcggacctcacctgcacaccttggcatgcgataattgagatccatgcagtagacatcagtgaaacagggttgttcggaacaatcagcactactgatggcaaacatctatacacctcgccacatgcaatgcgaaattaatagatttaatcgaacaaacacgacatcaaagtaacaccacaatgtttaaaggcattttgcggtcaaatgaaagcgcacacacaaccccaacaaacacacaaataaattttactataatgctgccaagtggaaagggaagtttagaggcgaggaacatctgcaggatttggtcaagaagccaaaagaaaacatttgtccgataaataaagccacaaatagctgccgcttttgaaatatgcaatttgtttgccggaaagtgcagaaagcaaccatggcaaacgggcaatcaaagtatttatttactgggactggggatgggaaaagtgcccgaggcattttcctttttctgataaaataagatttcaccagcacaaaagaaatcatttctatgaagtgtggtattcaatcgatattttaatcgaagtcaaagtaaactgtttgagaaaaatactttgcttctttgaaattaagtgttaaaataattgtggctgtgcattcatttagaatggtaaataaattggattaacttaatatgcattttacaaatttatgctagattctcaggaattttctaaaggaaagttttcgcaggtgcattaagcttcacttctgctcttttaatttaaggacttcctaaaaactcttattaacaagaaacaatgaagtagattttccagttgagagacttacaaaaagagaattaaaaaaagttaaaaataagagacaggaagatacgaaactaacaaattgaaatgcaaaactcattcccagtcgactgtctctcaaactgtctatttcttggctgccaaagcaagtgccttcaagttcctttctgctcctcgcaaacactccctttaaataaataaattcttgcaaattttgcaaataaaataaaagtagaagggaacgaaatgttttgtcttgagaagcagcagggaaaacgaaataaaaatagataaacagaccaatgggaaggagtctcgcagtcagacagagcgaataaagtaagggactaatgcaaacggcagggccaccatttttatggcccaaaggataagcgtattacacaaaaaaaaaaaaaaaaacaatgtcaaaatttatatgcgaatattttggcgagcgacgaaggaaccgaaaggagcttttgcattgttcgtttcctcggcgcgtgcaaactgttcaaacattttaatgtccatctgcgtgtggattaacataaaatgtgctgtcctttgccatacagactcgagtcccaaccttttccacttcaaaagtgtggtatttacaagtttatgtccgcttagctttaagtgcggatggatgtccccttttgtatttatacctttgaaatgtcttgatttctaacaaagaccatccacaccaggagcttacacattttatgagctttaaagaaccagattaccaaattaaattgctgaagtttagtaaaattttacggtaaaggtggagcgaagtcggagcaaatttataaactgtctttaaggttgctcttaagattgaaacaactgtgtagtaagttttcagtatttatgtcgagcacacgatgagagtgtaattgtaaataatactatttaacttacatatccatttacttacctaaatctaatttataaaaaaatttctttacagaatgcgctcgttcatcgaggagaacgagaaaaatgatccgttgatcaatgcgccggataagaagaacaatccatgggccgaaaagggcaaatgcgttattatgtaatattatcgtaaaccacagaaataccgccataattatgataaccagccaaacaataataatgcaacccattccacgactcataccacaacaacaagaacaacaacagcaactggaacagaaaacaatccatatacctttgaggcacagcctcaacatcatcagcaattagatacccctagccaatgtagcagccaagttttggggcaggatttgggtgaatccccggatctggtgccggtagagatgcagcactacaacaacaactactactactattacaactacaacttgagctatgagccgccggtcgatcggtcgctgggcggcgggggcaagcggagcattcaacgtctgcagcaactggtgcgaaggacgcggtacgagctgcagcaatggccgctactgatgcagctgctcctgttcgtcctttggctaaatgccaagttctggcagctggtcaacgaacaggtgacctaccgccgcaggaggtggcactgaggggcgaaggacatcgggtgttgcttggtatgagttcgatctaggcttaagttgtgaaaattatgcccacactcttacaatctcatctcaataaaaataatcaaaattcgctgcgtagtggaagcagcgaacttcagccaatgcttctgtgtgaacttagcctcccgaaacgaatgcagagaaaacagagaaaaacatcctgaacaccctgaaaacaacgagtacgggcacaaggtactcgctactcgttactccatcacgaactcgattcatcatcgtgcgctcctcatcgttgtcgatctttcgtcgttcctctctcgtcgttttaagctcgtctattttacttctctacaactctactcgctcgtttcatccctcttcgttctttctagctatcgttcctagtcgtttttgcatgccatacattcttagaactttctgttttatatcgctatgtatttttttgcacacattatcatcgacatcgcattccatcatccaatcccacccgaaccgaaaccaaaccaaaaacaaaacacagtagtcgacaacgctaattcaatcatatcagtcataaacaagaatatgggcacgcgccttgataaatgtaacccacccatcatcagtagagtcaacaagaagccttagaaacgccctcgaatcccatgcgaaaccaaaagatctaccaacttttataaaaggtttctcctgcaaagcttgtctaagaaactacccccaaaacggttaattgatcgaaatagataatactttgtttagagaaaactttttcaccattcaaaagaatgcgattaagatcaagggctaactctttaagtagattcgtattttgagtagcgcttttttatttggtagccaggcaaacgctaaccaaacagaaattcaattgttttacttaattaaacatatagtatatacgaatatatggatattataattttatatacaacatacttatagttatatgctaggcaaacgagctatttaaaggcagacgctgtagttactcgaggatgataatattatatttagttttaacaaatatgtttacgatcaactagcgggacattattatatacgcagacaacatacacaaacacttaaaaaccatataagaacaatt

SEQ ID NO: 40283 - DNA, 761 bp, DROSOPHILA
gcccatcgaagcgacaaaaattcatctttgcaggggtggtatgtggataaattttagccgccatggatcccagtgctctacaaaacatggatcgggacgcattaaagaagcaaatcgagaatatgaaatatcaggcctccatggagcgctggccgttatctaaatccatagcagaaatgcgctcgttcatcgaggagaacgagaaaaatgatccgttgatcaatgcgccggataagaagaacaatccatgggccgaaaagggcaaatgccctcaacatcatcagcaattagatacccctagccaatgtagcagccaagttttggggcaggatttgggtgaatccccggatctggtgccggtagagatgcagcactacaacaacaactactactactattacaactacaacttgagctatgagccgccggtcgatcggtcgctgggcggcgggggcaagcggagcattcaacgtctgcagcaactggtgcgaaggacgcggtacgagctgcagcaatggccgctactgatgcagctgctcctgttcgtcctttggctaaatgccaagttctggcagctggtcaacgaacaggtgacctaccgccgcaggaggtggcactgaggggcgaaggacatcgggtgttgcttggtatgagttcgatctaggcttaagttgtgaaaattatgcccacactcttacaatctcatctcaataaaaataatcaaaattcgctgcgtagtggaagcagcgaacttcagccaa

SEQ ID NO: 40284 - protein, 185 aa, DROSOPHILA
MDPSALQNMDRDALKKQIENMKYQASMERWPLSKSIAEMRSFIEENEKNDPLINAPDKKNNPWAEKGKCPQHHQQLDTPSQCSSQVLGQDLGESPDLVPVEMQHYNNNYYYYYNYNLSYEPPVDRSLGGGGKRSIQRLQQLVRRTRYELQQWPLLMQLLLFVLWLNAKFWQLVNEQVTYRRRRWH

SEQ ID NO: 40285 - DNA, 3909 bp, DROSOPHILA
acggtattcctgaagctcctggcgctgctgctccgtttcctttgtttgcatttgcaatttgtgagcggcgcttatgtattcctgctgcaacttggccagattggtttccagttcggagatggagtgcacatacgccatgttagctgcctgggcctcattgtagtcatgaaccgccttgtcccgctcttcggacagacttttaaccagagcttccagcacctgggtgtgttgatgcagatcaaacttttcggtttcgttattaagatcttccaagcgcagacgcagttcatctctttcggccgtgatttcattcagggcgatcttgaaggcagccaattcatttgtgtccattgagttggcggatatgtcgggactgttggagaaactggccgacgtggtcatcttttggcgcatgtccttagtgaccacggagaccccgccatcgctttttacacttgatgagctattggcccccgagcgccgcactggcgacagagtggacttcagggatgtggacagtgattgggtgctgctcgtcatgctcctacgcatgggatccgctgaacctgtggcgttctctgtctgcagggccgttgccgcattttggtccagcttgttcaaaatgttttcggccttgtccgccagtcctgtgatccaggatgacatatttttctaagaaaaacaaatctcttcgagtaaaacacgtaaacaatatcacactgtgtgcccatatcgctatcgactgcggaatggtcaactccaaagttaaggtcactctaaaagtaacgtaattttgaaaaaccttttttctgatcaaaaaaatatttatatgaaaatgtaaggattggttttagaaataaatgtaattccaatctttcttatccgtgcagaaatgttaatttattatgcttatcaaaactctagggtacaaatgaatattttattcaatactcaacatgggcagtgtaatcttcgcaactcacaactataaactatctcttcactttccaatgcaaaagtccttgaagaccacgtcgagtatatcttcgcagctgatgtgtccggtgatgcgttcgatgcagcgcacggagttgcgcagcttggaggcggctatggccatgtccgggtaaacgtcgggtctgtaatctcgtagaaaaatatcaatgttctcaatgcagcgctccagttgctgacggtagcgtgtgtttgtgatgcgtggattctccgcccgcggttctccgcacagttcttgcagctgcttctccagtgatcccagaaacacgggcatcttatcgggcttatggcatgatatggctaacacgttggacagcttgtccagctgctgatgctcctcatccgtcaaagtgtcggttttattggccaccaattgcagacgtttccctgagcacatgtccagaggtatatccaactcgcccagatagctatctacaaacggagcaactgcgtcgtcgtgcgtcagctgtgcaatgttcttggcttctgctaggagcaatatcaaatcagattggactagacaattcttggctctctgcattccctcctgctctatactatccgtagtatatcggcgtaatccggctgtgtcggaaaataccaccgggtatcctccgaaattgtgcattgtttctataatatcccttgtggtgcccgcctgatccgtcactatggacacggatcgctggcagaggagattgagcagactactcttgccaacattgggtgctccaatgatcacagtgcggactccgtcgcggaggagctctccctgccgctggtcactcaaatgctcgcgaatctcacgctttaccgcctttagttctttgccgagttgcaggatgatgccgccttcgatttgctcctcttcggcgaagtctatgtaggcctccaaatgggcagcacagcgaataagtcgacggcgccagttgtcgtagagtcgagccagtgctccagtgctttgtagcagtgcctggagaaagaagagacttgaaacaaaatttatgagaccctaagtccactgtctacctgctttctttgcgcctccgtttcagcatggataagatcggccaatccctccacctctgtcaaatccagtttgccaccaaagaacgctctctttgtgaactctcccggctccgccggccgcaatccatccacttttcccagagcatccaacatggccgcaatgactgccagggacccgtgtacctgaaactcgcaggaatcctcgccagtgaaagaagccggtcccggaaaccaaagtaagagcccacggtcaatcatctctttgctggcgggatggtagaaggatttcagatacgcctgacgagcctatatggaaaagtatttataaagggaactataagtttcactatcatagaggtctctcgtcttaaaacctggcagcttgccaattataacaaattaagcagttcacgaaattattcaatttatttagtcaattatatgtaagttaggagaaatttgtttatttttatacaggatacatctcccaaaatgtatataaataagcaacaggtcttttcatttgcatacatatattttggatactagaaaacaaaactatacactgcacaggtcacgacccctcatatatggaataataaacgtttatatcgattgacttgcctttggctcgtattctttgtttgcaacaattgctcggagggccttctttgtttgcggcccggagacacggatcacggacacaccgcacttgacatgaccggaactgaggctgtagatggtgcatccgctgctggcaaagcgccggaaactgcccaagaagctctgggacgcgtttctgagaagcgccatcgccgaaaaacaattaaatcccaaccgccgaataataaacaattgaacgtgatattaagtgtgaccgcggaatggccgttacaaaaatatatcattccactcggagatatatactaaagaattgtgcgtaaacaattatggagcggtggtaagcttgggtaaatctccagtcccgacacaaaccattttgaccgaaatatgggatttgaaacatgggaacgttttttatttatttctttgttatttggatagaaagaattcacttttattcaattagacagaagtagtttttgtaattttttgtcaaataattatcagattttttgtcaaaagcgttggaaaatatcgaatgacatatctcgatgaacttgtaattaagcccttaattggttggagttcaaatttggtaattttatttttttgacgttttttgaaaaaaatagacgttgttaccccttataaaaaatgtgaaaatagaaaaaaaaaaatttttttttttatttcaccaaaagttgataaaaataataagcattggtaaaaagctgtaagaaatagttcttattaagtctctgagaccaattttagccaagctgtgatgaacttctcaaattccctctccgcttttgacgaagacaaatacacttaaatattttattagtaacaaatatcacatctagtgcagatgtgttacatttttacagttacattttcggatttggacgctttaaaatctgatgccttcgacactatcaatttgatcaggctacaagaatgagcgattgctagaatttctgatgcgaatacaactgtcaaatataaacggtttagaataagaactgacgttttcgggtgctgtaggcgtttgacaaccggagagatacaatgggtggtggacagctatcggtggcacgagcaaatttgttgcgttggatcatcgccgcattggtgtcccattggttgataaaggcacgggcctcgtcgtcacatggctttgccgtactcggtctttcttcctgcaaaaaagattatttcaaattgatttttgtttgaaat

SEQ ID NO: 40286 - DNA, 1539 bp, DROSOPHILA
atcacgttcaattgtttattattcggcggttgggatttaattgtttttcggcgatggcgcttctcagaaacgcgtcccagagcttcttgggcagtttccggcgctttgccagcagcggatgcaccatctacagcctcagttccggtcatgtcaagtgcggtgtgtccgtgatccgtgtctccgggccgcaaacaaagaaggccctccgagcaattgttgcaaacaaagaatacgagccaaaggcaagctcgtcaggcgtatctgaaatccttctaccatcccgccagcaaagagatgattgaccgtgggctcttactttggtttccgggaccggcttctttcactggcgaggattcctgcgagtttcaggtacacgggtccctggcagtcattgcggccatgttggatgctctgggaaaagtggatggattgcggccggcggagccgggagagttcacaaagagagcgttctttggtggcaaactggatttgacagaggtggagggattggccgatcttatccatgctgaaacggaggcgcaaagaaagcaggcactgctacaaagcactggagcactggctcgactctacgacaactggcgccgtcgacttattcgctgtgctgcccatttggaggcctacatagacttcgccgaagaggagcaaatcgaaggcggcatcatcctgcaactcggcaaagaactaaaggcggtaaagcgtgagattcgcgagcatttgagtgaccagcggcagggagagctcctccgcgacggagtccgcactgtgatcattggagcacccaatgttggcaagagtagtctgctcaatctcctctgccagcgatccgtgtccatagtgacggatcaggcgggcaccacaagggatattatagaaacaatgcacaatttcggaggatacccggtggtattttccgacacagccggattacgccgatatactacggatagtatagagcaggagggaatgcagagagccaagaattgtctagtccaatctgatttgatattgctcctagcagaagccaagaacattgcacagctgacgcacgacgacgcagttgctccgtttgtagatagctatctgggcgagttggatatacctctggacatgtgctcagggaaacgtctgcaattggtggccaataaaaccgacactttgacggatgaggagcatcagcagctggacaagctgtccaacgtgttagccatatcatgccataagcccgataagatgcccgtgtttctgggatcactggagaagcagctgcaagaactgtgcggagaaccgcgggcggagaatccacgcatcacaaacacacgctaccgtcagcaactggagcgctgcattgagaacattgatatttttctacgagattacagacccgacgtttacccggacatggccatagccgcctccaagctgcgcaactccgtgcgctgcatcgaacgcatcaccggacacatcagctgcgaagatatactcgacgtggtcttcaaggacttttgcattggaaagtga

SEQ ID NO: 40287 - protein, 82 aa, DROSOPHILA
MALLRNASQSFLGSFRRFASSGCTIYSLSSGHVKCGVSVIRVSGPQTKKALRAIVANKEYEPKASSSGVSEILLPSRQQRDD

SEQ ID NO: 40288 - DNA, 3402 bp, DROSOPHILA
gaatcaagtacgatatgtatgacctatgagagtttgtttgttgaatttgcttttactttttagcagcttcgatttaaatcaaatatacatactaaatgcacacacccctgcacacacacacacagtgctcacgaaggtggtgtgcttgtggtggtgagacttggtgtggtgtgtgtgggcccgtgtgtgctctatataatcattagtacagcaaatgcatgcagaaagtaagattgttacaaacaagagcccagccgaggtatcgcttacttgcggatgaagtagtcacatggctaggcctgaccagggaaggagtagtagtcgcttggagtcggtaggtagggatggatgagcgagccagcacaaagatccgaaaatgggcagaggttaccgcgaagaaatatatatgtattacattttatgaaacgtcaagcttatctcaagaactatttccaaaacaaaatctgaaattataataaacgtatttatgtgaaacccgggtgtgtatttcgtttcccgccatcttgggtccccaggataccgcaatgccaggtgagttaccagagcacctggtggtgcccagtgacccagtggtcttcgttttcgtctccactttgttctcggccagtttgaggagcgaacccaccttggattgcttgattgatgatggactgacatctaactaatggcttaattgatcatgatggatggccacttggagagtcctttcggcaggaccgcgtcaacgcgcagtcgtctaaggtcggtagggttggttggttgtgagtctccgaattctgttttctaatcccgacccaccattagggtcgcatggagcactagatagccgatacagaaaagttccatccccgtgataagctgaatcaaggtacgggtgagggaagaggcactcgattagtgataaggtaatctaattgatgtcgcttcctccccacatagctaaacctggtcgcgcggcagatagtggatggaattcggcatggacacgctgagagctctggagccgctgcaccgcgcctgccaggtgtgcaacctatggccctggcgcctcgcccccccgccagactcggagggcatcctgctccggcgatcgcgctggctggagctgtacggttggaccgtgctgatagcggccacctccttcaccgtgtacggcctcttccaggagagcagcgtagaagagaaacaggactcggagtccaccatctcgagcataggtcacacggttgacttcattcagctggtgggcatgcgggtggctcatctggctgccctgctggaggccctgtggcagcggcaggcgcagcgaggcttctttgcggagctaggcgagatcgatcgcctgctgtccaaggcgttgagggtggatgtggaggctatgcgcatcaatatgcgtcgccagacgtcgcgccgagctgtgtggatcctgtggggctatgcggttagccaactccttatcctgggcgccaagctgctctcccgcggagacagattcccgatctactggatcagctacttgctgccactgcttgtgtgcggattgcgttactttcagatcttcaacgccactcagctcgtgcgccagcgcctggatgtgctcctagtggccttgcagcagcttcagctgcaccagaaagggcccgcagtggatactgtgcttgaggagcaggaggatctggaagaagcagcaatggatagactgatcgctgtcagactcgtctaccaacgggtgtgggccctagtggccttgctaaaccgctgctacgggctctccatgttgatgcaggtgggcaacgacttcctggctatcacctccaactgctactggatgttcctcaacttccgccagtcggcggcctcgcccttcgacatcctgcaaatcgtggccagtggcgtatggtctgccccccacttgggtaacgtgctcgtcctctcactgctttgcgaccgaacggcccagtgcgtgagtaaaatggagtaattgtcccgccgacatgaatctattaaagatggtttatttgctttccaggcgtctcgtcttgccctgtgcctgcaccaggtaagcgtggatttaaggaatgagagccacaatgctctggtaggtacccttgtgcgctattgtgcgccattgataatcctcgtcccgctccagataacccagttctcgctgcagctactccaccagcggctccacttcagcgccgctggcttcttcaacgtggactgcacccttctctatacggtgagtgggaatttcgaatagaatccggataacagttcgcacattccagatcgtgggagccactaccacgtacttgataatcctgattcagtttcacatgagcgaatccaccatcggcagtgattccaacggacagtagcaaccgaacagcaggagtgacctgtttccccttgttggcacaaatattaaataatggctttaacgttttattggtccataattagaaatttattaaataaatttattaaatttataaattaattaaaataattagaaaaataattagaaaaatcggcggatttttttgccacattttcctgtcctaggcaccaggcgaacagaaaccgtagccagtcccagctggctgatcgaaataagctgaaacagctaaagctttttcatgatggctacgttttaccgttatccttttgaccaataggatgccagttgatggagtgaaaccgttagttgagcttagaagtaaacaaaaacatctgttgtctttcattatggtcttctccctactgaaatttccgttcgcctggtgcccagctttgttaaaacatcattcggcggctcaaatattccgcaatgcaccctaaaattttcttgattaggcaccaggcaagcagaaaccgtagccagtcccagctggctgatcgaaataagctgaagcagctaaagctttttcatgatggctacgttttaccgttatccttttgaccaataggatgccagttgatggagtgaaaccgttaattgagcttagaagtaaacaaaaacatctgttgtctttcattatggtcttctccctactgaaatttccgttcgcctggtgcccaactttgttaaaacatcattcggcggctcaaatattccgcaatgcaccctaaaattttcttgattaggcaccaggcaagcagaaaccgtagccagtgctagctggcagatcgaaataggctgaaacagctgttgttttttcatgatggctgccccgtacgttttccagtgtcctctcgaccaacaggaagccagatcgatcaaggtaaaccgttagtttggaataagctagagatgagaaaacacgttgattgtcacgaattaagcacgaaaagcacgacgataaggccaattcccat

SEQ ID NO: 40289 - DNA, 1233 bp, DROSOPHILA
atggacacgctgagagctctggagccgctgcaccgcgcctgccaggtgtgcaacctatggccctggcgcctcgcccccccgccagactcggagggcatcctgctccggcgatcgcgctggctggagctgtacggttggaccgtgctgatagcggccacctccttcaccgtgtacggcctcttccaggagagcagcgtagaagagaaacaggactcggagtccaccatctcgagcataggtcacacggttgacttcattcagctggtgggcatgcgggtggctcatctggctgccctgctggaggccctgtggcagcggcaggcgcagcgaggcttctttgcggagctaggcgagatcgatcgcctgctgtccaaggcgttgagggtggatgtggaggctatgcgcatcaatatgcgtcgccagacgtcgcgccgagctgtgtggatcctgtggggctatgcggttagccaactccttatcctgggcgccaagctgctctcccgcggagacagattcccgatctactggatcagctacttgctgccactgcttgtgtgcggattgcgttactttcagatcttcaacgccactcagctcgtgcgccagcgcctggatgtgctcctagtggccttgcagcagcttcagctgcaccagaaagggcccgcagtggatactgtgcttgaggagcaggaggatctggaagaagcagcaatggatagactgatcgctgtcagactcgtctaccaacgggtgtgggccctagtggccttgctaaaccgctgctacgggctctccatgttgatgcaggtgggcaacgacttcctggctatcacctccaactgctactggatgttcctcaacttccgccagtcggcggcctcgcccttcgacatcctgcaaatcgtggccagtggcgtatggtctgccccccacttgggtaacgtgctcgtcctctcactgctttgcgaccgaacggcccagtgcgcgtctcgtcttgccctgtgcctgcaccaggtaagcgtggatttaaggaatgagagccacaatgctctgataacccagttctcgctgcagctactccaccagcggctccacttcagcgccgctggcttcttcaacgtggactgcacccttctctatacgatcgtgggagccactaccacgtacttgataatcctgattcagtttcacatgagcgaatccaccatcggcagtgattccaacggacagtag

SEQ ID NO: 40290 - protein, 410 aa, DROSOPHILA
MDTLRALEPLHRACQVCNLWPWRLAPPPDSEGILLRRSRWLELYGWTVLIAATSFTVYGLFQESSVEEKQDSESTISSIGHTVDFIQLVGMRVAHLAALLEALWQRQAQRGFFAELGEIDRLLSKALRVDVEAMRINMRRQTSRRAVWILWGYAVSQLLILGAKLLSRGDRFPIYWISYLLPLLVCGLRYFQIFNATQLVRQRLDVLLVALQQLQLHQKGPAVDTVLEEQEDLEEAAMDRLIAVRLVYQRVWALVALLNRCYGLSMLMQVGNDFLAITSNCYWMFLNFRQSAASPFDILQIVASGVWSAPHLGNVLVLSLLCDRTAQCASRLALCLHQVSVDLRNESHNALITQFSLQLLHQRLHFSAAGFFNVDCTLLYTIVGATTTYLIILIQFHMSESTIGSDSNGQ

SEQ ID NO: 40291 - DNA, 3493 bp, DROSOPHILA
ttagttgcacttgacctgtcatatcttttactacatatatatatatatatatacatttcatatgtctttagctataccgctcaaatcaaacccatctgtgttcaacttgactatatcttctcgaatccgtccttcagcaaccataagttgcaaatagctggctggggactctctcataagcagggctatagcaatgtgctgctacaggcctatgtcaatggcaggaacgcggacgagtgctcattgagtgaaccatccttgggattggacaaggagacccacatatgcgccggcaacctgggaggcaatgacacatgcaagggcgattccggcggtccgctgatggccatcatggaacgtggtgacgaggaattcgtatatctagccggaatcacatcctacgggtacagtcagtgcggatacggaccagcagcttacacaaagacatccaaattcgttgaatggattctatggaacatgtacactaatatattccaatgaaataatcaaaatagtagaatttggttaagaaaagaaatatttattgtccggcactgagcccaaattatcgcaaaaataaattaggaaatttcattgagtcattgggatttatgagtttgttgatccattttattctgtatatttagtgtcagatcgagtttggatgtctagcatgtcggacagacgtaaagtttatattttggtccttctccaggccattttcttcaaccaattggctgagtgtggtaagcaaaagcaatgatttttaagttttcgtaaaaaaccgaagatgttatatcttgctcaataatatccttgcagaggatgtgtgctgtgaataggtcacgttcgaccccatgaattataaaaattatcatatccatcgatccgttttattataaatcatattcaaaaataataataataataatatttccacatagactcgtactgctatactttatcggggctttcacttatctatttttgtaatttatagttcggttatcaagctgccaaaaggatgagaaatgcaccagactggttagctgctcgccgcttatgaacatccttaggccccggggcatgacccaggcggagaaagatgtgtttgcacacaggcagtgtggcctggaccccaatggacacgagttgttgcacatggtttatgtctgctgcccagagttgggtgacgtcttgcccaacaaacagacctgtggacaaacgacgcccgtgttccgagatcggggtgccgagaatgcagagcttaatgagtacccttggatggtattgctgttatatgagaatcggctatccttgatgtggaatcaacgaactggttgtgcgggctcactgatcaacagtcgctgttcacacatgaacacgaatatatttaaagacttacaattttgggctccgttcatatcttatgtaaatgaatcgagagcgataaattatatttaggattttgttatctaaggcgacatgggtgcattgctcaaaaacatgtaatttaagtgcacactacatgagtcagtcacttgagatctttccccgcctcctaaaatagtcccttagtgggagaccacagataaggtcctcgccgctcaagataggcagatgtgcccgagcgtgggacctcgataaggcggggactatttacttaggcctctgcgtaggccatttactttaagatgcgattctcatgtcacctatttaaaccgaagatatttccaaataaaattagtttcttacaaaaactcaacgagtaaagtcttctcatttgggattttacagtcgctatgtgctgaccgctgcccactgcgtgatcggtggttacttgacgcagaatgacctggttctgaagagtgtgcgcctgggcgagtccactaccgactgcatcacctcggaaagcaggtgtccacatttggatgtggaggtggggcaaacaacagtacatcagggtttcacttcgagtggcggaacttaccgcaacgacatcgccctcctccgattgcaattcccagtgcggtgagtagcagtgatctccaccctaatctccacatcttatggaaatttctttacaaacccgctagatacacgaaaaagatccaacccatttgtctattggacgccgaatttcccctacaggatttgaatttgcaaatctctggctgggatccgactaaaagcagtcaaacgttgatcaccagcacggtcaaggaaaggaatcctgctgattgcttgaataggtatcccagctttcgctccgcgtcccaagtatgcgccggtggtcaacggaaaggggacacctgtgcgggcatctccggcagtccggtaatgggcatcatgggaagcggcgtcgacgagttcgtctttttggcaggcattgcctcatatggacaacaatattgctactctgctggtattccaggtgtttacacaaaaattggccacttttcggagtggatcaaagcgaatttggctccctaattttaataaagaattcatatttgcaaaattggaatagcatctgttccattaatccactactataaagtaatagacctataaaaccccaaaagataagaaaaagcactgaagattgttttttaaaaaacgtgttgttcaaaaaacataacgtgccgagagaagattaagcataaataaatttctaataactacaccgctgggtttgcccagctcagcagaactactatgtaaatattaaggcagggaaagaccaccctattcacatagcttttgcctttgttgcaatctagatggtattgagtccggagataacctctgctaatcacgcccaatgcatcgggagagaatcggtgacagcgaaactgccggacagcttggttagtatcagcttggagcccatagcgacgagatggcttctacggaacggaattttctgctactgtcactggtggtcagcgcattatccggcttggtccatcgatcaggtgggtaagctgtcctttgggcaaacaatatccacagcaactggatgcaatggtgcttctttcaaaagtatatagttctatatatatagtatagtatagtatatagtttgaataaagctagaaaaactaagcacttgaccttgttgattgtgagaataaaaaccataacaactaataatcaaagagtttttgaaaacttcaaatatattaaatatcaacatatagtttcccggactaagaaattttatgagaaatattagacatgaagtccattagtagaatggattgcctttaatggattggttcagaaccggttagactgcatcgtaaatcgcgctcttctcttccagacgcagcggagatcagctttggcagttgtacgccccagcagagcgatgagcgcggccagtgcgttcacatcaccagctgcccctacctggccaacctgctgatggtggagccaaagactcccgcccagcgaatccttctctccaagagccagtgtggcctggaca

SEQ ID NO: 40292 - DNA, 944 bp, DROSOPHILA
ttcggttatcaagctgccaaaaggatgagaaatgcaccagactggttagctgctcgccgcttatgaacatccttaggccccggggcatgacccaggcggagaaagatgtgtttgcacacaggcagtgtggcctggaccccaatggacacgagttgttgcacatggtttatgtctgctgcccagagttgggtgacgtcttgcccaacaaacagacctgtggacaaacgacgcccgtgttccgagatcggggtgccgagaatgcagagcttaatgagtacccttggatgaagtcttctcatttgggattttacagtcgctatgtgctgaccgctgcccactgcgtgatcggtggttacttgacgcagaatgacctggttctgaagagtgtgcgcctgggcgagtccactaccgactgcatcacctcggaaagcaggtgtccacatttggatgtggaggtggggcaaacaacagtacatcagggtttcacttcgagtggcggaacttaccgcaacgacatcgccctcctccgattgcaattcccagtgcgatacacgaaaaagatccaacccatttgtctattggacgccgaatttcccctacaggatttgaatttgcaaatctctggctgggatccgactaaaagcagtcaaacgttgatcaccagcacggtcaaggaaaggaatcctgctgattgcttgaataggtatcccagctttcgctccgcgtcccaagtatgcgccggtggtcaacggaaaggggacacctgtgcgggcatctccggcagtccggtaatgggcatcatgggaagcggcgtcgacgagttcgtctttttggcaggcattgcctcatatggacaacaatattgctactctgctggtattccaggtgtttacacaaaaattggccacttttcggagtggatcaaagcgaatttggctccctaa

SEQ ID NO: 40293 - protein, 293 aa, DROSOPHILA
MNILRPRGMTQAEKDVFAHRQCGLDPNGHELLHMVYVCCPELGDVLPNKQTCGQTTPVFRDRGAENAELNEYPWMKSSHLGFYSRYVLTAAHCVIGGYLTQNDLVLKSVRLGESTTDCITSESRCPHLDVEVGQTTVHQGFTSSGGTYRNDIALLRLQFPVRYTKKIQPICLLDAEFPLQDLNLQISGWDPTKSSQTLITSTVKERNPADCLNRYPSFRSASQVCAGGQRKGDTCAGISGSPVMGIMGSGVDEFVFLAGIASYGQQYCYSAGIPGVYTKIGHFSEWIKANLAP

SEQ ID NO: 40294 - DNA, 3813 bp, DROSOPHILA
atttgaaaaaaaaaaaaaatgaaaatctcatttctcccagacggggaattgaaccccggtctcccgcgtgacaggcggggatactaaccactatactatcgaggaccttaaaaacttcggacataaaaagccaacaagtgtttccgtatcattgcaatagactcacgtgtatcacttcgcatcagtgccgatctttcggtggttagtagcagctcctcctgcagtttgggccactcgatgaacatgaagtcgccaacgctctggacatggttctccagcaacagcttctccagagcagctggcgtgtgtgcttcctgggtcattggcgtaggagatagctgcttgaattccacagaccatatttctaatgggaaatgcatgccgtttagaaatatgaatggataatgaatttgcacctaccattgtcgctgaaggcgttctgcagttcggcgatgagcaactggccacgactggtctgttgtgtgtagatggccacctgcacagccgttttgatcggaattttactcagactcaaaatttccgtcgagggcaaattgactctgcgattgcaacatttaggtataattggaaaaacgccgccagacatggttgactcacctgtagactgtggtggtgcgccaccacatgggcacgccaattccaatgatgaccacgataaatgctagtgtagccccgatccggaacttatctgtaaagttaaagagaagtgtttgattagttcctgatttatcgcggtcgtaagcgttctttgggttcacactttattacttcgacaaaaaactataatattttgatttgtgttttataaagtttattatgtaaattagtttctgtacaggagaacggtatgaatgttaatagtccttgacgagtaattgtgcgcatgttgtgaaacaggatcacatgctactccttgtagctgcacgaaataacaaaaacaggtcccttttcaaggggcgtgttgcgcgacacgtatttggtgaacttggtggtgccctcgcaccggtatactatgttcagggcgttgtccaccggcgtgatagtaagcagaacggaatcgtcctcttcctcgtcatcgtagtccgatcgccttccgtccgtcggtgcttttgctgttggcatttcggcgtcgggtgcgaggtatgtgatcaccgctgctccttctgccgcgttcaggtagtaaaccaggtccaaagtgttctcctcgctggtcaaaccgtcgcccagcactgtgtagttgccgtgggaccagcgctgcagttccacgctgcatgttggactttcggcatcggtgcctgccaaatccagatcggtgaaatctcgcagcaaatcaaacatggcgtggctacggaacagttgcagtagttccagtatggtgcctctggctgttgtcaaatccagcacttcatagttgtgtgcgtttgcgggtccctgtcttcgccacttcaaggtatccgaatcggccaacagctgcgaccgggccaattcgaatttctctcgcttgaagaactcgtataaacaaatctcggagttttcttcgatccgcttttggatgctccggcgggtggccccctttagatacacgttgtttagaaacaggccaagcggtggcctattaaggccatcaggttgcaggtaattcaggcggggaaaggcgcgcagggagtcggccacgaaggcctcattggtatcgccgtggaaccatccgtttatggtaagacgcgggtagtcgaatgtagtaacctcgcctacttggtggaaggagcgcgagcccaccttgaagaaggcaaactggttgtctttgggggcgatctttcgctgcactggaaactgtggaaagcactgatcgtcgctaccgaagatctctaggcatccgccctgctcatccgtccattcctccgctccttcccaaggcgatagatagtaaatgaaggccacttgtcggtccttaagcagatcgtcgtgcacgagcagatagtcgccgcaggtgtacatgctgcaggaggcggacacatagtccagcttgaggttggtaaccttctccagccagggacgcacttgtttgcgcagcacctgcaggaagttggtcaacagtcggcaagcgggcatgttggagaggtcggcgctctggtagaactcatacaaatccatctgtttgcgcgaccactgcaccttctggatgatctcggcgaccagcgcctggctttggcccttctccagcatgccgggcagaaggcagatttgaaagggatccgagaagacctgagcaccggtttgcgtctccttggtcccttggctcttctcctccgtccaggctgtttggagccacttggtaagttccggttgctgatacgcctcgttcaggagcacttcgttcgtttcaaggatgtcgcccaggcgcaaaagcttcctgtgcggctcgcccacctgatctgcggaatcctcctgctctgcacgaccatctgcaagggcaacatagtgaatgggtttgcattaagcgaggcaaacaggggcataccttaaactttaatttggctattttttacgcacaccagcactcacacacgcgttatcaaaggcaaaggcaaaatcaaaggcaccgatgtgccggcacacctcgctttatcgttttggggcagatttctcactgtttccacttaccttcgtccttgtcttttctcctgggctttactggactggagctcgaggtttccatgatgctgtgagtcaaattttcggttaaaaacgtgaatttttgccagggaaaataaaaaaattggcttgtgcagctagagatggtagctcggaaatatcggttgttctgtgcaagtgttgggtagttagcttattccacgcagtatcaaatacctagctaaagtttagtagctaaaaacttttggcattatattgtaaacaataaagggcgtatataagtaataatatataatataataatatattgaaggcattcagcattagcattcaactcactaatcacactttcattttatactgatcatcactgattgtacgtgagtgtcgtgtgtttcgtcgtcgcctcacgcctccatccctagccaattagtaacgaacaattgctcgatcggctccacgtaaataaagtttagatcacagctttgttgattgcttatcgcggtggcaaatatagttattcgtttatggctgtaaactttcgaaacggacgtggacatagccggtaaattaaaacttgaagataaaacctagctggtgacaaagaaattccaattggagcagtccaatgccgtggaatgaccttggaagaggcggagccaccattcagccctccatattataaacaaaaatactattgtggaatgttcacagctattttgtataaaaaaaatatttggctatcagtctgtgcgtgctagggccaaacagctgattccgcctggctgccacctgatttgttgggggtgtgagtggggctggggctgtggtattctgtatgctcgcgatgatctcattgtgttggaatcggagcaaaagctaaactaaacaacttgacatgtgttcttctgctcctgtgtagctacctagtgttggaggatacggaggagcaatgggcaaggatcagcatttgctggaggcttcgcgagccggcgacatcaagacggtggacaaactgctggagcactcgagcaaacgacatggcccgctgtccaggtgagtcaccagcagcaactgttgttattccaggtagtttactacaggttttcctttacagttttaggcgaagtcccagcatca

SEQ ID NO: 40295 - DNA, 1801 bp, DROSOPHILA
tagctgcacaagccaatttttttattttccctggcaaaaattcacgtttttaaccgaaaatttgactcacagcatcatggaaacctcgagctccagtccagtaaagcccaggagaaaagacaaggacgaagatggtcgtgcagagcaggaggattccgcagatcaggtgggcgagccgcacaggaagcttttgcgcctgggcgacatccttgaaacgaacgaagtgctcctgaacgaggcgtatcagcaaccggaacttaccaagtggctccaaacagcctggacggaggagaagagccaagggaccaaggagacgcaaaccggtgctcaggtcttctcggatccctttcaaatctgccttctgcccggcatgctggagaagggccaaagccaggcgctggtcgccgagatcatccagaaggtgcagtggtcgcgcaaacagatggatttgtatgagttctaccagagcgccgacctctccaacatgcccgcttgccgactgttgaccaacttcctgcaggtgctgcgcaaacaagtgcgtccctggctggagaaggttaccaacctcaagctggactatgtgtccgcctcctgcagcatgtacacctgcggcgactatctgctcgtgcacgacgatctgcttaaggaccgacaagtggccttcatttactatctatcgccttgggaaggagcggaggaatggacggatgagcagggcggatgcctagagatcttcggtagcgacgatcagtgctttccacagtttccagtgcagcgaaagatcgcccccaaagacaaccagtttgccttcttcaaggtgggctcgcgctccttccaccaagtaggcgaggttactacattcgactacccgcgtcttaccataaacggatggttccacggcgataccaatgaggccttcgtggccgactccctgcgcgcctttccccgcctgaattacctgcaacctgatggccttaataggccaccgcttggcctgtttctaaacaacgtgtatctaaagggggccacccgccggagcatccaaaagcggatcgaagaaaactccgagatttgtttatacgagttcttcaagcgagagaaattcgaattggcccggtcgcagctgttggccgattcggataccttgaagtggcgaagacagggacccgcaaacgcacacaactatgaagtgctggatttgacaacagccagaggcaccatactggaactactgcaactgttccgtagccacgccatgtttgatttgctgcgagatttcaccgatctggatttggcaggcaccgatgccgaaagtccaacatgcagcgtggaactgcagcgctggtcccacggcaactacacagtgctgggcgacggtttgaccagcgaggagaacactttggacctggtttactacctgaacgcggcagaaggagcagcggtgatcacatacctcgcacccgacgccgaaatgccaacagcaaaagcaccgacggacggaaggcgatcggactacgatgacgaggaagaggacgattccgttctgcttactatcacgccggtggacaacgccctgaacatagtataccggtgcgagggcaccaccaagttcaccaaatacgtgtcgcgcaacacgccccttgaaaagggacctgtttttgttatttcgtgcagctacaaggagtagcatgtgatcctgtttcacaacatgcgcacaattactcgtcaaggactattaacattcataccgttctcctgtacagaaactaatttacataataaactttataaaacacaaatc

SEQ ID NO: 40296 - protein, 536 aa, DROSOPHILA
METSSSSPVKPRRKDKDEDGRAEQEDSADQVGEPHRKLLRLGDILETNEVLLNEAYQQPELTKWLQTAWTEEKSQGTKETQTGAQVFSDPFQICLLPGMLEKGQSQALVAEIIQKVQWSRKQMDLYEFYQSADLSNMPACRLLTNFLQVLRKQVRPWLEKVTNLKLDYVSASCSMYTCGDYLLVHDDLLKDRQVAFIYYLSPWEGAEEWTDEQGGCLEIFGSDDQCFPQFPVQRKIAPKDNQFAFFKVGSRSFHQVGEVTTFDYPRLTINGWFHGDTNEAFVADSLRAFPRLNYLQPDGLNRPPLGLFLNNVYLKGATRRSIQKRIEENSEICLYEFFKREKFELARSQLLADSDTLKWRRQGPANAHNYEVLDLTTARGTILELLQLFRSHAMFDLLRDFTDLDLAGTDAESPTCSVELQRWSHGNYTVLGDGLTSEENTLDLVYYLNAAEGAAVITYLAPDAEMPTAKAPTDGRRSDYDDEEEDDSVLLTITPVDNALNIVYRCEGTTKFTKYVSRNTPLEKGPVFVISCSYKE

SEQ ID NO: 40297 - DNA, 5005 bp, DROSOPHILA
gaaatgagttttgttttgttttgtttcttccgagtgtttgtgtgtttatgtgtgtggggagggggtgtattctgtgtgcggcgtgttttgagtgagagagatagagagagagcgcgagttgctgcgggtcgacggtcgaagggggtggtggtggagttggtggtggggggcttggtttatacgacaagttttgatttattattaaatttaaatacctatgtatataaattacgtttctgtttattataattattgttgtttccatcttaatcattttgttttctttcgctttttatttttcatattttttttttgttttttgtatgtagtgggcaactgcggcatttgtaaatttctttatatttaaatgttccttttgactgtgtaaaaatatcgatttccatctgatcttgttttgtagttactattcatgtatgcatttgcttttcgttttagttaaattacgttaacgctgcattctgaactctctgttgctgctgattctgctgcttgttcttcggattcttgatcggattcttctgattcttcatcttggcgcgctttctatgctattgaaatgttgtttgtggtgctgcttactgccttctggatcgggatcctatattccgctctgatctgatcggttatgttcatgttatgtcgggttgtgtgtgtctgtgttgtgtgtatgagagtggagtgtgttgggtgttcgcatctcgttatatgttgtatatatatatatatatatgtgtatatatatatatatataatatattatatgtatgtatagttagttgcttaatagtagaatttcttgaatgttgttgtggtaaagtgtaggtaatgttgctctatgtctctatgtcgactcaactgcactacatacatatgtctttccaccggatacgcggcgaaccgaaacgtgccgagccgaaccgatccccgtttctgacccgcatccgcatccgtatccgtatttcgtttcctcacctccgcctcattcgctgcgcagtttctttagatccggtgacttctcccccacgcccacacccactccgccggcgttcttcagctccatatcgcagtgcagggcagtacgcttctgtccaatggctggtgccgagtctgcacccgctgctaccggtgaaaccgcatccaccgccttgttcgccgccagctgctgcagtttactgtccctcacaatgccgttgctgctattgctctcgtcagcctctagctccgcctcattatcctcctcctcgtccagctcatcttcctcctcgtcctccgcctcatcctcatcctcgtcgcccaggacgccgttcccgttaccatttccattggctggtgctgcagtcgctttgctggctggctgtggtgctgctgtaaccgcttcctcttctgccaaaggagcaggctgaccgttgttggtgatcgaattgttagttttgtggggctggctcggcgactgcttttgattctgattctggctcgagtgctgtgtgggagtcaggatgggcaggctgttggtcttgggcggcgcctcctgattgctttcagagtccgaggcgagcggtgttccactcgaaccgatgccaatgccaatgtctagggcgatgggctcaccgtcctctgtggaagtggtggccgttgtctgtgtggtgccatcgttgtcatcgatgatcggctcctgggaggtggaatcgttcgaaacaaagttggagtcaccgtcctgcagggcggcgccaacggcagctgcgttgttcttggcctcgcccgactgtagaggcgtcagagcagccgggttggtgttctcattctctgtctccgattctgtagcagtgttgcgaccgcctgggggatagaaagcattggattagccatcaatggtcaatttgttaactcggcgaactgcggtcagagtaatcaaacaaagaaactctgtgtttgaaattattagacatcctaacacttttgaaaagctgccaacaagtataagctactgataatatgttaaaagttaactattttacagtagtaactttacaattcctcctttttatttaacatgacgccacgagtaacgaataaattgtaaattgtaaattgaccactaggctactacaaacataatgtttaatggaaaattccggataggaaaaatacttggtttctggaaaagaccactcggtttgagtgttttgttgcaagggtgtatactcaagccgcagttatcggatcatcttagctgcttacctgctccttggctttcgtcgtccaaatcaacacccacaccatcgttggtatcgtcgccatcgagcaccttgctgctgttgccgtttgtgctgagtgaaccggtgccagtggaggcgccggatccaggcggcggcatatcgtcgagcatctcgggactgagatcattggccacatagtgtgaccagagggccagctccacgcgatgaggcgaccagtgcggcgtatccccgcccacctccgcattgaggcgctccacggtggcctgaatgtgattgacgaagttgaggtactccttggtggtgtaatcgatgccctcgatctctggtatggccatcaggcactcgtcggccatgaatggtgccgaatcgggagctgcggctgccagcagtgcactggccattgtggtgccaacgcccttgaggttcgataaagctgtgatcgcctgctccagattgggcagcttgcggaaggccttctttgtctcctggatgacggcgcgcggtgtgttgaccttgaccaggtaggatagctgcggatagaatttgccgcgcgactgcttccacttcatcgactggacgagctcatcgtataccatatgcgcgtccttgccgcgtgccttaatcaatttgggcagttcattctgataccactgatccaggcggatcagctcttgcggcttcttgcagcgcttctcggcctttagcttaagaacctggggatagagctggtagcagtactcgaactgtttggtgctcccggtctcgaagaacgagaccgtcgccttgccgttggacatcttctgcggatgcggatgtgtcgttgtcgcctgctaatgattggtggtatcgctgtatctccttatcgtggtatctatcgccttggggcccaggacgttggctgatccgcaagtgaccggctggctatatatgcggcaatatatgtactttggtgtaagctactatacgccaaatcaatttattgcttactgtttagtctcctgcttttcctgtccgttccgagctgctcctgtcaacgtactgctattcgtgcgttgagagttcccggcgagaaagaagcgagtacgtgagagacagagagaatgcgagtgcgagagagggagcacgaagaagcagcaacgcaaaggagagtggatgaaaagagaagaaaagaggcacacaattaggtttacagttacgattacatatgcaagggggatcggtgcggtggcatagggaggtagttcgattgattactgttaatgctgctgctgctgcggccgtgtctctgttgtttgttgtatttactcaatccgataatcgctcactatttgccaaaaatctgctcgcttccgccgccgtttgcacagcacacaaatcgaatttttacagtgctgtcgtcgggttctttttagtccgccatgcactcacacagtcaaactgacaggcacacggatggacacacacacacttactcagcacactcgctctcgcacacccaaagagagccaggcgctcatacacaggcaaaaacacgcacacaacacacacactgacttaaacacgcacacacttatatactgaggcaacaacagcagcagcagaaaatttctttttcatctaggttttcaaaaaaaatacgaacgcgagcattaaataaacgaatgctactatttttcgctgttgttgttgtttgtgcttttttcgtacctcttgtctttttggcaaacggtgagaacagcttttcactagcgcactgcacgcacacagatgagtgggtgaacaacaaataccttttagttagtcgccgccagtcttcctttccgtccacatccaaacaactactccaatgctttgctgtttttctgtgttgcctctgctttgctttgcttcgcttcgcctctgtgcttgtgctgtgctgcgtgcttcgtgctgtgcccgtgctgtgctgcttcttcttcttcctctgctgtttcagtttctgctttctgcctgcaggggcgccgttgacaactgacaaataaaaaggggttactctgttctcgaaatgagcacgccaccgaaggcacaacaaaaaattaaaaaggatcggagcggagcgatgcagctgtgcgatgtgctgctaactcgtgtgacgggaattgggaattgggattgcgaatgggaatgggagggaatacgagaagcgaatatgggaatgacgaacgacgacgaaccgggaacaggagttgtcgttctatctcgcccgcactcggtgcccgaatgtatctgtatctctctggcaccctcggcgttccatttcattttgccggcgacgtccgtgctctctgccgccgctctgccatcgcctctgccgctgcgtttatgcgcagtgcgtcattacacgaatacctgtttaaagcggaggcataaacgcggctttgtcgatcaacatccatgttaccgaaacccatgttcgagttatagaaacttcgagtaacaaatatctatattctagcaatgtttacccttattagcttagttagtgcaattatgtttcatgtttttacaaacagcagaatgtttttaacaatagttatctctatattcaggtccttcaattaaatcaaaaaggaatgggttttgtgagtgggttgggctccagtgagacttgttaataatttaagaattcgcgatattctagtgtaaacagcgcgtcactgcatgttcgctgcttttgttgtgccagttgccagcgacagcggcgtcgt

SEQ ID NO: 40298 - DNA, 1937 bp, DROSOPHILA
agtgaaaagctgttctcaccgtttgccaaaaagacaagagcagtacgttgacaggagcagctcggaacggacaggaaaagcaggagactaaacagtaagcaataaattgatttggcgtatagtagcttacaccaaagtacatatattgccgcatatatagccagccggtcacttgcggatcagccaacgtcctgggccccaaggcgatagataccacgataaggagatacagcgataccaccaatcattagcaggcgacaacgacacatccgcatccgcagaagatgtccaacggcaaggcgacggtctcgttcttcgagaccgggagcaccaaacagttcgagtactgctaccagctctatccccaggttcttaagctaaaggccgagaagcgctgcaagaagccgcaagagctgatccgcctggatcagtggtatcagaatgaactgcccaaattgattaaggcacgcggcaaggacgcgcatatggtatacgatgagctcgtccagtcgatgaagtggaagcagtcgcgcggcaaattctatccgcagctatcctacctggtcaaggtcaacacaccgcgcgccgtcatccaggagacaaagaaggccttccgcaagctgcccaatctggagcaggcgatcacagctttatcgaacctcaagggcgttggcaccacaatggccagtgcactgctggcagccgcagctcccgattcggcaccattcatggccgacgagtgcctgatggccataccagagatcgagggcatcgattacaccaccaaggagtacctcaacttcgtcaatcacattcaggccaccgtggagcgcctcaatgcggaggtgggcggggatacgccgcactggtcgcctcatcgcgtggagctggccctctggtcacactatgtggccaatgatctcagtcccgagatgctcgacgatatgccgccgcctggatccggcgcctccactggcaccggttcactcagcacaaacggcaacagcagcaaggtgctcgatggcgacgataccaacgatggtgtgggtgttgatttggacgacgaaagccaaggagcaggcggtcgcaacactgctacagaatcggagacagagaatgagaacaccaacccggctgctctgacgcctctacagtcgggcgaggccaagaacaacgcagctgccgttggcgccgccctgcaggacggtgactccaactttgtttcgaacgattccacctcccaggagccgatcatcgatgacaacgatggcaccacacagacaacggccaccacttccacagaggacggtgagcccatcgccctagacattggcattggcatcggttcgagtggaacaccgctcgcctcggactctgaaagcaatcaggaggcgccgcccaagaccaacagcctgcccatcctgactcccacacagcactcgagccagaatcagaatcaaaagcagtcgccgagccagccccacaaaactaacaattcgatcaccaacaacggtcagcctgctcctttggcagaagaggaagcggttacagcagcaccacagccagccagcaaagcgactgcagcaccagccaatggaaatggtaacgggaacggcgtcctgggcgacgaggatgaggatgaggcggaggacgaggaggaagatgagctggacgaggaggaggataatgaggcggagctagaggctgacgagagcaatagcagcaacggcattgtgagggacagtaaactgcagcagctggcggcgaacaaggcggtggatgcggtttcaccggtagcagcgggtgcagactcggcaccagccattggacagaagcgtactgccctgcactgcgatatggagctgaagaacgccggcggagtgggtgtgggcgtgggggagaagtcaccggatctaaagaaactgcgcagcgaatga

SEQ ID NO: 40299 - protein, 550 aa, DROSOPHILA; identical to SEQ ID NO: 4137

SEQ ID NO: 40300 - DNA, 3734 bp, DROSOPHILA
catcgaacagtcgaccttcttcgccagccacgagatcattggctccagcatctttatcgtctacgatgacgatcgcgttggcgtttggctaattgacttcgccaagtgccgggagctgccaccccatgtgagggtggaccatcgaagtgcttgggcgcctggaaaccgagaggagggtctgctacgcggaatggacgagctcatccgctccttcgaggaggtctacgcccgctgtggctcccatcgcagctgccttaaaatctaatggatagacacggatcgattgcaccggcagctggatctgcaccaaaagactgatcacccaagctccatttgtacagatagaaagttagataagagaagaggattcaccgcatcgcccgggctgagctccaccctatattaactccttgttccatattggaaatatcgggattcagctcggttagaaagtttaagagtagctgaaaaaaaaaattacgattagtattgatcaacaagcagcatttgtttgattgaaacaggtttaaactaagtatttgtgcaaagcaatccaaatcagaacacaaaaaataaaatatcttaagaaagtgaagccttgagtttgaattcttataaaaggaaaatcgggagtaaatcaatctgtgtatacattttggtcgctttatattggtaaatatacaagtttacactataaatgagtttatttcaaacagggcgattattgtctgaagcatttaaagattggactagaatagtaaactaagaaagttcaaatagaattgaaaatctattcttatgtaacaattaagaatgactgcctaaattgaaaatatattaacgaataaacatttatgctttgtgaaactctcttaccttagccaaaaactcctcatactcgaataattgcaacgttgcagctatgtaaatcgcaccaaatgtgaagatggccaaggtacgtggtcgaccgaccgccggcaccaagaaagccaacgcttcaaccgactcagagaagcaaagggaggtggaaaaatgatttatcatgtagccaccaaggagggcgaaatgttcaagatcagatggaaaactatgggccaaaggatgattcctgagagccaagcaagaatctggcttgcgatgcactaatcgaaatgtaactcagaagaacgttgatgttaaggagctgcgcgaattgactaagatcgtcaaggccaggattgccgacatattgaccaccaataatggggaaaaaatcgttgtagaggattcggatgatgatgatagtgattccaatgtggacgcaaggctagggctcgtcaaacggcagaagatagcgatgacctgccctccatctccaaagcttggctcaccctggtccatacaaaactattaggcagaggctgaaaagcagggatagtaaatttaacccggaagagtgggcaataaataagtcaacatactttggcaaaggtatgcgcagcaccatttcctcaaaagttgcaaattggtcatctgtcagtagaggcgccaatagttcatcttcgtagctggccaccaagtccaagttgtacttgcccggttgttgaacttcgtagggcatcaaagagagcactgattcgccgaggcagctctttgctacctgaaagtcctgttcgcagctcaagcaggtgcgcacgcccatacaaccgcaactatgaattgtattcatcctaaaattgcgtaaaaacacattaacaacagtttattcgtggtaaaataccaatcataccatcaatgttatgtaaatgctggccagaatttcgaagaatgaactgagggttatatatctgtgtgctttgatttttctaatttaatctaatataatctatataataataatctcacctggggttgtactgatttgtcattctccatttctgcatcgtcatcggactccgaatccatttcagcagcattcttgccatttctaacggataaagtcggagccatgctcagcttgcttctttatcggcactagggtccacatcggagtcattagcattatcatccgaatccactacaaggattttttgccattattgggggtcgaagtgatggcattcctggcttcaagaatcttattcaattcgcgtaggcccttgaccttctgctgagttattttttgattaatgcatagcaagccaaattcttgcttgaatcccgggaatcatcatttgatccatagtttcccgtcttatattgaacattccgccctacttggaggcaacataatcaataacgtattccacttcctcttgctatttttgggttggttaaagagttggctttcttggtacggtcggtcgaccacatatcttggccaccctttacatttggagcggtcttcggtttagctgcaaccttctgcaaagcagcgaagatgagaaagtttaagttaattgtcctataaactaatgaatttgaaagtatgaggaattattggctaaggtaaccgccatataacgaaattaatttcgacttataaacattttctcatcagagtttcacattgtaatgtcttataagcatggactatgcatggagcatgctgctatcgaactaaaaaacgcgtggtggtggagcccagtggcagccagaccatctacagtacatgggcgtaagctcccggtagtaaagtaacgcggtagagtgggcgataattcaacttactttggcttaggtatgctcagcactgcacctgcaagctgaaggttgatgaaagggattcggagtccgatgacgatgcaaaaatagaggatgacaacccgtggtgagacaaagcgaaaaatccgagcatactagaccgaattaggtattattctccgaaattttggtcggtatttaccaaagcattaattctatgattggtattttattacgattattttcgaaattctggtcggtatttaccaaacattaattctatgattggtattttattacgataccgaagccggtatatttggaacatccggtaacactggcagtctgtttgtaattaacgtgcttttgcccaatttcaggatgaatacaattcgtccttgcggttgtaagggcgttcgcacctgcttgagctgcgaacaggactttcatatagcgaagacctcgctacgggaacaattccagcaactggaagcatggtcctactgtatccagtgcgaccttctgcagcgcggttgggataccaatcatgtccaaaaggatcatgaaaatcacaaaaaagatgagggcctcccactgccgggcatcctggtgcaggaggaattccttagcgttgatgagggcgcccaacttatagccgacttggatgacctgccatgggacatctcgcagagcggcaggcgaaaacagaacttcggacccaagaccaactttaaaaagcgcaaactgcggctgggatcctttgccggattccccaggacaacggaatatgtgcaacggcgcttcgaagacgttcccctgcttcgtggctttcagaccatcgaacagtgctccctggagtacgagcccagcaaaggagccagcatagatccgcacgtggacgattgctggatctggggcgagcgtgtggtcactgtcaactgcctcggcgactcagtgctcactttgacgccctacgaagttcaacaatcgggcaagtacaacttggacttggttgccagctacgaagatgaactattggcgcctctactgac

SEQ ID NO: 40301 - DNA, 1258 bp, DROSOPHILA
cagtgctgagcatacctaagccaaaaaggttgcagctaaaccgaagaccgctccaaatgtaaagggtggccaagatatgtggtcgaccgaccgtaccaagaaagccaactctttaaccaacccaaaaatagcaagaggaagtggaatacgttattgattatgttgcctccaagtagggcggaatgttcaatataagacgggaaactatggatcaaatgatgattcccgggattcaagcaagaatttggcttgctatgcattaatcaaaaaataactcagcagaaggtcaagggcctacgcgaattgaataagattcttgaagccaggaatgccatcacttcgacccccaataatggcaaaaaatccttgtagtggattcggatgataatgctaatgactccgatgtggaccctagtgccgataaagaagcaagctgagcatggctccgactttatccgttagaaatggcaagaatgctgctgaaatggattcggagtccgatgacgatgcagaaatggagaatgacaaatcagtacaaccccagcacacagatatataaccctcagttcattcttcgaaattctggccagcatttacataacattgatggatgaatacaattcatagttgcggttgtatgggcgtgcgcacctgcttgagctgcgaacaggactttcaggtagcaaagagctgcctcggcgaatcagtgctctctttgatgccctacgaagttcaacaaccgggcaagtacaacttggacttggtggccagctacgaagatgaactattggcgcctctactgacagatgaccaatttgcaacttttgaggaaatggtgctgcgcatacctttgccaaacctctgcctaatagttttgtatggaccagggtgagccaagctttggagatggagggcaggtcatcgctatcttctgccgtttgacgagccctagccttgcgtccacattggaatcactatcatcatcatccgaatcctctacaacgattttttccccattattggtggtcaatatgtcggcaatcctggccttgacgatcttagtcaattcgcgcagctccttaacatcaacgttcttctgagttacatttcgattagtgcatcgcaagccagattcttgcttggctctcaggaatcatcctttggcccatagttttccatctgatcttgaacatttcgccctccttggtggctacatgataaatcatttttccacctccctttgcttctctgagtcggt

SEQ ID NO: 40302 - protein, 93 aa, DROSOPHILA
MNTIHSCGCMGVRTCLSCEQDFQVAKSCLGESVLSLMPYEVQQPGKYNLDLVASYEDELLAPLLTDDQFATFEEMVLRIPLPNLCLIVLYGPG

SEQ ID NO: 40303 - DNA, 2290 bp, DROSOPHILA
aatccccaaaatccgtctcccctttttggagctgttttcgagggatataatatgtgtgtttttatttctatttatctgtggtctctttttattcgttttgttcagagcccgagcaacatgagcagtttttgggcatggccacgagtgtcttgacttatttttggctggctctttcaaacgaacacacacgcacatacacatacacacaggcattcacaatcgcagagatagagtgagacatgtttgcccacattcaaatcgcttttcaaggttacgttttgccgccgttttgcttcccgcattttcaagacggcaattttgtatttcttattttatacttttgttagagccctaagtacgacgagtacttgagagctcaaaaataaaaaacagacagagaggccgcgtgactcttgagttaattacgaacaactgtgtaactcgaaattgattttgagaatcaactgataatataaagcccgatccgattcaatccgatcccagcttgagctgaggtcaaacttcaactcgacttgtcgattgcttagtgcttttttgaataatcattatgactggcattgaactgaatacattgctctgtgtgggttttggttcggggttcgctttggttttactttggctttgacttaggcttttcagcgattttcaaatgctaatttcaatggaaaagtgtgtgtgtcgagcctaagacttcagtcgagagaataacaaaccaagaggcgaccttgaaacgctagataaaccaagatgacaagacgttaattgccgcgttacgttggctaacattaatatcgaaatattacgcatacgccgcggtgtacgtggttgtctgtatttgtgcccgccgaggagggctcaggtgatggcatatacagttagcaaagctcctggcaaataccgaatgagataaaccctataattattaatgcacacgctaattaccaaggtcaacaaaacaacaacaggtgaacacagtgagttacacttaaccgagaaacgtacagaagctttgctgtagctgaaatgctggctgctgatggaattgctgtcccagcttctgaggatcctgctgctgctgctgctgctggtgctgctgcatcatcatcgcgggcggactgatcgacgtggacgaggtggttctggcgaacaacatgctgctggccaaaagagccaaaccaataaaatcactgtcaaaatggctgcgcgttagctgggaattcgtgtgtggaaaacgagcaacagcgagcgatcgagcgagcgcacgaaacgagcaaccaaaccgcactgaagaattccgtgcgatgcgaagacggagccgcgactcaagcatagagtttgccagagagccggagaattggagaatctactgacgggcgagggagcgagcgagcaagcgagagcgagagatatccggagagtctgtccagtgcaagtgaggcgagtgaggttcatgagtcagagtgtacgatgatgatcatgatcatcatgatgatgtcgtcgtcgtttctgtctgtatatatgatctaatgctggcccgccgatgattgcctcacttcactccatgtcactcggttcattatcaacgccaaagagcggcggggagagagcaatacacaaacagggggcgaagacacaaaagggggcggcgtgtgtgtcgaaaatagaaactgctgtggcaacatgtgatacggaataagccaacgtgataagccagcggcgaaaagagtgaacgtgtcacgttttcacccaccaaaacgatgagaattcaatgtggaagctaaaccaaacgatttgccaagcgatccataaatgacaacgggaagttatgcttaaagcccttgagattatataaaatgcgatttaaaacggtgaagtagtagccaaattcggttagaggcatataatattaatggcgagaagagggatcaaagcgagttagtctgccccgttgttagttttaatctttaagattacacaattacaattattcaagataggaacaactaacagagcttgtgaaatacgagaaaagtgttgtgagttcaagttgtgctaccactgggactgacccacgctgcgtatgcgtaatataaggacttcagatgacccaattattgaggcaagccgggcttgtcctaatcactggcccgaaaagaatgtcaaactgcctggccccttgagttattagtaggccactcgagatgctctacaagtgcagtcacaccaaatgcctggccactcgagccgcaacaatggaatgcacctaaga

SEQ ID NO: 40304 - DNA, 290 bp, DROSOPHILA
cgtttcgtgcgctcgctcgatcgctcgctgttgctcgttttccacacacgaattcccagctaacgcgcagccattttgacagtgattttattggtttggctcttttggccagcagcatgttgttcgccagaaccacctcgtccacgtcgatcagtccgcccgcgatgatgatgcagcagcaccagcagcagcagcagcagcaggatcctcagaagctgggacagcaattccatcagcagccagcatttcagctacagcaaagcttctgtacgtttctcggttaagtgtaa

SEQ ID NO: 40305 - protein, 55 aa, DROSOPHILA
MLFARTTSSTSISPPAMMMQQHQQQQQQQDPQKLGQQFHQQPAFQLQQSFCTFLG

SEQ ID NO: 40306 - DNA, 2641 bp, DROSOPHILA
cgaaagccaaaagctcagatcgttggagcccgaagtatctgaagtatctgttgccttatcaaaagcccctcaaggtggacaacttcggctgccgaagtctctggctgtttgagcccttagcctgcgctgtttagtcgctatataagcctcatctgcacgttccaccagcatcagtcatctctctgagtttatcccaaaaacaaccaaccaaccaaccaaacctaattcaagatgttcaaatttgtaagtccaatggatttgccagaaaattaagaacttcgcattaatatgttactcctaaaggttgctgtcatcgctctcctggtcgccaccgccagtgctggtctcatcgagactcaccatgtggtgcacgagcccgttctggccaaggttggatcggtggtgcactctgctccctcggcggtttcccaccagagcatcacccaggtgcacagcaaggcggtggtgcagccagtggttgctcccatcgtgaagaccaccacctactcccatcccgccgttgccgtccacgctgctccagtggttcactccgtgcccgttgtccacgccgctccagtcgtccactctgtgcctctggtccactcagctcccctcgtcaagtcggtggtgcactccgctcccctggcctacaccctgcaccactaaggacgcaaatgtgatacagtatttacgattttttgtttcaataaatgtttttcgttttgtcataacaagttaacggattgtgttttattatatttaaaccatcagaaaagctttgacaaaaggaatttaaattttataagatttgtcattaattattttaaattccacagaaattagaatttattgttatattgaaaccaagaccaaaagatactttgttttctttgcatccacttcttataaaagtcttatacttgcctttaagatactattcgcgtatacttttgggctgatctaaaaatatgttaaatgaaaaataaatgcaatattttttcgctcgctataacatgtatggtaggtatttattgcttggaatgtattttagtgtctaaacatttttttgtgattttttccttctcattgctgaatttgcttgcattataaacagggcacagaacttgtggttgaagtaatccgcaggaaatgttatggttgaacaggagcgctgattggctggcgtgtgggtgagctatatggatggttggatctccaatgggtaactggtttaaccgatcacaactggtcccaggccatggacgctcttgatcagcagaggagaaggatgcacctgggtgatggcagcatgagaaatggcaccgggcaccacgctcaccacctgaggagcaagcagaggagatccgacaacggtgggtccccagattccaggtgccacaatgccagggccaatgagaccaggagcaggagcaggagcaggagcgggagctggggcagcagcagccaggctaaggagagcaacgaagacgcactggaaaacaatgcaaatatatatacatatattagatggatgtcacttgaatcagcatatgttcactttttttttcatagaatcctttatttgcacaaggaatactcttgattgtcttaaagaactcaccagcttgaacattttgttttgttgatggtttgcaacgatttgacatagaattgcactcccgactggcctatttatacggaataatcagaactgcagttggcgctctccaaatgggtcgccaacacgcctctgcactctgcactcatttcacccggcaacaaacacattttccacagcattcgagccaagttaagccacatagaaccaaactgattcgagctgaatgcaaacccttccgggggcaggttctcgtgttaccaaagtccacagggaaaaagtattaaacaaaatttgtttacttatacattaattggagaatatgtatatgtatatataatatagtaatataatgtatgtatattacctaaaatcacgttcttcgacatcaatttggtagtaattctataccatacaaatataatctatcatctgactttgtgaaacttgtcgaatgttttcaaactttctagacttttctcccagtgcattcgttctcccccagttgactggccacttcgttgcgatctgatttgattctattcgatttcgccgccttatgatttatgcaatgcgagacatgttctaagtggactaacaccctccccattccgcattcttcacttgctgcgcggactatgcggcgtatacttgacactgttgcatgcgtcgcacaattaagcaaacaaataaatagaatcatgtcagggggaaaatatgtaatgtgagtccaagaaaagaatcaactgaagcggcttagtttagtttacggggtaagaggaggtggggcttgctctttgcacttttggcttgcataaattaagttcccaacttggcgaaacgttgattaatgtgacttgccaataacgccgccggtcagttggtagttcgtttggtcagctaacttgccccggggctcggccaatcgacagagattgtcgccaaagcgattttgtcttgtgcaatagtgcgacaccagcacatcagatacattttatgatcactgtcgcgggcagtgagtta

SEQ ID NO: 40307 - DNA, 512 bp, DROSOPHILA
aaaacaaaatgttcaagctgtgcgtcttcgttgctctccttagcctggctgctgctgccccagctcccgctcctgctcctgctcctgctcctggtctcattggccctggcattgtggcacctggaatctggggacccaccgttgtcggatctcctctgcttgctcctcaggtggtgagcgtggtgcccggtgccatttctcatgctgccatcacccaggtgcatccttctcctctgctgatcaagagcgtccatggcctgggaccagttgtgatcggttaaaccagttacccattggagatccaaccatccatatagctcacccacacgccagccaatcagcgctcctgttcaaccataacatttcctgcggattacttcaaccacaagttctgtgccctgtttataatgcaagcaaattcagcaatgagaaggaaaaaatcacaaaaaaatgtttagacactaaaatacattccaagcaataaatacctaccatacatgttatagcgagcg

SEQ ID NO: 40308 - protein, 90 aa, DROSOPHILA
MFKLCVFVALLSLAAAAPAPAPAPAPAPGLIGPGIVAPGIWGPTVVGSPLLAPQVVSVVPGAISHAAITQVHPSPLLIKSVHGLGPVVIG

SEQ ID NO: 40309 - DNA, 3572 bp, DROSOPHILA
tcactggagtcacataaagggacagaatcagcaattgctaagaacagagaagaatccaattccgccgggtagtaaaaagttgatgtaggtgggttttggaattgtagtgataattggggagggtaatggttattctggaaaaaggttataataaagaataatattgggtaaattatgcaaaaatgtatatattaaatacaatgtgacttaacagacattggttttcttttataaagcattttgtttacctgtctaaacaaaacgtgctcttaacaaaagagctttcttcgattctctttttgtttgcaaaggtttgttaagagcactataatcattgtcgcttttttaagtcgtttgttacgcataattacaattatattttatagttcggcttatgaggtgcttaagcagatcacttaaaactacattaatattttaagaggtgagagtttggtgggtgttacgaaaattggtgaactacacgaaatatattttgatagtgggtttttgctgactcatcttgacaaagcaattgaaaaacgaaaatagattttataattaaattaattataaaactgctgccacggagtaatcaggatatggattgacctttaaagaaaactgttttaaaaggaatacaataaagttgcgtttatgtaaattaaataaatttttttattactttcattttattttttaataacctttatatatttctctgataaaatttatttaatttttattttgaacgtttgaaacgcgttagaaaaaaagttagaaaagagcggagttgtatatcaaagagcaggtaaataagagtatcaagagaatgaaatgttaccgtctctcatcaaggtatttttcggaatcgaggggagttgataagcaaatccaatgactggcaccagttttttcacccataaataggtttccgcttgcccatttctctttagtttctatttcgacagtggccggacaggtcataccaaaaactaatcaaatgatcggagttcacttcgtgtttttgttgcttctcggcgtggttgcctccacccagggagctaacattttggggctcttcagcagtcacagtccgtcgcatctgataatccacatgtcggtggccaaggcactggtcaaagctggacacaatgtgaccgtggtgtccatgctgaagcccaaggtgacgcacaaggacatccacctgattgtggtgcctatgaaggaggagcaagaacgcatcatggaagaccaaatgaccgaaatggccgggcaaaagaactcactggtcagcactatgtatcgccttctaaccagcatggatgttatgatcaatgcccaggcggaactcctatccgaccctcggtttcagcgcatttacgagaccaaatttgatttgatgattttgggttacttcatcaacgactttcaactgggtgtcgcccataagctaaaggtgccggtaattattaattggatgtcggcacctgttccggcaatcgataagtatacgggtaatccctcggagttatcctatgtgcccctcatgggaactgtggccacgcaaccaatgggcttcctcaaacgaactgaaaacgctctcaaatccctgctcttcgaattcatttttgttgtgtttgattacaaattgacacgcatttataatgacgtctttccggaacaagatatgcccacactgaaggagttgaggaagaatatctccatggcctttgtcggctcccacttaatcagtgaaggacctattcgacccctggtgccagcgctaatcgaaatcggaggaatacaagtaaaggataagccggatcctctgcccaaggatatcgatcagttcataagcaatgccaagcaaggtgctgtcttcctgtcactcggctccaatgtcaagagttccactgtaaggccagaaatcgtacagatcatctttaaggtcctgtccgaactgaaggagaacgtaatctggaaatgggaggatttggagaacacacccggtaactcctccaatattctttataagaactggctgccccaagacgatatactggcccatccgaataccaaactctttatcacacacgctggaaagggcggcattacggaggcacaataccacggagtgccaatggtggcactgccgatattcggagatcagcccggaaacgcggcactgatggagaaatctggatatggcctggctctggatttgctgtccataacggaggacagtctaagggatgccctgaaagaggttctggaaaatcaaaagtacaaacaagctattggccaattctctaccctgtacagagatcgacccatgaccgccaagcagtcggtggttttctggactgaatacatcctgagacatcaaggagcacccaacttacagagtccgtcggtgcacatgaatttcattcagcttaacaatcttgatatttacgcattaattgtgacgattctggtcttatttgtgctccttacccgactggttgcgaaaatcgtatggaacaaatttgggggaaaggcgaagatttctcagaccaaaaagaaacaataaattaagttaaattaagaaataaatattaccaaattgtatttcataactcgcattcctgattacgaaatttctcatgctactgtatgacgcatgcattgagttatcgatagcgccaaaagattacttattggcctagttacttgttgtttgggacaactttgaaaagccattaatagtttagctcatatatttaagaaatcagaaaaaaactgaaatattaaaatatttatatgaacaattaaaaatgaaatatgttttgtttttgatttatttataacgttaatcgacgagtcggagggcggatgagaaatttgaaaattaatttaaaaattggcaaaaagtgggtgcgtgattgctttaagattgaaggctcagcaggagctcaagataaggttcagtagtccaaaaatattaaaaaatcaaatgtcattaaactatgcaaaactattacataaagtcttcatattcataatgtatttagcaattttgtttactgattagacaataaatttatgcttaattctttttaccatttaatcgtgactccgggctgcagatacgctgtttgacaaaaaaaacctttgcgatagcgataatcttatagcaattgaccagtgtgtttgaacaaactctaggcagacttcccctatatgccaagtcactaccgcacagcgaaaggtattttaatatgttccctattgatattgcgtttgctatataagctagaacgctagaaatatattatcttagtcgtttacactcagttcaattgaaaggttaattcaaaatgattgaatatactaaaatcggatttttgattgcattccttctgagcacgatgacccaaagcagtggtggagccaatatattgggagttttcggaacacacagtccttcgcacgtgatcgtgcatatggctgtgatgaaagcccttgctgatcgaggtcacaacattacagtggtgacccagatgaaaccgaaattggcgacacatgaaaat

SEQ ID NO: 40310 - DNA, 1572 bp, DROSOPHILA
atgatcggagttcacttcgtgtttttgttgcttctcggcgtggttgcctccacccagggagctaacattttggggctcttcagcagtcacagtccgtcgcatctgataatccacatgtcggtggccaaggcactggtcaaagctggacacaatgtgaccgtggtgtccatgctgaagcccaaggtgacgcacaaggacatccacctgattgtggtgcctatgaaggaggagcaagaacgcatcatggaagaccaaatgaccgaaatggccgggcaaaagaactcactggtcagcactatgtatcgccttctaaccagcatggatgttatgatcaatgcccaggcggaactcctatccgaccctcggtttcagcgcatttacgagaccaaatttgatttgatgattttgggttacttcatcaacgactttcaactgggtgtcgcccataagctaaaggtgccggtaattattaattggatgtcggcacctgttccggcaatcgataagtatacgggtaatccctcggagttatcctatgtgcccctcatgggaactgtggccacgcaaccaatgggcttcctcaaacgaactgaaaacgctctcaaatccctgctcttcgaattcatttttgttgtgtttgattacaaattgacacgcatttataatgacgtctttccggaacaagatatgcccacactgaaggagttgaggaagaatatctccatggcctttgtcggctcccacttaatcagtgaaggacctattcgacccctggtgccagcgctaatcgaaatcggaggaatacaagtaaaggataagccggatcctctgcccaaggatatcgatcagttcataagcaatgccaagcaaggtgctgtcttcctgtcactcggctccaatgtcaagagttccactgtaaggccagaaatcgtacagatcatctttaaggtcctgtccgaactgaaggagaacgtaatctggaaatgggaggatttggagaacacacccggtaactcctccaatattctttataagaactggctgccccaagacgatatactggcccatccgaataccaaactctttatcacacacgctggaaagggcggcattacggaggcacaataccacggagtgccaatggtggcactgccgatattcggagatcagcccggaaacgcggcactgatggagaaatctggatatggcctggctctggatttgctgtccataacggaggacagtctaagggatgccctgaaagaggttctggaaaatcaaaagtacaaacaagctattggccaattctctaccctgtacagagatcgacccatgaccgccaagcagtcggtggttttctggactgaatacatcctgagacatcaaggagcacccaacttacagagtccgtcggtgcacatgaatttcattcagcttaacaatcttgatatttacgcattaattgtgacgattctggtcttatttgtgctccttacccgactggttgcgaaaatcgtatggaacaaatttgggggaaaggcgaagatttctcagaccaaaaagaaacaataa

SEQ ID NO: 40311 - protein, 523 aa, DROSOPHILA
MIGVHFVFLLLLGVVASTQGANILGLFSSHSPSHLIIHMSVAKALVKAGHNVTVVSMLKPKVTHKDIHLIVVPMKEEQERIMEDQMTEMAGQKNSLVSTMYRLLTSMDVMINAQAELLSDPRFQRIYETKFDLMILGYFINDFQLGVAHKLKVPVIINWMSAPVPAIDKYTGNPSELSYVPLMGTVATQPMGFLKRTENALKSLLFEFIFVVFDYKLTRIYNDVFPEQDMPTLKELRKNISMAFVGSHLISEGPIRPLVPALIEIGGIQVKDKPDPLPKDIDQFISNAKQGAVFLSLGSNVKSSTVRPEIVQIIFKVLSELKENVIWKWEDLENTPGNSSNILYKNWLPQDDILAHPNTKLFITHAGKGGITEAQYHGVPMVALPIFGDQPGNAALMEKSGYGLALDLLSITEDSLRDALKEVLENQKYKQAIGQFSTLYRDRPMTAKQSVVFWTEYILRHQGAPNLQSPSVHMNFIQLNNLDIYALIVTILVLFVLLTRLVAKIVWNKFGGKAKISQTKKKQ

SEQ ID NO: 40312 - DNA, 3679 bp, DROSOPHILA
tggactgaatacatcctgagacatcaaggagcacccaacttacagagtccgtcggtgcacatgaatttcattcagcttaacaatcttgatatttacgcattaattgtgacgattctggtcttatttgtgctccttacccgactggttgcgaaaatcgtatggaacaaatttgggggaaaggcgaagatttctcagaccaaaaagaaacaataaattaagttaaattaagaaataaatattaccaaattgtatttcataactcgcattcctgattacgaaatttctcatgctactgtatgacgcatgcattgagttatcgatagcgccaaaagattacttattggcctagttacttgttgtttgggacaactttgaaaagccattaatagtttagctcatatatttaagaaatcagaaaaaaactgaaatattaaaatatttatatgaacaattaaaaatgaaatatgttttgtttttgatttatttataacgttaatcgacgagtcggagggcggatgagaaatttgaaaattaatttaaaaattggcaaaaagtgggtgcgtgattgctttaagattgaaggctcagcaggagctcaagataaggttcagtagtccaaaaatattaaaaaatcaaatgtcattaaactatgcaaaactattacataaagtcttcatattcataatgtatttagcaattttgtttactgattagacaataaatttatgcttaattctttttaccatttaatcgtgactccgggctgcagatacgctgtttgacaaaaaaaacctttgcgatagcgataatcttatagcaattgaccagtgtgtttgaacaaactctaggcagacttcccctatatgccaagtcactaccgcacagcgaaaggtattttaatatgttccctattgatattgcgtttgctatataagctagaacgctagaaatatattatcttagtcgtttacactcagttcaattgaaaggttaattcaaaatgattgaatatactaaaatcggatttttgattgcattccttctgagcacgatgacccaaagcagtggtggagccaatatattgggagttttcggaacacacagtccttcgcacgtgatcgtgcatatggctgtgatgaaagcccttgctgatcgaggtcacaacattacagtggtgacccagatgaaaccgaaattggcgacacatgaaaatattaccgtgatcattgcaccgccgacggaggagagacagagatatatcaaagaatatatggctgaggtatctaatgagaaaccttcgttctgggagaccatggtcaaggcgatcgtccaatcttccaatcaactggaaggacaatatgagtttatgacgcatcccaatgtcaaagagatctacgagaatccaaagatcaaattcgatttggtgtttttgggattgatggccaacacctatcagttgggcattgctgccaagttgaaatgtccggtcattatatcgtgggtgggcattccgctgcccttcatggacaccattgtgggtaatgtcaacgatccatcgtatgtcccgaccgtaaatgtagcccttaatgcgggtcaaaagaccatggactttggcctaagatttgtgaacttttttaaatatgccatcatgtgcgtttttgagacagtattggactataagatgaaccagttttacgagtaagtatacaacaaaaaacagagctagaaacagcaattgatttatgaattctttacaggcgagcttttgctaatgaattggagtttccaaactatcatgagatgaagcgacgagtttccttgttgttctataattaccattccgccagcgaaggacccatcagaccgacagtacctcaatcgattgaaattggcggaatacaagtaaaggagcaggccgatcctctgcccaaggagttggccaagtttcttgataaggctgatgagggcgcgatatttttcagtctaggaactaatgtgaatacgaatacctttcgacccgataccgttgatatcctgtacaaagtgctatccaagttgccacagagagttatttggaagtgggaggacctgaaaaacaagccaggaaatgcctccaacatattcttcggcaattggctgccccaggacgatatcttggcccatccgaatacgaaactattcataacccatgcgggcaagggcggtgtggcagaggctcaatatcatggagttcccatggtcgcgctaccgatctttggcgatcaacagggaaatgctgaaatcatgacaaaatctggctttggccgatggttggatattctcacaatgacggagcatgaactggagcagactatccgtgaggtccttgggaatcccgcgtatcgtgagacgattggaaagttctccaccctttacagggatcgtccgttaacagcccgtcaatcggtcatctactggaccgagtacgtattgcgtcatcaaggagcccttcacctgcagagtcccctcattcacacaaaatttgtggctcgaaacaatctcgatgtctatggagtagttctcctggtcagtcttctactcatagtcactattaagtttctatttcgcaagattttaaatgttgcgattggttacggtagtcagcggaaagcggtggcaaacaagcttaaaaataattaattgggatctacaataccattaatggatatgcgaaatttcagttgatatgatgaaacacaaacgttgttgttaagaatcttaaaaaaaaatatataaaaaaaattaaagaaaaagtaacttattcactcttttcgtatttcttttttgcatctctttcttaaaaaacactgattatggcgaagactactatacagataaaaacatttgccggaaagcatgagtttgcacaaaacatccattacatattgtttataggcatgtacttgagacttgtatttgtgggtagataaggggcgattgcaaaattgttccctcgcaatcttaaatcattgttaaccaagtcagaaacactttaagaagatgccccatacaaaaacctaatacaaaattctgcaccttaagcagaaaagaaaccatttattatttatacacttgaacctaacctttagatacgaattagatgccttaactagggtaattaactgtcgccagcctttgaagtgcatgcatttgtatatatattattttttttttctttaagctgatgtcatgcaccttacacaacgtgacagttaatgaaatagcaacaatgattcccagacctagaacaacactcgctcaacaggttgcttgagcatttccatgttctcccacagcgaataattttatttttagaggcctcccgctcggttttttctcttctctcgagaactatctcatcgggttaaattcaaatcggatcgaattcaattctcagtgattcgaacggcgtcgaggcagcgcgtgccgaacgcgtattgttttccaaattatttctttattattcgaatggctcctatgggtgtctctatatagacgaggtatttaaatatctatcatagttgttgtgttaaaagtcatcaagagagagcgaaaattgatgaaataatagttaacctacaagttgacattgacaatgcgacaaggttgcactttaacctaagtaattgcagccgaaaca

SEQ ID NO: 40313 - DNA, 1530 bp, DROSOPHILA
atgattgaatatactaaaatcggatttttgattgcattccttctgagcacgatgacccaaagcagtggtggagccaatatattgggagttttcggaacacacagtccttcgcacgtgatcgtgcatatggctgtgatgaaagcccttgctgatcgaggtcacaacattacagtggtgacccagatgaaaccgaaattggcgacacatgaaaatattaccgtgatcattgcaccgccgacggaggagagacagagatatatcaaagaatatatggctgaggtatctaatgagaaaccttcgttctgggagaccatggtcaaggcgatcgtccaatcttccaatcaactggaaggacaatatgagtttatgacgcatcccaatgtcaaagagatctacgagaatccaaagatcaaattcgatttggtgtttttgggattgatggccaacacctatcagttgggcattgctgccaagttgaaatgtccggtcattatatcgtgggtgggcattccgctgcccttcatggacaccattgtgggtaatgtcaacgatccatcgtatgtcccgaccgtaaatgtagcccttaatgcgggtcaaaagaccatggactttggcctaagatttgtgaacttttttaaatatgccatcatgtgcgtttttgagacagtattggactataagatgaaccagttttacgacgaaggacccatcagaccgacagtacctcaatcgattgaaattggcggaatacaagtaaaggagcaggccgatcctctgcccaaggagttggccaagtttcttgataaggctgatgagggcgcgatatttttcagtctaggaactaatgtgaatacgaatacctttcgacccgataccgttgatatcctgtacaaagtgctatccaagttgccacagagagttatttggaagtgggaggacctgaaaaacaagccaggaaatgcctccaacatattcttcggcaattggctgccccaggacgatatcttggcccatccgaatacgaaactattcataacccatgcgggcaagggcggtgtggcagaggctcaatatcatggagttcccatggtcgcgctaccgatctttggcgatcaacagggaaatgctgaaatcatgacaaaatctggctttggccgatggttggatattctcacaatgacggagcatgaactggagcagactatccgtgaggtccttgggaatcccgcgtatcgtgagacgattggaaagttctccaccctttacagggatcgtccgttaacagcccgtcaatcggtcatctactggaccgagtacgtattgcgtcatcaaggagcccttcacctgcagagtcccctcattcacacaaaatttgtggctcgaaacaatctcgatgtctatggagtagttctcctggtcagtcttctactcatagtcactattaagtttctatttcgcaagattttaaatgttgcgattggttacggtagtcagcggaaagcggtggcaaacaagcttaaaaataattaa

SEQ ID NO: 40314 - protein, 509 aa, DROSOPHILA
MIEYTKIGFLIAFLLSTMTQSSGGANILGVFGTHSPSHVIVHMAVMKALADRGHNITVVTQMKPKLATHENITVIIAPPTEERQRYIKEYMAEVSNEKPSFWETMVKAIVQSSNQLEGQYEFMTHPNVKEIYENPKIKFDLVFLGLMANTYQLGIAAKLKCPVIISWVGIPLPFMDTIVGNVNDPSYVPTVNVALNAGQKTMDFGLRFVNFFKYAIMCVFETVLDYKMNQFYDEGPIRPTVPQSIEIGGIQVKEQADPLPKELAKFLDKADEGAIFFSLGTNVNTNTFRPDTVDILYKVLSKLPQRVIWKWEDLKNKPGNASNIFFGNWLPQDDILAHPNTKLFITHAGKGGVAEAQYHGVPMVALPIFGDQQGNAEIMTKSGFGRWLDILTMTEHELEQTIREVLGNPAYRETIGKFSTLYRDRPLTARQSVIYWTEYVLRHQGALHLQSPLIHTKFVARNNLDVYGVVLLVSLLLIVTIKFLFRKILNVAIGYGSQRKAVANKLKNN

SEQ ID NO: 40315 - DNA, 6377 bp, DROSOPHILA
aacgaatcgatcaatttgtggatgatgtggatgatggggaagacgacttggaggatcttatcgagggtctggaggaggacgagatcgacgagaggcgacagcagcattagcccaaaacaagcatttttcttgaactgcgctctataccaaatctatcagaaactttttctcacgcctaatacgttcttgtacataagtcagctttaattgaatctgtatttatttgttgttagttgttaggccctgctggcgtcacaatgtgactgcgttctatacccaatgtaattcgagcaaagagttttcgttgtgtaattaagcattaaattattgaaatttttctacgttttttagttgttaagtgtgaaaataaaaaaaaaaccaaaacgaaatacgatatacgatatacgaaaataaaatacaatagagccatctattggggagatcagtcgattgcgccaccttgtgcgcgacaagcgggacctgcactagagagtctttgtctttctacacaaatattaaaaaaggggtaagttaaaatactgatggataatccaaacatattatctcattgaaaagtatgtctatacccttaatgctcactggaaataattatacattaatgaataacacagtcgtttttcttttctatgaataataataattttgcgtttcaaatgtaccgccaaatttccttccagtaaatatcgatcgttcactgttcgataccgatagccaaagtttatcagacagtgctgacatgttagcggaaaatatgtaagcaaaattcaaattgtttctgagtattcattaatacaatattattacttattactgtctttaggatgaaaactattgacgattgtagctcttactgttttatcatgaaaaaatcgtgaaaaaatcattttcccgctcaactccggacatcactgatgtcgagcctattgctttgtttatttccagttgtattttccaagcgtcagttgagaactcgtcgttgaagcgtgcggtttacggtaaaaagaggccgcttccagtacgtgaaaataagtctgctcttgttgaaagaaacaacaaaaacttgccaattggattaaattgtgtgcaaggtgtgctaaactgagtagacaaataatatattattaactaggtacaaacaatacaaggcacacaaagttcccagagttcaagtaaaaaattaaacgatcagtgtgatatttttttgtgtgtttgtttacgcttcttcggcgatcttcgttctctgtctaactctcgcttttgtttgaagttttcgatggcggagtaatgaacttgagcgaataagaagaagatctgcaagtgcagttgttccaatcggtaatgtgtttctggcacccactgaaaagaaaacaaaaacaacaagtggcaaacacgtgcagtgtgatttggtgactcaaagcccattaaagcggctaaattttatgagaacagcagctaagcagataaaaaacaagatatacctaacaacaaatcgtatatagacgaatacggaggctttatttttgcataccatatagccatcataaattagtgaaactatctccgccttcccttgaattgaatgagcgttgataatgtctatataactaaatgtgtgaatgcgtgtgcatatatttgaccaatggctgtataaccttgatccgggcattgcgtcgcaaactaaaaaaaaaaaaacaaaaaaaaaaacatttccgaaatgtggcggcgtcgtctccatcaaacagaaaaagccaaacagtaaaaaccaaacaaacttctatgccaaaaaaccggtttatgctgaaaacccaaacagagagcacttctgaccggagataaaatgacccagcaaaagagagagcttgtgtctggttgggaaaacaaattccattccacttagaaattatcagtggcacggcaaatgtcagaatccggctgataagagcattgttgtttcattctgattagaggaagccggcgaaatttttgtgtatttttcctctcgataatttgtaggctacagtgaagcttgtcatggttaacttcacattacattaaacttaacatggtgtctttaaaaatgcggtttatgtttgaaatcaattataaatatttcattctccaaagttagattgattccagcaaaaacgcctcatagaatttcgactctagctggtatgcatccgttttacatggtaaggggcaagaaaattgtgattagggtggcccagccagacatgtctaccctggcaacatgataacgtgggtattatgcaatctccgagtttatgaaccgcagcttgagcagcttgataacctttatcaatcgatgttccattgggcggcgttcgccactcaagttgatgaatctacttgagttactgacctacttttatcatcgctatggaaagttcttccttataaagccgcaaccggttccgacagtaattatccgtcctacatggacaactaaaatgtttggaatattttcaccattttaagttcgccctagggcagagcacaaaataaagatcaacagtgctcaataaatagacgaaacttttccaagatccattatcattctgctgcagttaccgctgtaccgcccccaccttcgattgtttaaatataaaccgaaagttcaacaaactaatcgtcaaaccgcagagagcattcaattcaggttcggtttccacatgcgggttgtatatgtgtgttcttacatatctattcaaacagcagaggtcacaattgtagcgcatttataaatatataactcaaatgaagctagacgttgaaatatacatttttaataagaacccacaatgagtcgactttgctttcttcttttaccttgcacttcaaaatatctctacagttctatcctgattaacttatttgcacggatttataatatgtatattaatgggtgcatataatgcaatctctctttgaatgcttcatgtacatctcggactgcctcggtcctcgatgcctgtaaattactcatcattcggttgatgggccataacgagctccgacttgaagttctgaatgacgttgcgtcacggtgactcgactgaaatcgtactgaactccccatgaacgaacatatgagattggagtatatgtctttgttgcacttggatcagttcaacgcactgaataattatgtaaaactttgtgttttccgccagtggaatactaaatacacgctgcgagacaaaaattgctaaaattcttcatctgtccttttttcaaaaccataaattatttcaatcctgaactcgaatcgtatacattacaactttcaaaagccattactgaaaaggttggcatccacgatcacttaaattgatttttcggttcattagcgataagcagcgatagtgatcgaactttgatgtcaaataaacaaggtatcaacaaactactcgcataaaacaattaggtaaaaatggttgccttcgtaacatgacgtagattttgttacctaagatatcttttcaacagataacacacacaaatttcgtcattaattttagttgcatacatatatgtaggtatttcactgatttataaatattaaataattgctgagacaacaatttcctaatcgtatcttgctactcgttgtttaacaaaaacaagttacgtgaacgcaaatctataacttgaatcgcatttgtattcaaaaatagaatctgcacatatcaaccgtttatttgttgatgattcttgagttctatacaattttcattgcaaaaggtggatgtggatttgaaactttgaggcttaacggcgataatgccctcccatttggttgacatgcgatcttgactgtgggagctaatgtcaagtacgatcgtagcagctttacaactggttttaaacgatttaagtgagaagctgttggcttaaccacattatcaaatgcgggctcaatgtctatgcaaatcggtatctgattactcaatcagcaatctctcagtcagctgaactttgacctcaagccgcattttgcttctggttttgtatggatctatttattctctaacatacatatagctctgtttactaataaactaatatatgaccagcttcagcaagtaataaaacgattttcataaataaaaaacaagatatgtgcttaagacatcttattacttaattaccctcattatttcttatctcagttgcgtatttattcaatagataagcgactctgaaaatgcctccactgtttacaacctcctgggatcccatctgagttatttgtgtgtcaaaataaaagcactcaaacattttataaggggtaccaaaacaaatcttatctttgcatttcaactgcaaacggaatttgcgataagctagaagtaatcactataaattgaaattctttcaatatagagaccatcaccatgaccaccaataaggatccccaagataaggagcccgggaaagcagaacaaccgaccaagaatagcggatccagcggtgtgggtatcatgaagcgcttgagaagatcggcgtccgccacagagcataatcttagcagtctgcgaaaccgcaagtcaacacaaaatctattcgatcagcacgggaatcccatagatctgcgacagtatcgtaaagttttggataaggatgaaaatggtaatggaaccaacggatccgagaagaagcttagatacaggagaacacaaagtgtgactcgtgctgaggagatttccaataaagaggagaagcagagaagagctcagcctggcagaccgtaagtagggaaattaaactactttagcccaaatacagggtttcgcctcttttagaatccatcggccaagagattctctgttttcttggagctctggatttaccaatttttctggactggtgaactggggatttctactgctctgcattggaggtctgcgtttgggcttggagaatctcctaaagtaactacgatgatcttgagtagaaatacaagttttagctaattcattatttttttaggtatggcattcgcatcaatccactggattggttcttcttcataagcggacacaacgaaggcgaaggacataacgccctaatcctgagcatttgtaagcacgcacaaaatcaaggattacgcaaacgaaattgataaccttcgtctcaccatattttacagactctttagtgcatatctcgctctgtttggctgtggagaagggtctagccatggtaagtacttactttgatagcatctcacgcctattttcttcgatcgtgacttgaaatacgttattagcttgaacatggcttatatgataaatttcgaaatatctagttaattctaaattcacaattttgaaattgagtgaagggtgtttgacaagaaatgatttgtttatcagagagaaaagtatgaaatattcagaagttatcgcagttgaaacacactagtttcggaaaacataatttttaattgtttacaaaacttacatatattagatacaatttttaaatgacaataaactgggcatgcaatgagtgatcgagtgcgtgtatgcataaattttcgaatgtatggcgaggtttgattgcgatgaatgagcttaaagtcggtcgattcctttaggcaatgcgtactccagcctgatcacaatatttctggagtacttgcttgtactccggctccaggggcgacaacaaagtggaaaattctcctgccctagcctgggcaaacttagagagcgaagttgctagaaactggcgagcatccttaatctcagccaggtgatcctgctggttgggctgggcatgagtcagttgggcaaatgccacttgatagcccgcatcgggatcttcggcaactccagctgtctctcctatttcgagacccatcaatttctctggtggtcgttcaaaaagatcgattagagaatgcagcagtcgtggccagaaagtagcgtactgttgctgcaatatctcaggagtttctgtaagtagcttagtgacacccacggccaccattttgcgatcctgttccttgggaatcttgcccatttcggtgataaacacgcggtccagcagcatgccaaataggttaggctgaatctcatctatcaattgagccatctgactgccactgaacttaatcacataaaagctaaagaagataatgatgccgcttaaatacttcggagtctttgagagagacaatcgctggaagagcaggccaaagatctgacgaagattagtttgaatctcagcgggagggtagtaggaaagcagattctggagaagataaaacccttcatggtcattagccttggaggcaatcatcttttggaatattccgaggataccgc

SEQ ID NO: 40316 - DNA, 770 bp, DROSOPHILA
aagcgtgcggtttacggtaaaaagaggccgcttccagtacgtgaaaataagtctgctcttgttgaaagaaacaacaaaaacttgccaattggattaaattgtgtgcaagatgaccaccaataaggatccccaagataaggagcccgggaaagcagaacaaccgaccaagaatagcggatccagcggtgtgggtatcatgaagcgcttgagaagatcggcgtccgccacagagcataatcttagcagtctgcgaaaccgcaagtcaacacaaaatctattcgatcagcacgggaatcccatagatctgcgacagtatcgtaaagttttggataaggatgaaaatggtaatggaaccaacggatccgagaagaagcttagatacaggagaacacaaagtgtgactcgtgctgaggagatttccaataaagaggagaagcagagaagagctcagcctggcagaccaatccatcggccaagagattctctgttttcttggagctctggatttaccaatttttctggactggtgaactggggatttctactgctctgcattggaggtctgcgtttgggcttggagaatctcctaaagtatggcattcgcatcaatccactggattggttcttcttcataagcggacacaacgaaggcgaaggacataacgccctaatcctgagcatttactctttagtgcatatctcgctctgtttggctgtggagaagggtctagccatggtaagtacttttaattctaaattcacaattttga

SEQ ID NO: 40317 - protein, 220 aa, DROSOPHILA
MTTNKDPQDKEPGKAEQPTKNSGSSGVGIMKRLRRSASATEHNLSSLRNRKSTQNLFDQHGNPIDLRQYRKVLDKDENGNGTNGSEKKLRYRRTQSVTRAEEISNKEEKQRRAQPGRPIHRPRDSLFSWSSGFTNFSGLVNWGFLLLCIGGLRLGLENLLKYGIRINPLDWFFFISGHNEGEGHNALILSIYSLVHISLCLAVEKGLAMVSTFNSKFTIL

SEQ ID NO: 40318 - DNA, 6030 bp, DROSOPHILA
gagcccgggaaagcagaacaaccgaccaagaatagcggatccagcggtgtgggtatcatgaagcgcttgagaagatcggcgtccgccacagagcataatcttagcagtctgcgaaaccgcaagtcaacacaaaatctattcgatcagcacgggaatcccatagatctgcgacagtatcgtaaagttttggataaggatgaaaatggtaatggaaccaacggatccgagaagaagcttagatacaggagaacacaaagtgtgactcgtgctgaggagatttccaataaagaggagaagcagagaagagctcagcctggcagaccgtaagtagggaaattaaactactttagcccaaatacagggtttcgcctcttttagaatccatcggccaagagattctctgttttcttggagctctggatttaccaatttttctggactggtgaactggggatttctactgctctgcattggaggtctgcgtttgggcttggagaatctcctaaagtaactacgatgatcttgagtagaaatacaagttttagctaattcattatttttttaggtatggcattcgcatcaatccactggattggttcttcttcataagcggacacaacgaaggcgaaggacataacgccctaatcctgagcatttgtaagcacgcacaaaatcaaggattacgcaaacgaaattgataaccttcgtctcaccatattttacagactctttagtgcatatctcgctctgtttggctgtggagaagggtctagccatggtaagtacttactttgatagcatctcacgcctattttcttcgatcgtgacttgaaatacgttattagcttgaacatggcttatatgataaatttcgaaatatctagttaattctaaattcacaattttgaaattgagtgaagggtgtttgacaagaaatgatttgtttatcagagagaaaagtatgaaatattcagaagttatcgcagttgaaacacactagtttcggaaaacataatttttaattgtttacaaaacttacatatattagatacaatttttaaatgacaataaactgggcatgcaatgagtgatcgagtgcgtgtatgcataaattttcgaatgtatggcgaggtttgattgcgatgaatgagcttaaagtcggtcgattcctttaggcaatgcgtactccagcctgatcacaatatttctggagtacttgcttgtactccggctccaggggcgacaacaaagtggaaaattctcctgccctagcctgggcaaacttagagagcgaagttgctagaaactggcgagcatccttaatctcagccaggtgatcctgctggttgggctgggcatgagtcagttgggcaaatgccacttgatagcccgcatcgggatcttcggcaactccagctgtctctcctatttcgagacccatcaatttctctggtggtcgttcaaaaagatcgattagagaatgcagcagtcgtggccagaaagtagcgtactgttgctgcaatatctcaggagtttctgtaagtagcttagtgacacccacggccaccattttgcgatcctgttccttgggaatcttgcccatttcggtgataaacacgcggtccagcagcatgccaaataggttaggctgaatctcatctatcaattgagccatctgactgccactgaacttaatcacataaaagctaaagaagataatgatgccgcttaaatacttcggagtctttgagagagacaatcgctggaagagcaggccaaagatctgacgaagattagtttgaatctcagcgggagggtagtaggaaagcagattctggagaagataaaacccttcatggtcattagccttggaggcaatcatcttttggaatattccgaggataccgctctgaaatatatgttgaaaaatgcataagattggactctgtaaaataaaatttgtgatgtataatataacttaccagtttacccaaggcttgaatctgagcagatccctgcttgatgaaagcagaaatcaggcgaattaatggtgtgacattgcccgtcctgtcccacagagctggtgacaacaagcaggggaacaaagcccaatagggttccggtatggtaccagtgccctcgcgcatttccaacagcacagaaagcatctggaagacgtagggcataaattcgacaatgtcctgctgtaagatgccctggaaaactgggaacaatgcctcctcaaaggagctcacagccgaggaatcggcgtgacaaacaattctagggaaaaagaaaatttgttattgctctttaccaccaaaatgcataacacttactttatacacagagccagcgtttcaaaaagatagtggttgaactgcggacgcgatggattcttggccacttgggtgagaatctcggtaagccgtggaagggcgacgcccataaagggcatggcggccgattgcaagaccgaaaaacttcgcataatggctaataataataattagagttttgttaacatattagaaacgtatgagatagtcccccaaactcacctttcattacgtactcattttcaccggaacctgggagtgaaagggtcgcaaataacccactaattagttcagttgtgtaaggtgctaaaatctgaggaccaaaaacgatcgcgttgctagcatcccgcatagaaaggatcttctccactgaacaagcagcatagctatgaacaacagagctttcggcggggagatgtcgaattagctggggcaggcagcttgctaagacttggggacccaaaatgctgcggaacaccattacatacttaattgcagcagccttaagaacaggaaactcgttaactgcaaagagcattggaagaatgcagatataagatgatcgaattgggaaaatggttatttgggcttactgttgggtctttccagttctggaataatttgctgggcacaaaattcgggaagtggaaccaactccgaggtctgtgtgatgccatgcttttgagttcctcctcgagatgcccacgaagtaaccaaataaattgccgtatcctttgacctccaattggtagccggattctccttgtacttggtcaacaatctctctagatactggccaaaaatgccaaagatcttttgttcaaagttgattgatagagtcttcaccagatcacatgccgcccgacgtcgtgtgtcaatgtcagagccttcaatatcccttcgaatgtactcctccggactgtcctcgaaaatttcttcatctgagggccggatgtctagattgggaatgacaactttatcgcagatctgagcaagaatctctgggttctcgaaaatgctctgataatgctggcggtcagccaccacagagaggaactgcagagcatgggagaccaactgtgcgcaaaataagaatggaaaaattataaaaataattattaagaaagcgtatggtttctgttacttaccgaatcgtacttggtgtgcaaacttgtcttgaccagtaactcccaaactgcagtcacaaattgctccataaatggcttgaactcctcgtcgtacttttttgcataaaggcaaatgttctcgcagacttgagcacgcagatgctctagaacacccgcatcctcatcatctgcagtacgcagggatggcacatccgcagctagttgctgaataaacgctcccatccacgtattgatattgtcctcaaagaactccggcaaatcttgggagttgagcgagaaaaacaccttgttcacaaggaccaatgaaccgtagatgaccttcagggcgccggcattgttctcgtgcaccttagtcaactgcattgtggcctggagcaggtctgtcagaggtttagccatacgatccagtacaaatttgatctcctcccacaaagcctgcgacttgaactcataacgatagcgcttgaaaagcgagtgtgcggtttgcaaaacgccgttgatgacattgaaatcaccagaggcaaatctctccaccatctcgtcgataagctgcggccattttttgggaaaatcatatttgcctatgatgctgaccgcgtcgcttagttgtttttgcaatgccaccggtgagtggagcattagcgtaacgatcaaggtcttaattgtattcctgtcactttcgtggatgcgatccggtccgtcgctgtcaaggtgggctgcccaattccgcttaatatagttcttaaaggcaatggctcccgccacccgcgtagtcatgtccatttgggctttgtctatcagattgagcagtaggatcgggtaattctgctgtagttccgtggactccaaaagtttttcggctataaaagtagagaaggaaatggtgtgtttgttagaactattgtacttatgtaaatcggatgttgcaaatacaaatatataaggaaccgataggagcttacagtgtttctcgttagactaaacatattttcaattcaagcaataagttttttatacaatattttcaaaagcttggttatggtggtgcggagtctataggcttggtatgccttaaataatcctaaaactaggtctatggttttgaaaggtggcttggcaacagtcatatcaagatcagctaatctcgattcaattaatagaaagcgtgactgtataaattctttgacatagggaaaacttgtagacaacttcaaatggatttaaaaaccgtatttttctttggcgtcgccaaaaaccatttcccgcgcacatacacatcagcacccctgcacgcatgtgcagttgtgtgtgtgcacatgcattcctacacacacacactcacccggccggcggacattgggatcggcgctcagcgtctgctgcaaataaccggccagcagctgtaaatttgcctctgtcacttccattttgagtatattttcttttcgatggtcctatttgctttaatttatatcactcgtggcttgttcctccacactcttgcaacatgaaatgaaatcgcaattcgttttcgcacacaatgctcgccgatctggggatggaactcagggcgagttttcgatatcgattgtttatagttactgttactaggattcgatggttttagattttaaatgttcatatcagaaatatcgcatattgaactttactaatttagtatcatttgatatgatatcaattcctgtttttttttttcaaaaaccaactgaatgaattaaaaattaaaacaaatttgtaattcttttccaggaaataattgcagagggcttgggcttgttcatccagatagtgaacattgttgtcttggtttgcctaccggtggtaacaattcacctaaaaggacatgcttttagtttgagtgagaaattaacttagtttaggtgtattttaaaatatttaattatctgttaatctttagtgggcgcttcaacagtttgcttcttttactctgtgttgttcctaaaactatggtcctatgtgcagacgaatatgtggtgccgtcagacttattatcaaaagaatccgcgggagcgtcgaccaagcataactttggcggaactaagtatgttgagatctctcaacggaatgtcatatattaaaaattcatctttcatccagaaaaaggagttttgaatggaggtgaagaagacgaggacgtttccaagctggtgcaatatcctgataatctcacatacaaggatctcctgtacttcctttgcgcgcccactctctgctatgagttgaatttcccgcgaacttctcgcgtgcgcaaacgctttttgctgaagcgtttattggaggtggtgattggagtgaatgtggttatggccttgtttcaacaatggatcattccatcggttcggaactccctgattccgttctccaatatggacgtggccttagccactgagcgacttcttaaacttgcggttggtagagtgaaaattataaaacgtttgagtattatttaataatttttctttaattagctacccaatcatctttgctggctctgctttttc

SEQ ID NO: 40319 - DNA, 3215 bp, DROSOPHILA
cattgtgtgcgaaaacgaattgcgatttcatttcatgttgcaagagtgtggaggaacaagccacgagtgatataaattaaagcaaataggaccatcgaaaagaaaatatactcaaaatggaagtgacagaggcaaatttacagctgctggccggttatttgcagcagacgctgagcgccgatcccaatgtccgccggccggccgaaaaacttttggagtccacggaactacagcagaattacccgatcctactgctcaatctgatagacaaagcccaaatggacatgactacgcgggtggcgggagccattgcctttaagaactatattaagcggaattgggcagcccaccttgacagcgacggaccggatcgcatccacgaaagtgacaggaatacaattaagaccttgatcgttacgctaatgctccactcaccggtggcattgcaaaaacaactaagcgacgcggtcagcatcataggcaaatatgattttcccaaaaaatggccgcagcttatcgacgagatggtggagagatttgcctctggtgatttcaatgtcatcaacggcgttttgcaaaccgcacactcgcttttcaagcgctatcgttatgagttcaagtcgcaggctttgtgggaggagatcaaatttgtactggatcgtatggctaaacctctgacagacctgctccaggccacaatgcagttgactaaggtgcacgagaacaatgccggcgccctgaaggtcatctacggttcattggtccttgtgaacaaggtgtttttctcgctcaactcccaagatttgccggagttctttgaggacaatatcaatacgtggatgggagcgtttattcagcaactagctgcggatgtgccatccctgcgtactgcagatgatgaggatgcgggtgttctagagcatctgcgtgctcaagtctgcgagaacatttgcctttatgcaaaaaagtacgacgaggagttcaagccatttatggagcaatttgtgactgcagtttgggagttactggtcaagacaagtttgcacaccaagtacgattcgttggtctcccatgctctgcagttcctctctgtggtggctgaccgccagcattatcagagcattttcgagaacccagagattcttgctcagatctgcgataaagttgtcattcccaatctagacatccggccctcagatgaagaaattttcgaggacagtccggaggagtacattcgaagggatattgaaggctctgacattgacacacgacgtcgggcggcatgtgatctggtgaagactctatcaatcaactttgaacaaaagatctttggcatttttggccagtatctagagagattgttgaccaagtacaaggagaatccggctaccaattggaggtcaaaggatacggcaatttatttggttacttcgtgggcatctcgaggaggaactcaaaagcatggcatcacacagacctcggagttggttccacttcccgaattttgtgcccagcaaattattccagaactggaaagacccaacattaacgagtttcctgttcttaaggctgctgcaattaagtatgtaatggtgttccgcagcattttgggtccccaagtcttagcaagctgcctgccccagctaattcgacatctccccgccgaaagctctgttgttcatagctatgctgcttgttcagtggagaagatcctttctatgcgggatgctagcaacgcgatcgtttttggtcctcagattttagcaccttacacaactgaactaattagtgggttatttgcgaccctttcactcccaggttccggtgaaaatgagtacgtaatgaaagccattatgcgaagtttttcggtcttgcaatcggccgccatgccctttatgggcgtcgcccttccacggcttaccgagattctcacccaagtggccaagaatccatcgcgtccgcagttcaaccactatctttttgaaacgctggctctgtgtataaaaattgtttgtcacgccgattcctcggctgtgagctcctttgaggaggcattgttcccagttttccagggcatcttacagcaggacattgtcgaatttatgccctacgtcttccagatgctttctgtgctgttggaaatgcgcgagggcactggtaccataccggaaccctattgggctttgttcccctgcttgttgtcaccagctctgtgggacaggacgggcaatgtcacaccattaattcgcctgatttctgctttcatcaagcagggatctgctcagattcaagccttgggtaaactgagcggtatcctcggaatattccaaaagatgattgcctccaaggctaatgaccatgaagggttttatcttctccagaatctgctttcctactaccctcccgctgagattcaaactaatcttcgtcagatctttggcctgctcttccagcgattgtctctctcaaagactccgaagtatttaagcggcatcattatcttctttagcttttatgtgattaagttcagtggcagtcagatggctcaattgatagatgagattcagcctaacctatttggcatgctgctggaccgcgtgtttatcaccgaaatgggcaagattcccaaggaacaggatcgcaaaatggtggccgtgggtgtcactaagctacttacagaaactcctgagatattgcagcaacagtacgctactttctggccacgactgctgcattctctaatcgatctttttgaacgaccaccagagaaattgatgggtctcgaaataggagagacagctggagttgccgaagatcccgatgcgggctatcaagtggcatttgcccaactgactcatgcccagcccaaccagcaggatcacctggctgagattaaggatgctcgccagtttctagcaacttcgctctctaagtttgcccaggctagggcaggagaattttccactttgttgtcgcccctggagccggagtacaagcaagtactccagaaatattgtgatcaggctggagtacgcattgcctaaaggaatcgaccgactttaagctcattcatcgcaatcaaacctcgccatacattcgaaaatttatgcatacacgcactcgatcactcattgcatgcccagtttattgtcatttaaaaattgtatctaatatatgtaagttttgtaaacaattaaaaattatgttttccgaaa

SEQ ID NO: 40320 - protein, 975 aa, DROSOPHILA
MEVTEANLQLLAGYLQQTLSADPNVRRPAEKLLESTELQQNYPILLLNLIDKAQMDMTTRVAGAIAFKNYIKRNWAAHLDSDGPDRIHESDRNTIKTLIVTLMLHSPVALQKQLSDAVSIIGKYDFPKKWPQLIDEMVERFASGDFNVINGVLQTAHSLFKRYRYEFKSQALWEEIKFVLDRMAKPLTDLLQATMQLTKVHENNAGALKVIYGSLVLVNKVFFSLNSQDLPEFFEDNINTWMGAFIQQLAADVPSLRTADDEDAGVLEHLRAQVCENICLYAKKYDEEFKPFMEQFVTAVWELLVKTSLHTKYDSLVSHALQFLSVVADRQHYQSIFENPEILAQICDKVVIPNLDIRPSDEEIFEDSPEEYIRRDIEGSDIDTRRRAACDLVKTLSINFEQKIFGIFGQYLERLLTKYKENPATNWRSKDTAIYLVTSWASRGGTQKHGITQTSELVPLPEFCAQQIIPELERPNINEFPVLKAAAIKYVMVFRSILGPQVLASCLPQLIRHLPAESSVVHSYAACSVEKILSMRDASNAIVFGPQILAPYTTELISGLFATLSLPGSGENEYVMKAIMRSFSVLQSAAMPFMGVALPRLTEILTQVAKNPSRPQFNHYLFETLALCIKIVCHADSSAVSSFEEALFPVFQGILQQDIVEFMPYVFQMLSVLLEMREGTGTIPEPYWALFPCLLSPALWDRTGNVTPLIRLISAFIKQGSAQIQALGKLSGILGIFQKMIASKANDHEGFYLLQNLLSYYPPAEIQTNLRQIFGLLFQRLSLSKTPKYLSGIIIFFSFYVIKFSGSQMAQLIDEIQPNLFGMLLDRVFITEMGKIPKEQDRKMVAVGVTKLLTETPEILQQQYATFWPRLLHSLIDLFERPPEKLMGLEIGETAGVAEDPDAGYQVAFAQLTHAQPNQQDHLAEIKDARQFLATSLSKFAQARAGEFSTLLSPLEPEYKQVLQKYCDQAGVRIA

SEQ ID NO: 40321 - DNA, 4471 bp, DROSOPHILA
taaaagactaaagaaatctaaattgttcgttatatgttggatactttcaactctgccttggattttccattgtatgggttaactttctttggctttgtttgatcgtttaaggttcttttggacttagctccctagaatatgttcattttttaatttatatttaaaacacgctccactgggagcttaaaacgattttaagctacagtaaaacattttcaatgcgccaagctgcgaagcttttaagtcttaactattcaattaactaccaagtaaagtgtataattccgtataattcgaaaacgggtttcctttaaatttgtttaaaaaaacaactaatcagcaggatggtattccctttgtttttctgtgttgtctcgtggcttagcagtctagagatcagctttagtaaagaaatatgtattctagtttacttcgaattgctgtaaaagcaatcggctaaagttcaatataaagagaaaaatattattgttaccagaagaaagctttgagtgtggatgtgtggatttagcaaaggcggggcagccaattatatattgtaattgtgagtgggtgtatgtgtttgtgtcgaactcagattagaattgcttcaccttaaccaacactggcatggagaaagccgtagcaaaagagttttcggaaacggttaacggccctatagaatattaaaaacggtaaagtattagactctgtgataaattgtagtacttgcatttaaaatatacatatacaagatgtctcagaggaaaattaaagtagaggagttgttcatctatgtaatatataactcaatacctttatgccgataactcttttagtagactttctccgtctaccatctcgtacctagcctagtagttctataacttgatggttccccgttcgatttcatctatatttggtttctttatcacatgctttgcatttcggctgctcaaaacgtatctgtaagtgcgtgtacatagtgttaacgggatggccattagagcttgtccaggtcgggttcctctggatcggttggactcatcggggacatttccacactgtccagaagcggagtcttctcttcgctgcatgtactgcccggtgcatcgtccatgtccatcacgaagatcctggagaggtccgctccgctgagggtatgtctcgacggggactcatccaccgagctggtggtgctgctactgctgtcactgctggtggtgctgctgcccttggtggtgctattctgggcggtgttgttctggttggtggcatggatgctcgggatggcgatggtggcgatgctctggtcgagggacttggatggtgtgcgatagctggcagttgccgaggtggccactaaattcgattggctggactgagctgacagcgaggtggtcttaatattggtcgtcttcaggtggccgccaatggagcagctgctgctccacctgccaccctgatagtgcttctggtggtgctccttctgattgtactggatgccgcattgccgtaacccctgaccctgcgatgataccgtttgattattgtcatcgttgaagctcatatcgtcctcgctgtgtgtgttgtttatggccgtctgcttgagtcgcaccaggtgccgctcggagtacgattttcgtgcatccataactctcagatagtcggaggactcgcccaagtcctcgctcttcgagctgcagtatctggccgaatttctggaggcactgccgttgccgcagaaactggtggtgacactcagcatttgctgactaccactgagcgatctcctgctggcctgtgagctgcttctgctctcgtactgattatcccgcaaggagcatggcgatatcctgggcgagggattgttttccattagggagtcgttgcttttggcgattctgttcttccggtagaacttgctgtctcgccagagggtctgccttccggttcgttgcatttcaatgcaattgccaggctgaccgggggacgtttggctggtgggtgtggccgtgggcgagtcctggccttgacctttgctaatgcggaacgaggcgtgcgtgagctttttgtacttctcgctctgcatattcacgcgattgtccgagtgggtgcgatctgccatcggcagaaaggcattatcgatccgacgctcctcctccaaggagcgaaaggccagccgattcacatgcttcaggtgctgtttgtctgaggttcgcttcggggacatgtcctcgaaggagctcacctggaagggacactaattaagctttcattcacatcgcaagactgttggtaaggtttatatgaatacagtaacagtacaatttaaacattaagttaatatgctagtttagatttagtagaatctaaaaacgtttacttaaatttactcacccgatatttttgtgagaacacctctatcatccccgatcgcttcgagggcgatgtggtgtagatggagttctgatcgttgactagaatcttgggcggatcaaattgctgctggggatgcccttgtccatgaagctgggcctgaccctgacccgcattgctgctggatgctaaggacgagttgctcgaattgctggtggccgttaccaaaatctttggtgaaagcgaaacgggaaactgttggggacgtatatttccgaaggagccacaattagagccagaggaagttgaacccgttcccgacatcgcatcgtcaatgtgcaggaagttgtttggggaactctcgcgacagggcgatgaaatcgccgagtcctgggagaccatactcctaggaatggtggctagttccaggcaggtttcattaccacctgtggtggtggctatgatgacatcctcgacgccctcgtcaatgggcgatgaaatggactgaaagctgctcaacctaatgctggacgatccaatggacaggtcgttgtcagtcagagagccaaaggctgagtcctgggagggattactgcggccatacttgagacacttgagggagtactccaacctcctgctcttcgagttcttgtagttgcacatatcggcagtgagttgatggttgaaggaggccccagcagccgacgaagtgcaggctggagcctgaagcctctgcgttcccgaggagccacttgcctcctcttcctgctcaaaaccctcctcctcctgctcctcgtatacctcgtccgcggctccctcagccagaaggacatccagattgctctgactactggtgctacatcgaatggtcggcggctggggatcctgacccggctcctggctattatcatccgaatagacggccgcagggtcacaataatgaatcggcgactccgaggcatacgagtggacatatgagtgggcggagtgccactgctgcaggcgaagcaagtgctggcgatggcagcttccaccgacgacaatctcttccaggagaccttcctccgaatcgcttgatatgtcaaatgagtccattgttcggctgatactgtggggtcggcaggggacaggtgagtaaatgcgggaattgcgggtaagaaagggcagagaataacaatcagaattttcaaaatttttggttccgatccggcagcgctaccggcccctgattcgattttcttttgtgttgtgtatatgcagaaaagccatggcatgtcattgtatgcgatgaatgcattgatggaattgtgagtatgtctgcgaatgtgtgctgcactagaagcgtcaatacgtgcgtgttttcaatcaagctcaagttggctgctcggcattcaagctcctccaaaactaaattagtgacccgaaaaatggcagctatgctgatgtatagcaatagtttccaagtagatatgcctagtctgtggcacggatatctcaatatgtggtggtgaactcaattaaggagcaaaggtatgatgtactcgtgtaccacagcattagtatctagcctattattcggtagtatttgagcttagtcttaatactattcggaatataaaattaagtttgattaaaaagcattcagtgatttcaaaaccttggcttaatctcagctggtctgcaaaaatattttgcactctatcctctaatccagttaaatggttttctctagagcatgcacgaaacaacataaacataaacatttttattacaagctgaatagatgggacttattgaaaagcgttaagcaaataacttacagcggggaaaacatttaaattgaattatgccagccagaacacgaaaaaccaaagtaaataacagacattgaataatgtggtttgcacatgttaaataaataaatatatattctgctggcccttttcgatgcaggttcggcttagtggtgcgaagtggttttcttgctgggttgtgcagcttctcttggtggttagagcatacaaaaatattgccacttaccacatttggctacaacaaacactgccaattactttttgcagcattaagattcgtt

SEQ ID NO: 40322 - DNA, 2322 bp, DROSOPHILA
atggactcatttgacatatcaagcgattcggaggaaggtctcctggaagagattgtcgtcggtggaagctgccatcgccagcacttgcttcgcctgcagcagtggcactccgcccactcatatgtccactcgtatgcctcggagtcgccgattcattattgtgaccctgcggccgtctattcggatgataatagccaggagccgggtcaggatccccagccgccgaccattcgatgtagcaccagtagtcagagcaatctggatgtccttctggctgagggagccgcggacgaggtatacgaggagcaggaggaggagggttttgagcaggaagaggaggcaagtggctcctcgggaacgcagaggcttcaggctccagcctgcacttcgtcggctgctggggcctccttcaaccatcaactcactgccgatatgtgcaactacaagaactcgaagagcaggaggttggagtactccctcaagtgtctcaagtatggccgcagtaatccctcccaggactcagcctttggctctctgactgacaacgacctgtccattggatcgtccagcattaggttgagcagctttcagtccatttcatcgcccattgacgagggcgtcgaggatgtcatcatagccaccaccacaggtggtaatgaaacctgcctggaactagccaccattcctaggagtatggtctcccaggactcggcgatttcatcgccctgtcgcgagagttccccaaacaacttcctgcacattgacgatgcgatgtcgggaacgggttcaacttcctctggctctaattgtggctccttcggaaatatacgtccccaacagtttcccgtttcgctttcaccaaagattttggtaacggccaccagcaattcgagcaactcgtccttagcatccagcagcaatgcgggtcagggtcaggcccagcttcatggacaagggcatccccagcagcaatttgatccgcccaagattctagtcaacgatcagaactccatctacaccacatcgccctcgaagcgatcggggatgatagaggtgttctcacaaaaatatcgggtgagctccttcgaggacatgtccccgaagcgaacctcagacaaacagcacctgaagcatgtgaatcggctggcctttcgctccttggaggaggagcgtcggatcgataatgcctttctgccgatggcagatcgcacccactcggacaatcgcgtgaatatgcagagcgagaagtacaaaaagctcacgcacgcctcgttccgcattagcaaaggtcaaggccaggactcgcccacggccacacccaccagccaaacgtcccccggtcagcctggcaattgcattgaaatgcaacgaaccggaaggcagaccctctggcgagacagcaagttctaccggaagaacagaatcgccaaaagcaacgactccctaatggaaaacaatccctcgcccaggatatcgccatgctccttgcgggataatcagtacgagagcagaagcagctcacaggccagcaggagatcgctcagtggtagtcagcaaatgctgagtgtcaccaccagtttctgcggcaacggcagtgcctccagaaattcggccagatactgcagctcgaagagcgaggacttgggcgagtcctccgactatctgagagttatggatgcacgaaaatcgtactccgagcggcacctggtgcgactcaagcagacggccataaacaacacacacagcgaggacgatatgagcttcaacgatgacaataatcaaacggtatcatcgcagggtcaggggttacggcaatgcggcatccagtacaatcagaaggagcaccaccagaagcactatcagggtggcaggtggagcagcagctgctccattggcggccacctgaagacgaccaatattaagaccacctcgctgtcagctcagtccagccaatcgaatttagtggccacctcggcaactgccagctatcgcacaccatccaagtccctcgaccagagcatcgccaccatcgccatcccgagcatccatgccaccaaccagaacaacaccgcccagaatagcaccaccaagggcagcagcaccaccagcagtgacagcagtagcagcaccaccagctcggtggatgagtccccgtcgagacataccctcagcggagcggacctctccaggatcttcgtgatggacatggacgatgcaccgggcagtacatgcagcgaagagaagactccgcttctggacagtgtggaaatgtccccgatgagtccaaccgatccagaggaacccgacctggacaagctctaa

SEQ ID NO: 40323 - protein, 773 aa, DROSOPHILA
MDSFDISSDSEEGLLEEIVVGGSCHRQHLLRLQQWHSAHSYVHSYASESPIHYCDPAAVYSDDNSQEPGQDPQPPTIRCSTSSQSNLDVLLAEGAADEVYEEQEEEGFEQEEEASGSSGTQRLQAPACTSSAAGASFNHQLTADMCNYKNSKSRRLEYSLKCLKYGRSNPSQDSAFGSLTDNDLSIGSSSIRLSSFQSISSPIDEGVEDVIIATTTGGNETCLELATIPRSMVSQDSAISSPCRESSPNNFLHIDDAMSGTGSTSSGSNCGSFGNIRPQQFPVSLSPKILVTATSNSSNSSLASSSNAGQGQAQLHGQGHPQQQFDPPKILVNDQNSIYTTSPSKRSGMIEVFSQKYRVSSFEDMSPKRTSDKQHLKHVNRLAFRSLEEERRIDNAFLPMADRTHSDNRVNMQSEKYKKLTHASFRISKGQGQDSPTATPTSQTSPGQPGNCIEMQRTGRQTLWRDSKFYRKNRIAKSNDSLMENNPSPRISPCSLRDNQYESRSSSQASRRSLSGSQQMLSVTTSFCGNGSASRNSARYCSSKSEDLGESSDYLRVMDARKSYSERHLVRLKQTAINNTHSEDDMSFNDDNNQTVSSQGQGLRQCGIQYNQKEHHQKHYQGGRWSSSCSIGGHLKTTNIKTTSLSAQSSQSNLVATSATASYRTPSKSLDQSIATIAIPSIHATNQNNTAQNSTTKGSSTTSSDSSSSTTSSVDESPSRHTLSGADLSRIFVMDMDDAPGSTCSEEKTPLLDSVEMSPMSPTDPEEPDLDKL

SEQ ID NO: 40324 - DNA, 6148 bp, DROSOPHILA
catccggaatcgccatcgccggccaggaagccactgcgcccggtcagttggcaaagtcaagccgcaggccaatgcgggccagggtgaaacttcgtggaaatagacaaaggtagcctgagaaaaaaaatcggttgggcggcttcccaaagctgcgacatgtaaatatttggcgacatttataaaaaatgtttttcgggacagccccgagcttcttttttcgaccgaacgcgaagccttatcaaagcaattatctctaagatgcctcgtcggcgacctgcccgcccattctggttagtaatagagagccacatcgcacagtggaacaagaagtcgtagcaaaaaaaattaaaacgatctattcaaagtcttttcctatacaaaggataattcttaatccttaaattaaaagaaaacactttgtgtaaaaggtttgggttttgatttacagaggtgatcaaaagtatttaaggtcatcaaggttttttttttaatttgttgacaattgaaaaaaagctcgttgtttaaatacttttgaccacctctgtatatttcttgttaccaaatgttaactttccaaccactgtgattcgctgacaatgacagtgaccgtcgtctgcttttgtgaattggaccctccggttgcctttgctgcctttgtttgatttggaacagtaacggagacaaagtacatagcatttctcttgatttgctctatctctttcccggaccaccatttttgcggcggatttggcaaatgccgaaaattgtcaaatgttgcggtcaatttgtggggtcaaagggaagtggaacgaggcgagcttatttaatggtgtttaaaggagaccaggaaatccaaatccctactttttgggggatagcacaaactgcgcttcagctgggttagaagttaatcaaggtgataagagccagtagttaacttattggataaaaaaaggacaattatgacaccacacacatttgctacgtacttatcaagtttattggcagacttaagatttatacaagatcttttaaattcttttctcttaaaataagattatttacatgagcgattgtggttagtttgttctcactgatgatggatcaaccaaagatgttttgcttgatggcagcccaaattccctgaccacgtttcggggtcaactcattctcgatttccttgtgatactgttcccggagcagagggtcactgggtccccaattctttttcggcgtaaaggctccacggatttttgcacccaaagtctgacctggatctcgaacaatggccacgatcatccaaatgggcagctgaagaataccgaaggccgttattagccaaccaattgctgtaaataaaggggtattattgatgagtatctacaatgaacaaccagtactaacagtaagaccaatttggatagacgatattgttgtatgttagaggttggtaggtcgcatagaaatagatcagaataacagtcatgatcagcggggtaatgatgctccagcagagcctccagtacaggcccactttgcgacccagcatgaactcaatgtccttgcacaggcgatctgtgccataaatccatccaatggtgtacagctcggcgattcccagtaccaaagcaatcattgaggcgccgaaaaagtccacaagagtcagcatatactgaccgccctaaaatatacaaaaaaaatagagaatatacgctaaatgtgcaggtatttaatacttaccggtgttatatacattaatccaataaagaaactgactacagcgatgagcagcgagcactgccactgcccaaagttgggaaaccgatcccgaatggcggtcaccgagcaggaggtcatggctatattcgatcctatgcccaacacgaagagcatgaggaagaacagcactgagaagatttgtggcagattcttgaacttggcaatggcatcgggatatgagatgaaggccaatccggcaccgcccttcacaactgagccgatgtcatcggttccgatttcgtgggccagatggccgaggataccgaatatcgtgaatccagctagcagagaggtcatagtgtccagacccgttacaattgctgcatccctgtgtacattgtgcccgaacttgttgaacgaggagtacatgatgatgttgccgaaacaaacggacaaggagtagaaacactgagttacagccgcgtaccaaaccttcgggtccaaaatctttccccattgcggctttataaagtagtatataccgtctattgatcccggcagagttacagctcgcaccagaagaacacccatgatgacgtacgggaaaagggccaggaagtaggatgcctttcccgaactcttcactccgcgacgaataatgaaaaacacacaggaccaggcgataaaaagtccaatgaccaactcccagtttggtaggccgattccttcctcgatatttggtttctcgtgcagcacttccttactacagtggacggatagaatttaatcagcacgaatatcatttaatatagaccaccaccgagtattaaaagttaaacaaaagccattaaaaactaaactaatattttcatgcgactatcattcattactggaaggaagttcaccaaatgaccatcaatatatatgaacttttttataaatgtttttgaaaagtgatttctagaattacattttaaaccttgcaagacaatattagtcatataaatagtcaatttgtgaatttcttaacagtactgtccccgacacttcgaacttacacaaagtaccattccgaactggtgatgacccgatcgttttgtgatttcattgtgtaattttgcgggcgctgatcattgctttccagttgagaccaattactcgcatcgggggctgagttaatgcagtggataccccattccgcacggcatgtggaccagggcaatgggttgcgaaatgattcaatgaaatatcggccaattatcgctaccagggcggcatagtaagtgctgagcatgaacacctggaaagcctggccagctccaacaccttaatccattcgataacaaacgagttacgagaagaaagagtttaaacacaaatcaaatgggatagaagagagttttgggtgctatgatggttggatgattggaaaaaggaagcttaaaacataaattggttagtgagaagccgttggcaagtgttctctgtcatagttaagataagaaatcagtaatttctttagcataatttttaataacattactaacaaaacggattatatactcaaatgtcctaacgattagattagtaaataatgaaagtgttacgtcttgaaaattagctaaaacatttaagtgttagaacttccgtctatttcaggaaatcttagttaatatgaaaatatattttcagtttatatttttgtcgttcaaattatttcttttttaagatatagtgcaagtatttatactgagatcgtgattattgagagagttcaagaaacgcagaattgtatcgtatacgtgtttaaaatatttcaagtttgggtcaaggccatacattgttgttattgagttattcaatctgaaattggatgcagatattgacgatggtgatggctgtcaattgaactgccagtgaatggtatccactttctgtttggctgttgcaatcgcatcggtctattgcagagccactgcaccacaattgatggcaatgggtgccataattgtcgccagagggatgcgggcactcattcaattagtcgggcaataaagcggacattccgcgcctttgtcggccgggccatatacttgagtatgccgttgtgatttcgagttccgagccgcgataagattacccacagtacacagtcacccacacatacccgtaacaccatcgaaaaacatgccactgcaacaccaccaaccaatccacaatgacacaggcaatcggagggcaacaaccacagggagagagaacaaaccacttacagaaaatacaactccgcggatgccactggctgccgctggggcaaactatccatgtccatgggactggccagggactgggaggtgttacccagactggacgctacgcagaaggattcccattccggtcggcactcagaccagggcaacggcgaccggaacgattcgtacagatagcgcagggttatgcccattatggccacatagtaggtggtcaccatggatatagatatcacctggccgattccgacacctatagatgtggtcgcgtatttgggacacgagcgggcgagttgatgaacagaatgacgatgtagattctgcagttcgctattgtcatactcttgttgatatggggtagtttaatattcaaaaaagaattttgattgaactaaatagtttttgatcaaatggtccgtcaggtacacatgcaatattaaatatttttttaagaaactgtattataatacagttataatacacaaatgtaactaaattacaattcaaaaagtatatttaaccaattttaaaggttgcgttgtctttaaaaaggttactttaaatagcttcttttttttctatatctcaatttttaattagtctgaaaaatgttctatccgcacaagagtatgacatcttcgaactgactgcaatgaaatctgggacgcttacctttcatcgccgggcacaaatcgaacactttaaccgagccccgactggaaaactggccaattaccatttccagatagtaaatcggtttgccaatcaggaacaggacaatgagatatggtatgaggaaggcgccaccgccattatcgagggcagtaaaggggaatcgccacacgtttcccagacccacggacatggcgatgcaggacatcagaaactccacgcccttgccccaggtggcacgctcctctggcactttggctgcctcctggtcatcggaattatctcgcagggctggactgttggtctatagaacgatgattagttgggttgtggattatgttcgaaccgtttcacagaaagcctaccgaaatctccactgtgctggccgtactgcgtccgtcgtcgcccacgaaggctagattttggtggttcctttgcgtcgtatccatattgccagtgtaaatctaactgaaattattcgttccgttagcatcgagttgtggactaaaactaagctgaattgtctttaggatgttctttgttgaagctgtataactgacaatcagactaacccactgatcttgtagataagatatgatgtcactgtcacgagccagataaacttagatggttaataagatacaaagagagattcgctgcattgccctttagatactgaaatatggcacttgtctgggcatgataagagatttaaaaatttaatgttctggaaagtttacaaattgtaaaagatattaaacatttctcacctttctcacagcttgtgaaaataattttttcccataaaattatatatatttttgagtggttcaaagattcttagctaatacctattagtttctatttattggaagtaatcgacccagtgtttaaatttgctgaaaaattacgtttgtgtatttataatggcttgaactattatgtgaacgaactgaagataaagtcctttatttaccgaatcacttaagcaatttacaccttgttgcatttacggcacaaagttgttaattggtgtgagagataaaactgctaaaccgtgagtgatataatgatatatgtgtataaatttatatgcatttgtatgcacacaaaatataggtatggttgacttgatgaaccggttgactgttggaaaaatattgacacgtattgtttgcattaattttcaattataaacttgcagtaagggagcacgttttttgattgaaatttggcatgttaaataaaattcattctattgtctcatacaattgtcgaaattgttaagttctctagggatagaatgtcaatataaactttacttctgattaagtaaaagtaactaagaaaatataacattttcaaattattaaatagttccgattatttttcagattgcaccagtgcttgaatatcattatggcaagcaagtgtagatattatagtttaaaatatcaggttatggccacaacgataaattacaagtt

SEQ ID NO: 40325 - DNA, 2062 bp, DROSOPHILA
acggaacgaataatttcagttagatttacactggcaatatggatacgacgcaaaggaaccaccaaaatctagccttcgtgggcgacgacggacgcagtacggccagcacagtggagatttcgaccaacagtccagccctgcgagataattccgatgaccaggaggcagccaaagtgccagaggagcgtgccacctggggcaagggcgtggagtttctgatgtcctgcatcgccatgtccgtgggtctgggaaacgtgtggcgattcccctttactgccctcgataatggcggtggcgccttcctcataccatatctcattgtcctgttcctgattggcaaaccgatttactatctggaaatggtaattggccagttttccagtcggggctcggttaaagtgttcgatttgtgcccggcgatgaaaggtgttggagctggccaggctttccaggtgttcatgctcagcacttactatgccgccctggtagcgataattggccgatatttcattgaatcatttcgcaacccattgccctggtccacatgccgtgcggaatggggtatccactgcattaactcagcccccgatgcgagtaattggtctcaactggaaagcaatgatcagcgcccgcaaaattacacaatgaaatcacaaaacgatcgggtcatcaccagttcggaatggtactttgttaaggaagtgctgcacgagaaaccaaatatcgaggaaggaatcggcctaccaaactgggagttggtcattggactttttatcgcctggtcctgtgtgtttttcattattcgtcgcggagtgaagagttcgggaaaggcatcctacttcctggcccttttcccgtacgtcatcatgggtgttcttctggtgcgagctgtaactctgccgggatcaatagacggtatatactactttataaagccgcaatggggaaagattttggacccgaaggtttggtacgcggctgtaactcagtgtttctactccttgtccgtttgtttcggcaacatcatcatgtactcctcgttcaacaagttcgggcacaatgtacacagggatgcagcaattgtaacgggtctggacactatgacctctctgctagctggattcacgatattcggtatcctcggccatctggcccacgaaatcggaaccgatgacatcggctcagttgtgaagggcggtgccggattggccttcatctcatatcccgatgccattgccaagttcaagaatctgccacaaatcttctcagtgctgttcttcctcatgctcttcgtgttgggcataggatcgaatatagccatgacctcctgctcggtgaccgccattcgggatcggtttcccaactttgggcagtggcagtgctcgctgctcatcgctgtagtcagtttctttattggattaatgtatataacaccgggcggtcagtatatgctgactcttgtggactttttcggcgcctcaatgattgctttggtactgggaatcgccgagctgtacaccattggatggatttatggcacagatcgcctgtgcaaggacattgagttcatgctgggtcgcaaagtgggcctgtactggaggctctgctggagcatcattaccccgctgatcatgactgttattctgatctatttctatgcgacctaccaacctctaacatacaacaatatcgtctatccaaattggtcttactcaattggttggctaataacggccttcggtattcttcagctgcccatttggatgatcgtggccattgttcgagatccaggtcagactttgggtgcaaaaatccgtggagcctttacgccgaaaaagaattggggacccagtgaccctctgctccgggaacagtatcacaaggaaatcgagaatgagttgaccccgaaacgtggtcagggaatttgggctgccatcaagcaaaacatctttggttgatccatcatcagtgagaacaaactaaccacaatcgctcatgtaaataatcttattttaagagaaaagaatttaaaagatcttgtataaatcttaagtctgccaat

SEQ ID NO: 40326 - protein, 639 aa, DROSOPHILA
MDTTQRNHQNLAFVGDDGRSTASTVEISTNSPALRDNSDDQEAAKVPEERATWGKGVEFLMSCIAMSVGLGNVWRFPFTALDNGGGAFLIPYLIVLFLIGKPIYYLEMVIGQFSSRGSVKVFDLCPAMKGVGAGQAFQVFMLSTYYAALVAIIGRYFIESFRNPLPWSTCRAEWGIHCINSAPDASNWSQLESNDQRPQNYTMKSQNDRVITSSEWYFVKEVLHEKPNIEEGIGLPNWELVIGLFIAWSCVFFIIRRGVKSSGKASYFLALFPYVIMGVLLVRAVTLPGSIDGIYYFIKPQWGKILDPKVWYAAVTQCFYSLSVCFGNIIMYSSFNKFGHNVHRDAAIVTGLDTMTSLLAGFTIFGILGHLAHEIGTDDIGSVVKGGAGLAFISYPDAIAKFKNLPQIFSVLFFLMLFVLGIGSNIAMTSCSVTAIRDRFPNFGQWQCSLLIAVVSFFIGLMYITPGGQYMLTLVDFFGASMIALVLGIAELYTIGWIYGTDRLCKDIEFMLGRKVGLYWRLCWSIITPLIMTVILIYFYATYQPLTYNNIVYPNWSYSIGWLITAFGILQLPIWMIVAIVRDPGQTLGAKIRGAFTPKKNWGPSDPLLREQYHKEIENELTPKRGQGIWAAIKQNIFG

SEQ ID NO: 40327 - DNA, 7500 bp, DROSOPHILA
tttaacaaattgcttttgtgcaaattttgtcacatccccagcacaaacaccaatacaaacccactccacccacggatccaaggacatggaaatacagccagatggagcataccaccaccccacatcctgctcagcttcattagtgcactcttggatggttttttctattttcgctagctctttgaagttgcaacaaatctgcaaggcagatacttatatatatatacttatatagcatatactatgaatacttgaccatcgcttgaccggataatcaggccgtgtaatgtgggaaatcagtttttgatttgatcttaatcgaagtctgtcatacagtggtttcagtacagccagaaaaatataaattgaaaggtatatttttataagcagtcttttgggaggaatgtttgaaaagtgtagcccgatttcagggttatgttatgaatatctaaataaaaaccgatcacataactaaaacagaatctcttaaaaggtttgttagctaagcttaggataaacacattaaccggttttaggttttggctaaaaatgaatatgttaaatcggattttaaatcttgtttcgaccttttgcatgctgatgccaaacaaactagcttttaacacactcccagaagccatcagcatcttgagcagttcatattcacatccttggatgcggttcattagatttccgtacgccgtgacttggcttctttttgggtggcttcctgcattgggccatcataaattctaaataaaaagatttgtcataaatttttcggtggctgtcacacacacacacacactgcacgggaattgggattgccttgtgtgtgccggccaaaggagatgaagagctatttacattttgcagcaaggacaacgacaagacgggacttggccactgcaaaggcaatttatcatgaatatttgtcaggcgactgcagcaagcttattttacgcttggacaaacagcgaggacgacacagaacaggactacgaaataacttagctttattcttagatatctacgatctagatgggcatgtggacatggttgttgcattgaggtgggaactatttacaagtactgccagatcagccagatggccagcaccacgccgaggaccaggtccatgggcaggctaaaggtgttccgcctggcgtgctcattgcgtgcgatctcgatgatcttgtgggtggcctggagccactgcttcaccaccgacgcctccgcagccataaaggagtactcctcccgcttggagccgacactagatccgccctcctcctgtttcactagcaggttaatgatcttgttggcattggacgagaccgagtccagtggcctctgcagctccacgtgctcccagttgtagtgctgccggtaggccagccgcttctttcgcacctccgtgcacaccaaacagcgatcgaacaggaacaccttggagcggtactttttccgggtgggaaagtgctgggcgtcgaattccgtcgcacggcggaagtttcccagctgcaggacgtccaactggggaagatgaaaaactagaattagtggccaattccatatcccatagacgctcatgacgcacctcgttgagctcctcgatgttgggtatctcctcggcctgattgaccacatccagagcgcgtcgcatgcgcgtctcgagtttgcaaactgcagtcagcactggcttgcaactaattccacttttgtagaattcctgaaatcgttaagattagttagtaaaggaaagctatgcaaaatctagtcacttaccgatatgaactgctgcaggagcaatggatatctggtcagtctttggatgggctgaactaggaagctgtcgatgcccagcttgtcttttatttgggtttgatatgtctaaaaaggtatttgaaatattaacattttagattaaggatagcgcttgactgggtaactcacctgcaaccacagccgattatcctgtcgcagttgcatagaagacttcttccccatagtgaagctcacatagcaatagaagctatttttctgtaaggtaataaacagcaaaccgtatcataacccatcttaacctcgtcgaaactgggaaaacctttgtgtctgggccatgtgctttattctcgcacttggcacatcgtttgatatatacatatgtgtatattgtactatatacacacacatgccagtttgcctgttggcgaaatcataatttcttaagcatttaagtcacgtaactccggacttgtagagcgggccaagtggtaaggccttggcaaagccagagtgaaaatttggaattcctgtcgctatctgtggccaatgccaatgcaaatattttcccaaaaaaaaaaaaaccgaaactagtgcaaactgcaaagaaaattgtctgtctaacgatttcctttccattttaatttcattagctccgcccgactgcagcatcagaatcagagctcgaagttctgcatttagatgatatgataatcatctctctgcggacttatccataatatttccctttccattttgcatgtctaatgcgatttagctggacaaatgactgccttaaacaattgccgcctcgtctggcgggcgaaaggtgacaatatatatatatacacacatatatatttttgcatattgcaaatttgtctttggtgggcgtgaattttattagcatgaaattgctagctacagtgcattcctcctaatgtagtaattcggactgtctaaagaaaaatgtggttgctttttatatatatctcacacgctgttgtacaatataaatcaaaactagatgtcagctatggttaatggtttttggcgctcatcaaatagttaaccatgtaacagatataatacctaacaataatagcataaatctgttttcttcatgttgttcaatgagtttgcaagcaagaaattagtttttgaagtatttttattgttctcttaacacgcagctgtataaatagaatttatagctacagcggcttccccatcaatataatcttcttttgtttatttcgcagcaaacatctaaaacaatttggatcgccaaatcgattgcatcaatctcagaattccccaacccctttccttcaaccactcaaaagcatccatccgaatgtggtaaaacttttaattgattttccgctggtggctgattcgatttgattgtgagaagtctgatcgacacgcttgtcacttgatgtttttggcaatttaaagccgattaataaatgaaggcgactctatttatggaaacttctgtctttcgagaccaaaaactgattccgaatctccggctggccaagatctagcattcatcaattctaggcctctccaggctagaactaatcgatttggcaattgcttgtgaaaagcctcattaatttgcaaatgacgacgagtcaagaggaaattcatagcacaagtttatatttatcaacgttttggcttcgcctcttttgtttatgcagcatgctgccaaatttgagcagggaaacgtaaaatttttagaaaatatgtataaacaaatcttgagcagtttttatgatatatttagcaaaatattcgcttggctctggtcctgtgagtcagatatgtttgttttggtttggccaaattaaaaaaaaaatgaatgcaaagtggttgcgggtaaaaggaacaaaaaaagtgcaaacaagagcataaatcacatcccaggggcttagcatgtctgtcgaacattaagttcttaagatgccaaatcctcggggtgctcaacaagaatgttacctgcttttggatcagttaataagcttactgtaactccttgcttaatttatattcgggttttctgggaactcgggtatgacataagagaattgcgaccgaacaagaattccacaatgcctcagacaatttccatttcaatttaaattgatcatttgcgttgtcaacactcagctcaacatggccacatggccgctctctagaggcccgaaaaatcattccgaaatgagtacttttaacgagatgatttggggatttctatagctatgtatatctgaatatgctgaaacgccaagccccggacagcaattgtcgactctcctcaccgagaaccgatgacgtcagctgccggcaaatggaaccccagcccagaaaaaaaaaatacaatatagagtctgtttgccctaacaattttcaactgattttcgtaactgagtgtgagcttttgtggctgtgtgttgtgtattttcgtattttattacggcgttctgctgattacttcaatcttatcaggggactttactaagccaacccattcgtcattctgcaagtgatctgggatatacatttgttttttctgtgaaaatcgtttattaattttgcacgacacacgcactggcatatgaatgaatttggcgacacagttgtcgcgaggtgtgagtagaaatatattactaaaaattaaattataatcatcaattgagattctggcacagtttgcataacccacattgacttcatttgcattaagacacgaatcactcggcgttcaaataataaaaataataaaaaagcttaacaaagcaaaagataataaagaaacgagacacgaaatgcaggtgtcaagtccgggcaaaaaataaatgtttaaaaaaagacttatccacttcattatgtgtaaatatttgaggttgaaattaggcaccccaagtgcctacggaagacgaaagaattttgatagatgagatgtcggaacctgtctaacggctacttggctcaacgacacgactttggctaatggacccagcccactcagcatcccctccacaaacatgccccttagctcacctcgaagtgagcagcaaactcatcgaatagacctttgagatcccgctgattgcgcaacatgagcggcagtatctccttctcatgcagctccagtatttccttaatgtttcccagcagcatcttttgtttcgtttcgccactcagggcttctggcaaatcctcgacatccttcagctgtccatagtttagcatacccttcttcagattgttcacatagttcacctccgtctggatgagctcgtcgattatgaagctgatcttcttggaggcatagatctcggtttgatcgcagggaaacagattttccaaggacaatgtgtcctcatcctcgtggctggacaaagtggatggtcattacttagttgccaaatcaattaccaataaacggatatttaggatggctatgacactctcagctgtacttactactcatcgcccagagtctcgaaactgagcgtgtgcgatgggaaggagtggaagccattgggtgctcggtatgttggggatgagttcgctgcggttgttgaacaggtgttgatggaactcaatgagatgccgctggaaacagaacagtaacgaaaacacaagaacagcaagccgtgaatgaggaacacttgaaaatgatgtgggtatataaaagataaatgtgcacaacattaattatattcctaaacacgtactagaactttaaaacttccagatactaagccgcgaccgttgttattttctagtaatactttatataatgtatgcatagtgatattagttatcaactttattgcaaaaaaatgcagatcgtttatagaacaagattagagaaaatacaccatttatcgctttagtgttccacttcctctgtaaaatttctcattgcctgaaatttcttttaacaacttccttcctgcgcctaaaaccaaaaccttaataataaaaacactttgcttatctgaaatcagtcgcgggaattaacttttaacatatttatcatgcatgtcatgaactcaaccactcccgacagcaattaccgtggaaaggcttaaaaataaccggggcgtatacgttatcttatcacgtatacgcacagtaagtggtgtaaaacaagccaaaggtcgtacattcaataatggacaataaattcgatgaaaaaacagcaaacagctgtcagatggtgggacacgttcaaacaaaacattaggttaggtaaacagagggttttatacctacctatcgctgtccagcagacttatttgcttctccaacttgccgttgctcgatgcctgggatttcggtagagtggtggcgattggtgaactgggtgactgggactcaagtaacgggcattctttcgctggtgccttgtccaccacatcgatcgatttgccattatcggcattatcgtcgagtatatgcaagtaaacgttaagaatttgcactagaaatatcacaagaaatgtgagcaccaccgagaccacatcgaacaaatttaatgtgaacaatgacaactccatattggttgatttggtttttttcacagctcactatagactaaaccaccgccgaattcgacgcatatcgatggcaaaacgtgtactatatatggccagtaacagtattacgataccgatccgtagcgaatcaaacgcgaaactcgactgagctaaaattccgctgagtatttgcaaagactgaaaaagcttcagcttcaaaagctcatgacgatcgttctcttttttttgtgccgaatgctcttcaatacaaaaaaagctaaatctgaccacgcgtcgagcattttgtttgtaaacatgaaaaacaatttgaaaccattccgatgtctggcattggattagaattcaacaaagtccgtaacacttttgctttcatcgtggcaataattccgttggatcgtttatgatttcatatttgcatatcaattaggccacgaaggctttggctaatggccgggcaataactgttattatggccactaccacctataatcagcgatttcgatatcgccttgaactttcgggtgcattgaaactggttacctattgtttcgttttatcggttttcggcactctgcgaatggagttataaatcagaaatcagaatagttatacgccagaacgtaaattattttcctacccattaaacgtttaagagtgcaaataatgatgatctcatacagatcatcgggaaaacgataattgtcatttgtatttgtgaatttcaccagttaaattgttcacattttattgtttatacaattgattttgctggacagactgtatcaaaagaattccctgatgaggcaacacaaaaaaataagaattataaataaacaccgagcacttctgggcgcgattgatgagctgcaagtggaatgatgagcatggggatctgatcgggggacccagcaggcaattattgtttgcctatatttatttatatgcgccatttgtatttttttatacattttcttagtgatgtcacaggcgggcgcaagtgccactcagaaacaagttgtttcgctgttttgagtattgcgtgtcgtatcattaacaatattaagagtgatgaggtggtttgcatgaattgtatggatcgttgggtggctgtagatcggagatcgcggggact

SEQ ID NO: 40328 - DNA, 1742 bp, DROSOPHILA
tttgattcgctacggatcggtatcgtaatactgttactggccatatatagtacacgttttgccatcgatatgcgtcgaattcggcggtggtttagtctatagtgagctgtgaaaaaaaccaaatcaaccaatatggagttgtcattgttcacattaaatttgttcgatgtggtctcggtggtgctcacatttcttgtgatatttctagtgcaaattcttaacgtttacttgcatatactcgacgataatgccgataatggcaaatcgatcgatgtggtggacaaggcaccagcgaaagaatgcccgttacttgagtcccagtcacccagttcaccaatcgccaccactctaccgaaatcccaggcatcgagcaacggcaagttggagaagcaaataagtctgctggacagcgatagcggcatctcattgagttccatcaacacctgttcaacaaccgcagcgaactcatccccaacataccgagcacccaatggcttccactccttcccatcgcacacgctcagtttcgagactctgggcgatgagtaccacgaggatgaggacacattgtccttggaaaatctgtttccctgcgatcaaaccgagatctatgcctccaagaagatcagcttcataatcgacgagctcatccagacggaggtgaactatgtgaacaatctgaagaagggtatgctaaactatggacagctgaaggatgtcgaggatttgccagaagccctgagtggcgaaacgaaacaaaagatgctgctgggaaacattaaggaaatactggagctgcatgagaaggagatactgccgctcatgttgcgcaatcagcgggatctcaaaggtctattcgatgagtttgctgctcacttcgagaaaaatagcttctattgctatgtgagcttcactatggggaagaagtcttctatgcaactgcgacaggataatcggctgtggttgcagacatatcaaacccaaataaaagacaagctgggcatcgacagcttcctagttcagcccatccaaagactgaccagatatccattgctcctgcagcagttcatatcggaattctacaaaagtggaattagttgcaagccagtgctgactgcagtttgcaaactcgagacgcgcatgcgacgcgctctggatgtggtcaatcaggccgaggagatacccaacatcgaggagctcaacgagttggacgtcctgcagctgggaaacttccgccgtgcgacggaattcgacgcccagcactttcccacccggaaaaagtaccgctccaaggtgttcctgttcgatcgctgtttggtgtgcacggaggtgcgaaagaagcggctggcctaccggcagcactacaactgggagcacgtggagctgcagaggccactggactcggtctcgtccaatgccaacaagatcattaacctgctagtgaaacaggaggagggcggatctagtgtcggctccaagcgggaggagtactcctttatggctgcggaggcgtcggtggtgaagcagtggctccaggccacccacaagatcatcgagatcgcacgcaatgagcacgccaggcggaacacctttagcctgcccatggacctggtcctcggcgtggtgctggccatctggctgatctggcagtacttgtaaatagttcccacctcaatgcaacaaccatgtccacatgcccatctagatcgtagatatctaagaataaagctaagttatttcgt

SEQ ID NO: 40329 - protein, 508 aa, DROSOPHILA
MELSLFTLNLFDVVSVVLTFLVIFLVQILNVYLHILDDNADNGKSIDVVDKAPAKECPLLESQSPSSPIATTLPKSQASSNGKLEKQISLLDSDSGISLSSINTCSTTAANSSPTYRAPNGFHSFPSHTLSFETLGDEYHEDEDTLSLENLFPCDQTEIYASKKISFIIDELIQTEVNYVNNLKKGMLNYGQLKDVEDLPEALSGETKQKMLLGNIKEILELHEKEILPLMLRNQRDLKGLFDEFAAHFEKNSFYCYVSFTMGKKSSMQLRQDNRLWLQTYQTQIKDKLGIDSFLVQPIQRLTRYPLLLQQFISEFYKSGISCKPVLTAVCKLETRMRRALDVVNQAEEIPNIEELNELDVLQLGNFRRATEFDAQHFPTRKKYRSKVFLFDRCLVCTEVRKKRLAYRQHYNWEHVELQRPLDSVSSNANKIINLLVKQEEGGSSVGSKREEYSFMAAEASVVKQWLQATHKIIEIARNEHARRNTFSLPMDLVLGVVLAIWLIWQYL

SEQ ID NO: 40330 - DNA, 4088 bp, DROSOPHILA
ccgggcaataactgttattatggccactaccacctataatcagcgatttcgatatcgccttgaactttcgggtgcattgaaactggttacctattgtttcgttttatcggttttcggcactctgcgaatggagttataaatcagaaatcagaatagttatacgccagaacgtaaattattttcctacccattaaacgtttaagagtgcaaataatgatgatctcatacagatcatcgggaaaacgataattgtcatttgtatttgtgaatttcaccagttaaattgttcacattttattgtttatacaattgattttgctggacagactgtatcaaaagaattccctgatgaggcaacacaaaaaaataagaattataaataaacaccgagcacttctgggcgcgattgatgagctgcaagtggaatgatgagcatggggatctgatcgggggacccagcaggcaattattgtttgcctatatttatttatatgcgccatttgtatttttttatacattttcttagtgatgtcacaggcgggcgcaagtgccactcagaaacaagttgtttcgctgttttgagtattgcgtgtcgtatcattaacaatattaagagtgatgaggtggtttgcatgaattgtatggatcgttgggtggctgtagatcggagatcgcggggacttggggcagcgaatccgtaacagctgccccacgtctgcttctcatgacaacgccgatggcgtgcgacctttccatgatagattcatttgttttgacgtctgtgaagcgtgtgatttcgctagcggaaagtggaaggaagtgacggttattcctaaaatatggtacacaaatatttccttaattaagagcagtgggaaatcgtgataaaaataataaccgaatcactggtttcattgtatcgcatgtgtattggtttttaatgtgctgtttgattatttaagtatcttcccaattttaaaaaagatatcggtgattttttgaactttccatattatttaaccttttattttttaatccatatctacgaataacaaaaattgcttatccagctaggcacaagtaaacgttcaacgcgttgcgctttttgacaacaataatacaggaatatatacaacttaattaacaagttacacttataattcaatatttggttacttagcattcaaagcgaaaggcgttcgactcccgatctccttgtgccacaaacaatgagcagcaatttgaaacaatttcgaatattgacttggctcaatggcccccgacaattggccgccactggcagctccagatgtaattggactggattccttatacatcgatcctgaactgccgattttcattagccggacaaggatcctctccatgcctgatgtttgttccattccttacgtggccgcataccaagtggtcctattgctgatcgtatcctcgtcagcctttggcattatccagatattgccgattccactatctgagctgaagcgattggagtcgcggtacagcgaaaaactgggtgccttgcgatgcaggtggtcattctctcgagagtagcgttcctgcagcttttggcgctcctcgttggcatagttattgatcatatcccggattaagtccagccagatagcaatctgtacaggatctgcggtgaattcgcattcctgctgctttctgcgctcatagtagagcgtaaaggatttggtcttagccgagatgccaatgtgctcgcagggataacgtccatggaagagcaggttcttgcccttgatctccgtgtagatgatgcacttgtcgaaaataaagaccttagagcgatagctgcgcttcagcttgtgatcgagcacctggaactcgttcaccttccggaatttgccctgatagtagacgttgaactgtgagtggagtgggatagttagaatagtcggatgaggtaagccctataagtaatctctatctacctcatgacaatccacaatatcgttgatgatctccgattcattggtggttgtcagcagggcacgcaggcgcttctccaggcgacaacaggactcgattagtggcttcatcactatgtcacggttcttgaagaaggtctgtgaacaattgggaatcaggttagatgactattaaaaccttccatttagaattactcacattaatgaactgcgtgagcagcaaaggataacgagccatgcgctgaattggttgaaccaggaagctatttatgcccagcttgtcatcgcgttccaggcggatactctgaaaagtgaaatatatatattaatgaaaagtacttgactaattgactagacttgacttacagtaaagtaattcttgtagagatcgcatagcttgagggatttttgcttgttcatggtgaagataacataaccataaaagcaatgttgctaaagattaatatataaaatcagtatattatattatggtatatattaagacaactcacatctaggaattgcagaaactcatcgaacaatcgcttcaaatcgcgtctgttgcgctgcagcatgggtaggaactcatcgcgatggaactcggcgatctgctcgatgtttccaaacagatcgtacttctttccccgcagacccaggggaagatccttgcgctggaagatgttgccatagttctcgatgcccgtgaacaggttattcacgtaggcctcctccgtcttgatcagctcctcgagaatgggatgcacgcacttgtcgctcttatcgcgcagttcgatctcaacctcctcctccctggtaaaaattaaaaatatgattatataaataaaataaataataataggaggtaatactcactcatctttgggttgatagaccgagtgaaacttgcccaccaaatgctcgttggtggtcccaatgatttcagtctttcgcctcggcgtagaacgatagtttctggagaggaagacagattgtaagtcccggttaaatagaactctggctatctacagcttaatgaaaataaccgcccagacaatggcaaaaacaagtgcagcagtgataactgtttagataaaccccccgggagcaggagacatcgggtgagtcagcagtaggagctctagtgataagagcagtgtcaacctttaagcaactgaaaactgatctagataatgtcggagcatacatgcttgcccagccagtgagtgagtcagggaattcaattttcggagacttcagtccggtagctcgggggaaagacgactatcgtcttgatgttctttagtggggccaccaaagatcatcatggattcttcaagcgatttggccgtccaggtgactaccacaagaataaaatccatttgcgagataatgaaccaggagatcattataagaagacccatggacagtgcggtcacaatgaaaccggttatctggaaaaggactttgcaaagttggcagttagtccgtgcgacctggattgtgaatggtacgaaccccggcaaggcagccatccatatcctcaatattaaaatcttcccttcgccagtgggaggaggagctgcttgaaggaccggattccacatccttttccgcctccgaactgccctccctgagaacttcgatcgcgtcgtagtctacatttctttgcgccccttttgttctatacttatcattttctttttccagatcatcagtatatgaggacaaactatcccgatctaaggaacgtgttcgcaatcctctcacttctctatgagaggatcgtgaactggaggccagttcagtgctggctgatctcacggaacgctgggatctgggtgcactcttcacactgtcggcacttccggcatccgtttggttgtcaaatcctttcacgcgtttccttaccggcactgcgggtggaaccctcttcttcctttttcgcggcggaagcggatcatcacgggtgtctgtgctcacggacactccaccgggcgctgtatacactatggcgcgttgttcgcgttcctggagagcctcctcggagatctgacgctcgagcccgggattcgtttgagaactggtactatcctcgtccttcttgggctcatccat

SEQ ID NO: 40331 - DNA, 1654 bp, DROSOPHILA
atgtctcctgctcccgggggaaactatcgttctacgccgaggcgaaagactgaaatcattgggaccaccaacgagcatttggtgggcaagtttcactcggtctatcaacccaaagatgaggaggaggaggttgagatcgaactgcgcgataagagcgacaagtgcgtgcatcccattctcgaggagctgatcaagacggaggaggcctacgtgaataacctgttcacgggcatcgagaactatggcaacatcttccagcgcaaggatcttcccctgggtctgcggggaaagaagtacgatctgtttggaaacatcgagcagatcgccgagttccatcgcgatgagttcctacccatgctgcagcgcaacagacgcgatttgaagcgattgttcgatgagtttctgcaattcctagatcaacattgcttttatggttatgttatcttcaccatgaacaagcaaaaatccctcaagctatgcgatctctacaagaattactttactagtatccgcctggaacgcgatgacaagctgggcataaatagcttcctggttcaaccaattcagcgcatggctcgttatcctttgctgctcacgcagttcattaataccttcttcaagaaccgtgacatagtgatgaagccactaatcgagtcctgttgtcgcctggagaagcgcctgcgtgccctgctgacaaccaccaatgaatcggagatcatcaacgatattgtggattgtcatgagttcaacgtctactatcagggcaaattccggaaggtgaacgagttccaggtgctcgatcacaagctgaagcgcagctatcgctctaaggtctttattttcgacaagtgcatcatctacacggagatcaagggcaagaacctgctcttccatggacgttatccctgcgagcacattggcatctcggctaagaccaaatcctttacgctctactatgagcgcagaaagcagcaggaatgcgaattcaccgcagatcctgtacagattgctatctggctggacttaatccgggatatgatcaataactatgccaacgaggagcgccaaaagctgcaggaacgctactctcgagagaatgaccacctgcatcgcaaggcacccagtttttcgctgtaccgcgactccaatcgcttcagctcagatagtggaatcggcaatatctggataatgccaaaggctgacgaggatacgatcagcaataggaccacttggtatgcggccacgtaaggaatggaacaaacatcaggcatggagaggatccttgtccggctaatgaaaatcggcagttcaggatcgatgtataaggaatccagtccaattacatctggagctgccagtggcggccaattgtcgggggccattgagccaagtcaatattcgaaattgtttcaaattgctgctcattgtttgtggcacaaggagatcgggagtcgaacgcctttcgctttgaatgctaagtaaccaaatattgaattataagtgtaacttgttaattaagttgtatatattcctgtattattgttgtcaaaaagcgcaacgcgttgaacgtttacttgtgcctagctggataagcaatttttgttattcgtagatatggattaaaaaataaaaggttaaataatatggaaagttc

SEQ ID NO: 40332 - protein, 415 aa, DROSOPHILA
MSPAPGGNYRSTPRRKTEIIGTTNEHLVGKFHSVYQPKDEEEEVEIELRDKSDKCVHPILEELIKTEEAYVNNLFTGIENYGNIFQRKDLPLGLRGKKYDLFGNIEQIAEFHRDEFLPMLQRNRRDLKRLFDEFLQFLDQHCFYGYVIFTMNKQKSLKLCDLYKNYFTSIRLERDDKLGINSFLVQPIQRMARYPLLLTQFINTFFKNRDIVMKPLIESCCRLEKRLRALLTTTNESEIINDIVDCHEFNVYYQGKFRKVNEFQVLDHKLKRSYRSKVFIFDKCIIYTEIKGKNLLFHGRYPCEHIGISAKTKSFTLYYERRKQQECEFTADPVQIAIWLDLIRDMINNYANEERQKLQERYSRENDHLHRKAPSFSLYRDSNRFSSDSGIGNIWIMPKADEDTISNRTTWYAAT

SEQ ID NO: 40333 - DNA, 4435 bp, DROSOPHILA
acggagcgaattcaagggctcacccttcagttggcgaatcaggtcttcattattggctcccacggatcgccacgccatgctgaaggcgcggaagaagaagcccagtttaccaatccgcaccacaagattccctttttccaccgtcttgttgttttgtttagtttgttataatattgtaccagaggtggcaggccaacgataacactgacaagcaatcgacacattcaagcagtactcatacatcaactgagttttgggtcgtatgtcctgcatctaataagtttaactcctctgttgaatttatattgaaataatatctgttgaatatatataatatcgatagttgcataacattttcagttcaataaaaatatcactggtcgaactttaataactaaaagtgaacatgctgctatgtacatggatatgtaaaacatctaaacccgtgctgtcactgctgtgcaggtaatattatattaaaattatataaaatatatatacatatatttttttaaactttttttttttaagtttaaatcatttattattatgcattaggaatcgttcagttccttctgaacttaacctaatgtgtagcttaaaagatattatggattctgttccttaattatagtgtacacatatgtaccgtggagagattattgtattctcttcagacgtcggagggaaataaggtcgacaagatcattcgccaacgtgttcgggtgggcgctaagtctgtcggcatatcggctgctgtggaagtttatttggtctcccaatggtatggctgcgtttaagcaatgaattgcatttaatcgtggtccctgccatattcctaatcctttcccgaaaatcgttaaaaagattatatatacttaatttttgcttgagagatatggcggcaatttaaattaagcgcttgattttagtatgaccttgtgctttatcgcctgtcgatatgataaaagcggtttctctggcaatcgaaccgtgcgatcctggccctatttgttatatgtaaacaggatgtccaatgtagggaaaataaagataagatccattgcggatctgcaggccacagtacgagtaaatgtagaaccggacccaacgcccacgatcgagaacagaacgccggacaagaaaagagcgggaagaactcgtgcggcttccacgacaaaaaaggtccgaccaaagacggaagcatgtccaatcatagccagcactgcgttcaagcgttccagcaagaagactccgctgccaggacaaatgcgcatcgatagcttttttacaagtgccgtcaagaactacaaagtcaagtcaagttcctcttgcaggaaggtggatcctccgttggacaagcgaaaggtatctaccaaagggcgcaagcgcctcttcgaggagtctacaacaacctcatctgcctttacgggcaagctggatgcaaagccgtcagagaagcgagtgcagcctagtcgccgtgcgaaaggcaaggagaacgctagcctctccgaagtgcacgtaattgacctgtgctccgaggacgagcagaccataaaaagaaagccatccgcgatagcctctccctgtgaaaaaagcagcgatgtccaagcaaccaagtttagaactccagagacttccatgccagaagccaagctaagcaattccagcctagacctagtggaaatctcccccggtcccaacaaatccccaacgaataacttttaccggtcatcgccggctgcaatcacaaaggaaagccccctgggcaaaaactctaaaaaaggaactgtacgcaaacaaagaaaaccaaagccttgtccgccctataaagtagtggagggtacatccttctgcgtcgacggctttcagtttggggaaatagagggagtcacacattactttctcacgcactttcatgcggatcactacatcggcctgactaaaaagttctgccatcccctctacgtgagtcctatttcagcgcgcttggtgcgaacgtttattaaactcgatgaaacgcacattcacgaaattgatgtggaccagaccctggacgtagatggcgtccaagtaaccgccttagaagctaaccagtaagagcagtcgcttttttttggcagcttaccaaactgctatttctcacctttcagctgtcctggagcactcatgttcttcttcaaactgagctctggcgaatgcatactgcacaccggggacttccgagctagcgcggacatggaatccctaccaatcttctggaaccattcaaacatcgacctgctttatctggacacaacgtatatgaacaaaaactacgacttctgccaccaaagcgagagcgttgaccgagcggtggatctggtgcgcgccttcctagagaaaaatgcagccaaacgaatccttatcgtctgcggctcctacgtgataggaaaggagaagatatggttggccttagcgaaggagttcacaatgagggtttggacggaaagcaatcgcagcactgcagtaagatgcctgaattggccggatctagactccgtgctaacagaagatcgcagcggagcaaacttgcacgtcattgcaatgggaaaaatcagctatccggtaagtgtatttctaaaatatatcaattttttagttagcgatattattttgtttcagagcctagtcgattactttactgaattcgaggaccaatatgacatgttgctgggcataaggcccagcggttgggaaaagaactcaaagccttcgtacggcaagcgaattagcacgatcggcattgagtactcagaacactccagctacaaggagttggagcgctttgttcgcttcctcaagccaaagcgagtcataagcaccgttcccgtgggccgcgatctctatgtcactggagaggtgcccatacggtggtacaagtacgaaggtcgggcatctatgctgcgtactgggtttcagccttcgatatccactttcctagctacgccgaagcgagcttttgcaaaattcagtgcagatactgaaatgttcttgagccccgtggatgagaatgcttccaaagggagtgaagataagaaagacgatgaccgggagtccgtggtgccaacgaatcatgtaactattatatccgacactccggaagagtgttttcaaactgattccaagataccagttaaaaacgagcctctggcaccggacacgtcaccgaattctgaaatagttgcacaactcaatgcgatggaatccgaaattccatatgttgaaatagacattaaaaacgaaactatcgcacctgatgcagtcctcatacctcgtgtcccaacggaagatacatttcaaagtacggattgcaatgttattggtgtccagaaaagccaggcagtcgtggttagtagactgacatccgatgcatcagacgattggctcctgtagtgattaaatttcggataaaaaagtcctttggatttaagtatggctgctagtagttttaagatattttgttatgaaataataaggtatatacatacttatgttcgaaaagggctttagtttctgttaaacttttataatgttttaatatcttttatataaggcttgccttttaaatactttacatatgtattttggttgatatatatatatattcccacactatttagttgcgaaccgtacataatgaaataaattgagttttagtttggaggaaaggaaaccattaaatatgtgctaatgctaataacaatgggcgaccttaactcaagtgctaacgaatgtaaatgagctttgtatttttcacctatatgcattatgatttcattcaaataataaagaaatgtataaaccacttgagcgagtgctttaaaatgatctccttctgatttctgcatactttatgcgaaaacaattgactatacaagcacttgacaaacataagatatttcctaaatatgtaaccatggtatgggtaagtcatcccagaaactagtaatacaagtaattaattattgaatatgaccatttgagttttttggcaaaaaatacatttctaggctccgtgctccgtgattacgatttggaagtatactagacaacaactaagcgcatatacatgatgaaaaagatgagactgtagtaaccggctgctcgatttgatttttggtggggtcggcaggggctgctccatggtcatttagctaaaagtgaagtaagtggctagtaagtgacaatgcgacgaagtaccaatgaatcggcaacctaccaccaagagaagaaagggctcttattttggaagcgctgcgtaaaagagaagaaacgactgccacttgatctgaaatgttagaaaccattattggcctcctataatccggagtcatgaaagtatgatacttaccgctcgacaatcaccgctggcatctggaccagttgcaccggc

SEQ ID NO: 40334 - DNA, 2321 bp, DROSOPHILA
cctggccctatttgttatatgtaaacaggatgtccaatgtagggaaaataaagataagatccattgcggatctgcaggccacagtacgagtaaatgtagaaccggacccaacgcccacgatcgagaacagaacgccggacaagaaaagagcgggaagaactcgtgcggcttccacgacaaaaaaggtccgaccaaagacggaagcatgtccaatcatagccagcactgcgttcaagcgttccagcaagaagactccgctgccaggacaaatgcgcatcgatagcttttttacaagtgccgtcaagaactacaaagtcaagtcaagttcctcttgcaggaaggtggatcctccgttggacaagcgaaaggtatctaccaaagggcgcaagcgcctcttcgaggagtctacaacaacctcatctgcctttacgggcaagctggatgcaaagccgtcagagaagcgagtgcagcctagtcgccgtgcgaaaggcaaggagaacgctagcctctccgaagtgcacgtaattgacctgtgctccgaggacgagcagaccataaaaagaaagccatccgcgatagcctctccctgtgaaaaaagcagcgatgtccaagcaaccaagtttagaactccagagacttccatgccagaagccaagctaagcaattccagcctagacctagtggaaatctcccccggtcccaacaaatccccaacgaataacttttaccggtcatcgccggctgcaatcacaaaggaaagccccctgggcaaaaactctaaaaaaggaactgtacgcaaacaaagaaaaccaaagccttgtccgccctataaagtagtggagggtacatccttctgcgtcgacggctttcagtttggggaaatagagggagtcacacattactttctcacgcactttcatgcggatcactacatcggcctgactaaaaagttctgccatcccctctacgtgagtcctatttcagcgcgcttggtgcgaacgtttattaaactcgatgaaacgcacattcacgaaattgatgtggaccagaccctggacgtagatggcgtccaagtaaccgccttagaagctaaccactgtcctggagcactcatgttcttcttcaaactgagctctggcgaatgcatactgcacaccggggacttccgagctagcgcggacatggaatccctaccaatcttctggaaccattcaaacatcgacctgctttatctggacacaacgtatatgaacaaaaactacgacttctgccaccaaagcgagagcgttgaccgagcggtggatctggtgcgcgccttcctagagaaaaatgcagccaaacgaatccttatcgtctgcggctcctacgtgataggaaaggagaagatatggttggccttagcgaaggagttcacaatgagggtttggacggaaagcaatcgcagcactgcagtaagatgcctgaattggccggatctagactccgtgctaacagaagatcgcagcggagcaaacttgcacgtcattgcaatgggaaaaatcagctatccgagcctagtcgattactttactgaattcgaggaccaatatgacatgttgctgggcataaggcccagcggttgggaaaagaactcaaagccttcgtacggcaagcgaattagcacgatcggcattgagtactcagaacactccagctacaaggagttggagcgctttgttcgcttcctcaagccaaagcgagtcataagcaccgttcccgtgggccgcgatctctatgtcactggagaggtgcccatacggtggtacaagtacgaaggtcgggcatctatgctgcgtactgggtttcagccttcgatatccactttcctagctacgccgaagcgagcttttgcaaaattcagtgcagatactgaaatgttcttgagccccgtggatgagaatgcttccaaagggagtgaagataagaaagacgatgaccgggagtccgtggtgccaacgaatcatgtaactattatatccgacactccggaagagtgttttcaaactgattccaagataccagttaaaaacgagcctctggcaccggacacgtcaccgaattctgaaatagttgcacaactcaatgcgatggaatccgaaattccatatgttgaaatagacattaaaaacgaaactatcgcacctgatgcagtcctcatacctcgtgtcccaacggaagatacatttcaaagtacggattgcaatgttattggtgtccagaaaagccaggcagtcgtggttagtagactgacatccgatgcatcagacgattggctcctgtag

SEQ ID NO: 40335 - protein, 763 aa, DROSOPHILA
MSNVGKIKIRSIADLQATVRVNVEPDPTPTIENRTPDKKRAGRTRAASTTKKVRPKTEACPIIASTAFKRSSKKTPLPGQMRIDSFFTSAVKNYKVKSSSSCRKVDPPLDKRKVSTKGRKRLFEESTTTSSAFTGKLDAKPSEKRVQPSRRAKGKENASLSEVHVIDLCSEDEQTIKRKPSAIASPCEKSSDVQATKFRTPETSMPEAKLSNSSLDLVEISPGPNKSPTNNFYRSSPAAITKESPLGKNSKKGTVRKQRKPKPCPPYKVVEGTSFCVDGFQFGEIEGVTHYFLTHFHADHYIGLTKKFCHPLYVSPISARLVRTFIKLDETHIHEIDVDQTLDVDGVQVTALEANHCPGALMFFFKLSSGECILHTGDFRASADMESLPIFWNHSNIDLLYLDTTYMNKNYDFCHQSESVDRAVDLVRAFLEKNAAKRILIVCGSYVIGKEKIWLALAKEFTMRVWTESNRSTAVRCLNWPDLDSVLTEDRSGANLHVIAMGKISYPSLVDYFTEFEDQYDMLLGIRPSGWEKNSKPSYGKRISTIGIEYSEHSSYKELERFVRFLKPKRVISTVPVGRDLYVTGEVPIRWYKYEGRASMLRTGFQPSISTFLATPKRAFAKFSADTEMFLSPVDENASKGSEDKKDDDRESVVPTNHVTIISDTPEECFQTDSKIPVKNEPLAPDTSPNSEIVAQLNAMESEIPYVEIDIKNETIAPDAVLIPRVPTEDTFQSTDCNVIGVQKSQAVVVSRLTSDASDDWLL

SEQ ID NO: 40336 - DNA, 6482 bp, DROSOPHILA
tcgacagccatggaaaactgaatgcggggtcctgctgagtgggaagctggtatatggaacaggactcaaaaggatatagagctagcttgctttttgtgacatctaacgcactttgcatagcatacatttcagatgcccgtcacgaatagttgaaagtcctgtgtttcaatcgcaaagcgataagaaatattaactgattcggttcgctggatggcaaagcctgtgaatcgggaataaactcttccatatttggaattttgttttgcttaattcagttattcagttagataggtaaaaatcgctcattgaacgcatttgcacattcgaaatttccgcccatttgactttattcacaagttgcccaacaacaggggttagtttcccctgtttccaaataacatgggatcccagatttaaatcgaaagcggcttgccacttaccacatggaatcgcactgctcaaacaacacactctaagctctgattttccatgctcgataaagtgtgccagtgtcagagtgtgtggatatctgtggatttgcacgccaaactgctgatcatcggtgctgtatttgcttttgtatattttcatttccaccgaagctgtgtgcgaatagccatggagtacattggagcacttggagcacatgtagtaaaattctgcccacaggcagaacgagcgggaaaatgtgcaggaagagttgtgtccaactggagtaagctggttctactgctgcaaaacacatttaatgcccggcacaaaagaaatactgaggtccaagttattcggacaaacaccgaacacatttgagtacaaaacagggtggctgaatatgaggataataccttgttatcatggtcactcctttggtaaaagatgcattgcacacaaaattcattttgttagcttatttaaatagtttcttatgaataaacattgatttagttatatccactcgatcgatacttcctcctgagtaaacaaacagaaattattgtttaaacacatcttgattttatttaagcgacatatttgtaattgtaacgtggcttcaataatcttatactaaacttagaaattactccaaacattggtgaaaagcgtaaatacatatacgtatataatacaatgttatgcaatataattgctcgaagttcagaagaaataaatatttcgaatttctttttcattttatttggcacaaaggacttcgctacagctaaggaattttccgagtttttggtttttaagttgccagccgtatggggtttagtttaaggattttttgcgaaaatatttacaagaagaatgcaaaatgtcaagcttgcatttgcatcaactgaaacataaaataaatctggctgccgagtgaaacagtgctttaagagcatttttgttataagcacacaagaatgccaaaagttgcctcggcaacagaagcaaaaaaaaaaaaaaaaaaaccaaaaataaataaaaacaactaaacaaaaattgtattcctatttatttggcatctcgctccgcctctccgtttgttttgtttgcctgagtggaaatataaaaattacttcgtttacatccagcagcaaggatacagcaaggataagcgactaagggagcgagtccaaacgggtcacgcaacattctagacaaagtaataacacttgacgcacgtctgagcttccggcttgtgtccggccggagaacgtgtccacacagagagaaaatttggtgtcttttgattggactgataaactattaagctaaccattgcagcttaatcggaaagaagtcaaaggtttaatatatagcagctaatattaacaataatattaacagtatacgtgagtaagatgacaatgtacaacttggtcatggatttctctctgtgcagctccactgagttcttggagcatgcccatccctcctcaggtggtgaaaactagacgaaactctcctgacgtgttaaattgaatttgagcagcggcgacgccgacgatttggccttggttttgctgccggagctggacatgccactggaattggtctgggtttgtgcctcgggcgtctggtggccactggagaaggatccgcctggcgccggagtagcctgcagcagctgctgctcctgtccatgggcacggagcaattgtcgcgctaactgggatatgtccccgccgtagctgctgtccaggtgctgctgctgctgcgaattggcgggcttaagggccagggattgacgcagcaggtccggcagatgccactgctccaggagctctgctccgagggtcggcgaatcgctggccagccgggtcagggtgtgcagaatggtcttgatggtgcggcgctgggcatcgctttccgcacgtgagccgtaggtttggtagaattccgtttggtacacggacgtgatgaaatttatgatgacgccgttggccaagtggctgtggcacttcttgttcagcgacatgttgtgcagcatcccaacgatttgctcctgtgcggatgaaataaaacagagggcgaaaatgttgatgagcaaaaaataagcaactcaaagtggtctgtgtgtgtatatgtacatcagtatgtattgtatgtatgtatattgcggaatgaaaaatcgtggccaagattgcgaaaaaattgctttgcaaatgcacaaataaattttacgagccggggccccaagaagctttcaataaaattggccaaaaaatttgaaggaaatcgatccggggtaaaacaacccaaggtcaggttcgcttctggggcaaataaataaatagttaggatgtttggcaacacgatacttttggtatttcaataaagcaatggctgattagcagttgaattgttaaatatttactgcgcttaataacacgctgctttaaggattggtaaactaaagcatataaatacttacgtagagaaagacgcttgtgccgcaagtctggtgctccagggtatcaatcagccggaagatggcctcgttggacatgatggagtagtgggaggtggcctccatgcggctcaagttgttcagggcagcggcgcagaggagcagcgtttgggtgcagcattccggctgcaggagggcggccagaccggctaccaaactctcagcacaatccctcagacccggaaccctgtgctccgatccgtgccaagcggcggtaatctgggccagcagcgaaactgcctcccttcgctcgatggctcctctctcgccggcggattccacctgcaggatgtcccttacaatttcgatgcctccacaactgcccagttgattgatcgcttggggagcacagcacaaggtggccagagcccggagtgccaaggccctcacggagctctgcttgtgatccagcacaacgacgagcagggttcgcactgcctcgttttggacgaaggcatcggataacgatgcaaatccatcgtagtcaatgttcatcaaggtggctaccatatttatattggcccgcaatagcaaatcacattgactctgctcaatgctgatcaccaggacgcgaaccagtcgctcaaagatcaaacgcagggtgatcagagtgtgacgcttcaggagctgtacatcgtccagcagggattcgagattgatgtagtgctgtcgctccagcgagtacctcgtatccttgctcaccgttcggatctgctccaagtgctgctcatagcgtctcctttcgatcttggcatcgttgaagaacacacctcgtcgctccagagtggcggtgaagtcgtccaggtgggacagcaactgggtggctccggcaagggcttctggcagagaactggcctgcagtccgctgagaacccgctcgctccgctcgaagtggacttggagcgacagagcctgctgctgcagttgcctgaccaacttgcaaaccgcactggtggtgatggtgtagttcttgtatgcctcctgcgcaatcgatttgtgctgcagggtgcacatcacctccggttcgccggcccagcgctgttccgacatccaactggccacgggttctgggtgcttcttgccccgtttcgcaatcttggacccactttttggtgtgctggtgctagctgtgaaacgcaaggatctgactcttaagggggaaggttgctgctggaggctttcatcctgctcggtggctccaaaagtcaccgtttcattgttgtacggcggtggcgcctcacccaagtaaacagtttcattgttgtacggcggcggtggtggtggtgctatgaccacttcctcctcctcgctggccgaagccgcttccggttccggcatgggtttacgcatcagacgcctgcggcgtcttatggccggacgcggtggtgaatcctcctcggcctctgcctctccatcgtccagcttcatgctatccagctgctcgaacagacgactccgactcgcctccagttccgcatcctcggcatcctcatctcccgacctcgtcttgggcgtaatctggccgctggtgaaggaaattcggcgcgtgacactgatcagcggcgagtagaacgacgagttgcccactcggcgcaccacagttgggggcgtggccaccgaatgtacggatgtgggcgtggccgcgggcgtttgctgcttatcggattgtggcgatggcggggataagttctgctgatgctgcaactgatgcgattcctcattgtccgagaagcccgaatcctgcaaatcacccgaagaaaaacaagaccattagcgcactgaattcgaatggttaaggattttaattaatgtcggattctcgcaaggaactctgtttacactcccaaactttgtagaagcaaaacttctattcagcatatctcattactaaattatatgcagcaaatataattcgattttcatttgatgtatacactttgggctctactccattacataacattactctactataatagttataaaaggaccataatgttagagcgactgctggccaaattgaaatgccccagtcggttcggggtatcaaatgggataccatcgatatgctcacctgactgcgcagactgccggggctatcgtgcttgtgccaggatagcttggagctgttctgctcgtcctccacctcctggatgcaggacagattgcccagggggccgagggatgctggctgtctttgtgggtagttggatgtgctggatgtgctgctcccgccgctgaagctcgaatagaaaccgccgctggtcagggaggactgctcggatccccaccagaccttgctgtagctacgctgaaaggacatgcctgaaatggagaaacagaaacgggcaatcatcagtggtgtccatcatttaaataaattggactcattcgtttaacaggcttaaattcattaaatttgatgcaattgccggtctggctggctggctgggttggaatggaatggaatggactgggactggattcattgccagcacacggatccccaattcgaccattcgtccatgtctttcaggggtcattgccccctttttggggtagcgatggaaagggggcggggcattgcacacacatgcctgaacattggcttaatatccgttacgaaaaaattaaatttccgccaggcgatacaaatcattattttaatcaatgaaatttccaacctgcgaccttgtgaaaaccagcatttctcagtgtagagaattacaattttggttttggagcaatttaaggaacaccaagttttggaggggggccatcaaaatgacatttggcatatggcccagtatatacattagtgtgcaataatttctaaataattgatgtgaatgccccaaattgtgggcatttatgcagattttacagaccaaatctgttgagttacaggcattgccatacaaagggggggcgcaaccacctgccccattttgttggaaatgcaaatgattttcggtggggtttttttttggaaaatgaacaaaacatttggtgtgcggcattcggggctctattatgcaaatggaataaactaattatgctgctaaacaattttcgtgtgacattgcaaaaccgaagagtcgtgttttattttgtttaatttctcgtggtttttgcactttgcagcttacatatttattatactttgttgttttcgccataattacataatataccattcagcaaaagtgggcgtcgtacacttgttggtgtgcaactgtttgttttatgcatgagtgggaaagtttatttttcagttatgcatgcccagtgaactctgacctacctcacacccacctccacctccaccaacgccattcggggccctcgaatggcatttggtcaactggcatggtgactccttccactgcagagcaaatattgacaaagtgcttgtttcaagtaaacaaattgaaataaataaatgacgaaacactttttatgccggcactttcgcacacattaacacactcccacttcggcacacacatatttattgaat

SEQ ID NO: 40337 - DNA, 3719 bp, DROSOPHILA
aatggtcgaattggggatccgtgtgctggcaatgaatccagtcccagtccattccattccattccaacccagccagccagccagaccggcaattgcatcaaatttaatgaatttaagcctgttaaacgaatgagtccaatttatttaaatgatggacaccactgatgattgcccgtttctgtttctccatttcaggcatgtcctttcagcgtagctacagcaaggtctggtggggatccgagcagtcctccctgaccagcggcggtttctattcgagcttcagcggcgggagcagcacatccagcacatccaactacccacaaagacagccagcatccctcggccccctgggcaatctgtcctgcatccaggaggtggaggacgagcagaacagctccaagctatcctggcacaagcacgatagccccggcagtctgcgcagtcaggattcgggcttctcggacaatgaggaatcgcatcagttgcagcatcagcagaacttatccccgccatcgccacaatccgataagcagcaaacgcccgcggccacgcccacatccgtacattcggtggccacgcccccaactgtggtgcgccgagtgggcaactcgtcgttctactcgccgctgatcagtgtcacgcgccgaatttccttcaccagcggccagattacgcccaagacgaggtcgggagatgaggatgccgaggatgcggaactggaggcgagtcggagtcgtctgttcgagcagctggatagcatgaagctggacgatggagaggcagaggccgaggaggattcaccaccgcgtccggccataagacgccgcaggcgtctgatgcgtaaacccatgccggaaccggaagcggcttcggccagcgaggaggaggaagtggtcatagcaccaccaccaccgccgccgtacaacaatgaaactgtttacttgggtgaggcgccaccgccgtacaacaatgaaacggtgacttttggagccaccgagcaggatgaaagcctccagcagcaaccttcccccttaagagtcagatccttgcgtttcacagctagcaccagcacaccaaaaagtgggtccaagattgcgaaacggggcaagaagcacccagaacccgtggccagttggatgtcggaacagcgctgggccggcgaaccggaggtgatgtgcaccctgcagcacaaatcgattgcgcaggaggcatacaagaactacaccatcaccaccagtgcggtttgcaagttggtcaggcaactgcagcagcaggctctgtcgctccaagtccacttcgagcggagcgagcgggttctcagcggactgcaggccagttctctgccagaagcccttgccggagccacccagttgctgtcccacctggacgacttcaccgccactctggagcgacgaggtgtgttcttcaacgatgccaagatcgaaaggagacgctatgagcagcacttggagcagatccgaacggtgagcaaggatacgaggtactcgctggagcgacagcactacatcaatctcgaatccctgctggacgatgtacagctcctgaagcgtcacactctgatcaccctgcgtttgatctttgagcgactggttcgcgtcctggtgatcagcattgagcagagtcaatgtgatttgctattgcgggccaatataaatatggtagccaccttgatgaacattgactacgatggatttgcatcgttatccgatgccttcgtccaaaacgaggcagtgcgaaccctgctcgtcgttgtgctggatcacaagcagagctccgtgagggccttggcactccgggctctggccaccttgtgctgtgctccccaagcgatcaatcaactgggcagttgtggaggcatcgaaattgtaagggacatcctgcaggtggaatccgccggcgagagaggagccatcgagcgaagggaggcagtttcgctgctggcccagattaccgccgcttggcacggatcggagcacagggttccgggtctgagggattgtgctgagagtttggtagccggtctggccgccctcctgcagccggaatgctgcacccaaacgctgctcctctgcgccgctgccctgaacaacttgagccgcatggaggccacctcccactactccatcatgtccaacgaggccatcttccggctgattgataccctggagcaccagacttgcggcacaagcgtctttctctacgagcaaatcgttgggatgctgcacaacatgtcgctgaacaagaagtgccacagccacttggccaacggcgtcatcataaatttcatcacgtccgtgtaccaaacggaattctaccaaacctacggctcacgtgcggaaagcgatgcccagcgccgcaccatcaagaccattctgcacaccctgacccggctggccagcgattcgccgaccctcggagcagagctcctggagcagtggcatctgccggacctgctgcgtcaatccctggcccttaagcccgccaattcgcagcagcagcagcacctggacagcagctacggcggggacatatcccagttagcgcgacaattgctccgtgcccatggacaggagcagcagctgctgcaggctactccggcgccaggcggatccttctccagtggccaccagacgcccgaggcacaaacccagaccaattccagtggcatgtccagctccggcagcaaaaccaaggccaaatcgtcggcgtcgccgctgctcaaattcaatttaacacgtcaggagagtttcgtctagttttcaccacctgaggagggatgggcatgctccaagaactcagtggagctgcacagagagaaatccatgaccaagttgtacattgtcatcttactcacgtatactgttaatattattgttaatattagctgctatatattaaacctttgacttctttccgattaagctgcaatggttagcttaatagtttatcagtccaatcaaaagacaccaaattttctctctgtgtggacacgttctccggccggacacaagccggaagctcagacgtgcgtcaagtgttattactttgtctagaatgttgcgtgacccgtttggactcgctcccttagtcgcttatccttgctgtatccttgctgctggatgtaaacgaagtaatttttatatttccactcaggcaaacaaaacaaacggagaggcggagcgagatgccaaataaataggaatacaatttttgtttagttgtttttatttatttttggtttttttttttttttttttgcttctgttgccgaggcaacttttggcattcttgtgtgcttataacaaaaatgctcttaaagcactgtttcactcggcagccagatttattttatgtttcagttgatgcaaatgcaagcttgacattttgcattcttcttgtaaatattttcgcaaaaaatccttaaactaaaccccatacggctggcaacttaaaaaccaaaaactcggaaaattccttagctgtagcgaagtcctttgtgccaaataaaatgaaaaagaaattcgaaatatttatttcttctgaacttcgagcaattatattgcataacattgtattatatacgtatatgtatttacgcttttcaccaatgtttggagtaatttctaagtttagtataagattattgaagccacgttacaattacaaatatgtcgcttaaataaaatcaagatgtgttt

SEQ ID NO: 40338 - protein, 859 aa, DROSOPHILA
MSFQRSYSKVWWGSEQSSLTSGGFYSSFSGGSSTSSTSNYPQRQPASLGPLGNLSCIQEVEDEQNSSKLSWHKHDSPGSLRSQDSGFSDNEESHQLQHQQNLSPPSPQSDKQQTPAATPTSVHSVATPPTVVRRVGNSSFYSPLISVTRRISFTSGQITPKTRSGDEDAEDAELEASRSRLFEQLDSMKLDDGEAEAEEDSPPRPAIRRRRRLMRKPMPEPEAASASEEEEVVIAPPPPPPYNNETVYLGEAPPPYNNETVTFGATEQDESLQQQPSPLRVRSLRFTASTSTPKSGSKIAKRGKKHPEPVASWMSEQRWAGEPEVMCTLQHKSIAQEAYKNYTITTSAVCKLVRQLQQQALSLQVHFERSERVLSGLQASSLPEALAGATQLLSHLDDFTATLERRGVFFNDAKIERRRYEQHLEQIRTVSKDTRYSLERQHYINLESLLDDVQLLKRHTLITLRLIFERLVRVLVISIEQSQCDLLLRANINMVATLMNIDYDGFASLSDAFVQNEAVRTLLVVVLDHKQSSVRALALRALATLCCAPQAINQLGSCGGIEIVRDILQVESAGERGAIERREAVSLLAQITAAWHGSEHRVPGLRDCAESLVAGLAALLQPECCTQTLLLCAAALNNLSRMEATSHYSIMSNEAIFRLIDTLEHQTCGTSVFLYEQIVGMLHNMSLNKKCHSHLANGVIINFITSVYQTEFYQTYGSRAESDAQRRTIKTILHTLTRLASDSPTLGAELLEQWHLPDLLRQSLALKPANSQQQQHLDSSYGGDISQLARQLLRAHGQEQQLLQATPAPGGSFSSGHQTPEAQTQTNSSGMSSSGSKTKAKSSASPLLKFNLTRQESFV

SEQ ID NO: 40339 - DNA, 2930 bp, DROSOPHILA
tcgtcactgaagtgctgttccgctagtttaatttccgaaatcgcgtgtcgtgccttccggaagatctctgtgcgccgcaggttgttctcccggaccaccacaaagaggtccagcgataagatggccagcaggcacaaggcgggccatagcattcctgtagcgagcagtgctccactagccagcaaactgcttccaatggaaagccatcccagtgggctatcgtaccgcttcacaaaggccgcccgcaattttcgataggggctaggaaagggattggctattatcagtacattccatcgtctatggattgactcacctctccgctccgtattgccgctcgtgctccagttgcacccgtttttcaatctcctcatgtagacgccgcagcgccacctttgtggttagtccacgcagagtgggctccggactagcccgcttctccggactttccgcccgcttcgctgccattttccttgacgtgctcctgcagctgcagttcaagaattcgcctccacctacagcatagtttacaaaatttgcgtctgtttaggtttgggttcggcgatcaagtgttcgcaacagccgtcggcgccgagtacggtcactctagaacaggggtggccattctaacaggttagccactagaaatcggattccactcttatctacataaattgttaggcggtcaaagtaaatgcctgcctatttcgtttgtgcttttcaatatttcaagaaatttaattttctgggaatcttgtaatatagaatttttgctctgaatgcattaataaaaatacggatatgtattgaaattgataaaaaatagaattaagctttactgttgttattttttcagaaattttaaaaaaagctacagactcaccggtcatgcttgttatcgataaccgttatcgatgggtgaataattactgggtcacagtccacggtcacactgtctactacgtattttttgtcgatgtaaacgtttatatattaaacttagcagataataccgatggattccaaactagatgtgagtcaggagctttaaacaggaatttaatctctaatatatgctccaccctactagatgttcgaggacgtgaacacgtcgccttcattggagggcgacatgtcgattccgggcaaaagaaccacaactgcaacgtccgcgagcggagtgccggaatacaatactctggatgagcccatccgcgagacagtgctgagggacattcgggccgtaggcattaagttctaccacgtcctgtaccccaaggagaagtccagtctgctacgagattgtacgtcatcaaatggtttcgttatgcattcgtatgcagttttcttattgtgtttacccgtctttcaggggacctttggggtccactggtgctgtgcaccttcatggccaccatactacaaggctcctccaccgccgacagcatgtctgacaacggacccgagttcgcccaggtcttcgtaatcgtctggataggtgcagccgtagtcacactcaactccaagctgctgggcggcaatatgtgagcatctttgtattattggtatccaattgtttgatcctaacgtactcaatccccatcagctcattcttccaatccgtctgcgtgctgggctactgccttacgccggtggccatttccctaattgtgtgccgggtaatcctgcttgccacccaaacgcggctgctcttctttctgcgttttgtgaccaccaccataggctttgcctgggccacttacggtacgaatatcaattgcatttaatagaacaaacactaattggcgttcctttagcttcctttgttttcctgggtcagagccagcctccccatcgaaaaccgcttgccgtgtaccccatctttctgttcttcttcatcatctcgtggttggttctttcccacaattagtccaatctatgacgcctcgtttagtgattagttcgtaaagaaaacagtgcacgttccatagcgtaaccaaaaaaaaaccgaaaacaattgtacatttctttaagctacaaatccgttttctttattcttaaaatcttaaaagttatctgagttacgaggcatgcatagataatgcatggatatctgggctcacacctccagattgttcgctgaagcggccacctccagggacatctgcatctggacaccgtcgcccttggtgggcctgtaggtcagcgaattggcgcgcgccttgcgtcccatgaagtgtcgttccacccatttcagcagggtgtacacggagtctgtggagggcagtcgatgatccgcagcggtcttcacaatatccgacgatgtcacacggaaagttcgcgccatacccttcagagcctgtgcggataaataataggaataagtaaatcccaggcagctgaaaagaatcctttaaagataacataccaccatggcgtcctcgtctgttagatcgtcacccacatagataatcttgatgcgttcgttccagtccacgccgaaggatgtgcgcaggatgtagatcgaggcacgacccttattccactgcaccggcggacgagcttccagagcgcaatgcgcctccgtggccttgaagccgtacttctcgatcaaggagcgcgccttgtcaaccatagctcccctcagatgattgggcgtctctcggtagtggaacgttagcaacgcccccttattctccacccaagcgccgtcgcggcaaacggaatcctgcagagccttcagcaggtcactgaccttcttttcgtactccatgggcatggggtgtacgaacttgctgccgtccggatgaaggatctctagaccgtgattgcccgcataggttatgccctcgatgccaaccatcttcttgacattgtccacgttgcgacccgagatgacggccacgtagacgtccgagtgattggacagc

SEQ ID NO: 40340 - DNA, 690 bp, DROSOPHILA
tagcagataataccgatggattccaaactagatatgttcgaggacgtgaacacgtcgccttcattggagggcgacatgtcgattccgggcaaaagaaccacaactgcaacgtccgcgagcggagtgccggaatacaatactctggatgagcccatccgcgagacagtgctgagggacattcgggccgtaggcattaagttctaccacgtcctgtaccccaaggagaagtccagtctgctacgagattgggacctttggggtccactggtgctgtgcaccttcatggccaccatactacaaggctcctccaccgccgacagcatgtctgacaacggacccgagttcgcccaggtcttcgtaatcgtctggataggtgcagccgtagtcacactcaactccaagctgctgggcggcaatatctcattcttccaatccgtctgcgtgctgggctactgccttacgccggtggccatttccctaattgtgtgccgggtaatcctgcttgccacccaaacgcggctgctcttctttctgcgttttgtgaccaccaccataggctttgcctgggccacttacgcttcctttgttttcctgggtcagagccagcctccccatcgaaaaccgcttgccgtgtaccccatctttctgttcttcttcatcatctcgtggttggttctttcccacaattag

SEQ ID NO: 40341 - protein, 218 aa, DROSOPHILA
MFEDVNTSPSLEGDMSIPGKRTTTATSASGVPEYNTLDEPIRETVLRDIRAVGIKFYHVLYPKEKSSLLRDWDLWGPLVLCTFMATILQGSSTADSMSDNGPEFAQVFVIVWIGAAVVTLNSKLLGGNISFFQSVCVLGYCLTPVAISLIVCRVILLATQTRLLFFLRFVTTTIGFAWATYASFVFLGQSQPPHRKPLAVYPIFLFFFIISWLVLSHN

SEQ ID NO: 40342 - DNA, 2597 bp, DROSOPHILA
tagttattcgttcttgctagtctctgctctcggcctggtagccacattttcgatacgatgcccagccggagtccgcgtagtcgcctttcggcctggcttgtctgtaattgcaggccgctgtgaccgaaaagtgcagggtgcagggtgccgagtgccgatttccgtgagtggcatcaattgccaattttcgggaactccgcctggcgtttatcgctcaacagcttccgtgatgactcgtttaaagggcagatgctgtggccagtgggcaatgctcctgtattttgtagccccaacgtcggtatttccaaattggtaacaaactcaaatttttcacacacagtttcctttacacacacacttggatttcagccattttttcagctagaggtgggttaacgtcagcgagcgctttcgatatttttgtgccacagacgatttcatttagacggcgataggcgccttatgttgtttaaatcgaaagggtatagattattcggtttcaataagaattgtattggtttctctactccaaatgtcacttctttaaattctgtttaaactgaatcttactacaaaatgctcctggacagtacgcaaaataattatgattgcaaaaaagtactaaaataatgaaaaactaaaagatttaaatataaacataaatcaatttctttatgttaccttcttaaagtttttgaaataataaacagataacgttgaaaatatcgattgttaaaatgtcgatttgaatgaccaaacagatgcaattagtttgatacatttaataatttataattttatatatcaacggtttaatttacgaatatggctttcgagaaatagaaaagcaatttaaaaaagataatctgtgtaatctagtaacctatgatgtcgcgccatatcgattcattgttttttttagtgaaccacccctaatgaacggagcttaaatctaaaaaataaacaatcatctgtgaacttagttgcgcttgcttgcgaaatgcaggcggagattaaggccgacatcatcgtggaggcgatggaggtgctagtgaatcacattctatacgtgcgcggtatatacccctcgcacatttttaaaatgaagcggatgtacaactcgcccatctatgtgtccatatttccaccgcttaataactacctggccggcgtcctaaaatccgcacaagaacttcttcgccgccgggagctgcagtgcctggagctaatagtgtatcagaaggagaatgagaagttggagagctataaaatgcaactagaaacccagaggagtggcctaccggcagaggatcatttgatggagttcgagcagaacatgcgctctgtcatctacaaaatctctcagcgcttaaaccaggcgcctaaactgcccgccggaagttgtcagtttaaggtgcatctgcacactacccaggaggcattcatccgcttcagccatgactcccagtaccaggagtttccctggcttcagacccaaaaaactgaatcccaagcgacagggcgaaccgtttacctccttcctttggctagggtagatgatttgggactgaaaatggatgtcctcatcgttaattaatgttatattcctaaaactgttatccattttatcgaaaactacacgacgttgggtttattttaaactacaattgattctaatcatgaatcgttggctgatccatggtctttctttaatgaataaaaggacgcccaatggttttatggcttaacattagattccttaaataaaaccaattttagtgtcattccgttttgaattataaagactgttgaggttttagaggaagcgtcatatagaattgaccggtactcaagcgaccataatcgtaggcttgtcctctaaagtagaccctggcgttttagatcctcgaacgtctttcggttgacaacgtttcccagcgagtcctcgaactcttcctcctgatcggctacccagcgctcgctctgcttttgcgacttgagtttttcccacaacgtgattgcgtcctcgatctgggtgacattggcgaaatgggcggtgttcggaatgccgaggcatcgcatgccgtgcgcatgccgccactcggcgaagtgtcgttgaaaagccttaggacccttgtaggtgaagtttccacatatctcgcaattatagctaatattcaggccatgcagtttatacaaccagtaggggataggtttaccgtcccatccgagcggcaagttcttgggattgtacggaacgtcgtccgcgtcgggatcatcttcgttgtccgactcgctggcctccacatcgctatcgtcccgctcgccaccagtccgagcctgttttctctgcacattctccttggtagccgctctctgctcagacaacagatccgcgtatttgtagagcagagcctctagctgggcaatctccttgtggcgttcgtgctcccgtgactgggcactagcagtctttgcgctgggcttcttggccatcagtgcgggatccaaggtgcttttaccttttgtagagaataaacgctgtgctcgctcctccagggtgccgccgcacttaagacccagagccaccaaagccg

SEQ ID NO: 40343 - DNA, 597 bp, DROSOPHILA
atgcaggcggagattaaggccgacatcatcgtggaggcgatggaggtgctagtgaatcacattctatacgtgcgcggtatatacccctcgcacatttttaaaatgaagcggatgtacaactcgcccatctatgtgtccatatttccaccgcttaataactacctggccggcgtcctaaaatccgcacaagaacttcttcgccgccgggagctgcagtgcctggagctaatagtgtatcagaaggagaatgagaagttggagagctataaaatgcaactagaaacccagaggagtggcctaccggcagaggatcatttgatggagttcgagcagaacatgcgctctgtcatctacaaaatctctcagcgcttaaaccaggcgcctaaactgcccgccggaagttgtcagtttaaggtgcatctgcacactacccaggaggcattcatccgcttcagccatgactcccagtaccaggagtttccctggcttcagacccaaaaaactgaatcccaagcgacagggcgaaccgtttacctccttcctttggctagggtagatgatttgggactgaaaatggatgtcctcatcgttaattaa

SEQ ID NO: 40344 - protein, 198 aa, DROSOPHILA
MQAEIKADIIVEAMEVLVNHILYVRGIYPSHIFKMKRMYNSPIYVSIFPPLNNYLAGVLKSAQELLRRRELQCLELIVYQKENEKLESYKMQLETQRSGLPAEDHLMEFEQNMRSVIYKISQRLNQAPKLPAGSCQFKVHLHTTQEAFIRFSHDSQYQEFPWLQTQKTESQATGRTVYLLPLARVDDLGLKMDVLIVN

SEQ ID NO: 40345 - DNA, 2423 bp, DROSOPHILA
gtggctaatggctgcacgcaacccagcgagtggccaacttactttcagccatacccgaaaaagaaatttctttcttcacgcgattttgcggtggcaaagccattctttttgccacctccttatggacttagacttccttctttcaaaactgcatcacagccacattagtcagtccatcaccagatgttggacaccttgacgggcactgacaaatgaagcaattgcttgctggcactgggattggtattgggtaaccgcactggggcaataatggcatggaggggccctgagcctcgggcctttgttagacccagactaattgaagccaatgggccaccgagccgagaggctgaagggccataattgagatctgagatcaaaagggcaattggccaaacaaacagtcctccgtatcaccaaagctgcttccaccaattggcatccattcatagcaggtggacttgaaacttgtaatacgtcaaaacaactgcgagggggttcaccgacgaatttccgtaagactttattcatattatcgaatacttcactcgaattatcaatggaattatcaatatggtctgattaccaagagattctttgcgacacgtccagattacccacacccatcaatactgtgaaaatactccacagataacactacggctagataattttccggctataaaagcgccctgtccacaggaatcccacatcagtttcaattcgaatcatgaaggctttcatcgttctggttgccctggcctgtgccgccccagctttcggtcgcaccatggaccgttgctccctggcccgcgagatgtccaacctgggcgttccccgcgaccagctgaacaagtgagcctgcattgccgagcacgagtcctcctaccgcaccggagtggttggtcctgagaactacaacggctccaacgactacggaatcttccagatcaacgactactactggtgcgcaatcgttttaatcggggtcaaaatcagtttagaagcagtcatcgatggacggcaaccatccgctgcagtagtgccaggtggaccaggcggaccatccctgctggctgaggaccttctgggcacaacggacggagtgggtgatgtcgtcggtcaggagagcgttgcagctcaatccgcattcgttgtaggagaagcgaccgctgggaggagcgcaccagtagtagtcgttgatctggaagattccgtagtcgttggagccgttgtagttctcgggaccaaccactccggtgcggtaggaggactcgtgctcggcaatacaggcccaacgagccaattggtcacgaggaacgcccaggttggacatctcgcgggccagggagcaacggtccatggtgcgaccgaaagctggggcggcacaggccagggcaaccagaacgatgaaagccttcatgattcgaattgaaactaatgacgggagggagcgtaggccgtgcttttatagggcggtattatcttaactggtagatcttcacaatgttattatctcaagtgcgccgcgaagtctttagctacttatgtatattatcgcaagtgcacacgagacagtaaataactggctattgcaaatggccagacgcaagctcatcaatctacatcgcttatcagcacctagcaaatggtctcaagccgctccctgaagattcgcaagcatagacgtaggtaaaaagtagattagccccatcccagccagcaagacccttgggtttttagagcaagtggtattaattttctgacttaaacgttggctatccgagccattaaccttgttagcatctccgctagcttttggagtgggcaattacgagtcgttggtgggcagaagctccactttggtgcacctgagtgagctgtaactggacagagagtgcgagctaaaaagaactctatttggtgcgggctggttcatctcttgtaacgggcgtgcgttcaatcgccaagccactggctcttcaaagaccccaaggctaccacacatcatcaacagtcacaacaacctggctgcacattgctttctcggtggatgaagcggatggagtggatggagttggagttgagactcaagtaccgactctgactaacgacccgaccacaagtatgcaaactgcgggctgttacattaaccccattcgtctccgcggggaggggctcttagcggtactcctgggggttaccagtgggcctaaaaccaggcgcgtctggtgggggcaggttgggagcccagatttccactgatttgtgcaatgccaagaaagttgttaacctttcgcgtgtggctaacagcaaagacaaatgacaaaaggcttctgtggaggcattcgaaagacgccagttgcgagatttttgtggaggaaagggaggccccaagacaaagtcgtttcaggtggttggag

SEQ ID NO: 40346 - DNA, 423 bp, DROSOPHILA
atgaaggctttcatcgttctggttgccctggcctgtgccgccccagctttcggtcgcaccatggaccgttgctccctggcccgcgagatgtccaacctgggcgttcctcgtgaccaattggctcgttgggcctgtattgccgagcacgagtcctcctaccgcaccggagtggttggtcccgagaactacaacggctccaacgactacggaatcttccagatcaacgactactactggtgcgctcctcccagcggtcgcttctcctacaacgaatgcggattgagctgcaacgctctcctgaccgacgacatcacccactccgtccgttgtgcccagaaggtcctcagccagcagggatggtccgcctggtccacctggcactactgcagcggatggttgccgtccatcgatgactgcttctaa

SEQ ID NO: 40347 - protein, 140 aa, DROSOPHILA
MKAFIVLVALACAAPAFGRTMDRCSLAREMSNLGVPRDQLARWACIAEHESSYRTGVVGPENYNGSNDYGIFQINDYYWCAPPSGRFSYNECGLSCNALLTDDITHSVRCAQKVLSQQGWSAWSTWHYCSGWLPSIDDCF

SEQ ID NO: 40348 - DNA, 4334 bp, DROSOPHILA
tactgtgaggtgcgtttcgtgttcctttggatgacccgaactacaatactaattccacgggtattcctttcaacagggtcttcaagatgatgtacattgtggcgggcatcctcatcagcaatgcggagatctgcgacacagtggaccgcatccagatagcgccacgcgtcgacctcaagccggaatacgatcacaggtacttgacctccggaggcaatagtcccggctcccgatcccgcacccactctcgacagaattccggaagtggatccggatcggaggaaggatcccccaccaagaggcggagagtcagcgtttccggtatcgcggggggcgtggtcaggggcgtcactagccaggtcaccaagagagtgggccaccgcttcgtctggctatccgacatccggctcattctccggcaatggcgactcctggccctcagcttcaacctctggaccattcccaacttcttggtgcagtgcctcaccagctacatgagcaagaagctgctcatcaatagcgactgtgatatgatctacaagtaggattaggttatgggatattgagtagtaggacagcgcaccgagaggttgcaatttattgttactttagtttttacatagctttaagatttgaataaacaactgctagacatagataaagatacgtgtgcatatttaaaaggtgtatgcgtagtacaattcacttggcttcctttcggaaatacgataagttcttaagatatcggagacttcgcgggtaatataatttgtctagttccctacaatttgatttttaacttgaatattctctgttgagtatatttggttgagatttcataaaaagatttgcctaatatcttgagcttgttaatatattttgtatatatctgtataacatctgtttacacgaaaatattttcatttgccaagtgaattatactgctctgtggtcccgagaatctgttcccttaaggtttcattgctgtccatttccattcctaatctccctccgccgtagagttatccgagttgtccggactgcacggacttccgcctccgccagaagctccacctctcacattcaggctgttgtggagcatgttagcgatgctatccacatccagattctcgtccgtggcggagatctttcgcagtgccgagcagacaatgctgagatcgcctctgagttcgctgaccaccgctgtgatcttcttggcattcgacaggacttcaacactcatcgtgtacgggttgtagcgcactccaaatggccgttggatgctctcggcaaaagctctttaagcaaagaataatttaatttatttgaaatgtggtttccagtgtagccaacgcacctcatttgctccttggcctcctcgaaggaatcggtgtagtagtaggcattctggtaggaggtgatgatgcactcctgctggcacgtcacctccgggtcgaacttctttatcttattctccgccgtaatggcatgctgcaactcggccactgagctcagaagtccggctccatacaccttaaatgtgctgtccgcctgtttgcacagcccaaattccacagtaaagaagtagagctgttaggaaaaacaacgtataaaaagggggaaggattgaatattcttggaatatccaccgtagccaacttctcgatatccgcgtcgcttgcacccaaagatgcaaggccaatctcctgtgaaaactgggcaaaactggagttggccagcaggggcatgtggcccagtagctcgtggcaacagtccctggaaatgcgaataaaacgcagatgagtcagtcaaaaatattcaattggttcttgaaaatcaatctgcaaaatcgtataaaactggagtaacatttcaaatccagctaaaagtatgccttctatgcagatccattgcgaaacagaagcaaataaaagtgtgccacacaattttttcatgattcacaatcttaaacttacattttcgtatactacatattccattcaacttacggttctggtgtgtagaatggatccgaggagtgtcgaatgtactgggtgcagtggaacacgcggaaggcgagtcccgaaaggaagtcccttggggagaggtaacccgccacaggcctgagctggaatcccgtcttgcgcttgagatagacactcacatcctgcaactggggaacgttgtcctcgcggtagccacagtacttctccagctccggccagttgtccatgtactcaggcacagcatgcaacacgtagaggcggtggagctccaagaaaacggtgcccctttgaacgaaaagtttcaagtcgcccacatgaatcgatgctgcggcaatcgaacgcaaatgcaatcaaaaacttaccaggttttcacctcctcaggtgtgtattgcacacgtggaatggggttgccactaaacggggtggtattcaaggagcggagttaagaggattcggctgttgggaaatccattatcacacacttactgcttgaagttgttggcaatggccgagaactgctctcgccgtttacggtacacggggtccttgaatcctggatggtcggcatccaactccgagccgtacatgagcacattctgcgccttgtccaaatcggaaatctttcgcggaaaccacaccatatcgccgaagtctaaattattaatattatgacaacaagttatataaccaacttcctcctagtgagtggggggttattaaaacccaaatcgtttggcaatatgtttccaaaaactcaccaaaactggagcacgccgatagcgacggagccctggccaatccctgcgtgttcacggaagtgtagttcacagaggccacctctcggttgagcatcttgaccacctggtcgagtcgacgctgatcgcactccacatccacgaggacatccgcctggttggtggccatctcaagcggcgatagctccaaatgcagcacattgatgcccagctcctggaaaacctggagggctctggccaggtttcccacctggttacgcagggtgaaaatgatggagatgcgttcgccaggggaatgctgtcttccattatcctgaccaccaccaccgatggccagccttggcggctccggcggagcggaggcgtttctgccgagacttggatgcgagctggagccggatgtggtggaatcctttttaagctggtgcaagggacttccctgcttgacggcccactcctgttcgccactcctgtagagccacaggcccagaagactcttcccggaagcactcatcactgcactgcacttggtagctactcgttttcgatttccgcgggcacacgcgtcgtatgcgcaactcagcgccaactgcaagatccttcggatgcgaaagtccttttataggcagcccgcaggactcgcacacacgcgggcacacaggagatacatattcaattgtatttattaagtgtgcgtggcgagataaattcgttcaaggatataaaagctacaagtgagtttttctgttctattcagaggacccacctccttttagggtggcacgtcctgattggccaaatcatgttggagtcaggacaaatcgctaacgcatgacgtcaccgtgcccttacaaagaaagtccttcttatatttaaagtagtttgttttagtcagcaaatgtaaatatatttttacattctgtattagttataatatattatgtattctatattagttatgtaattacaagaatgaatgaattgtaatatattgaaatgaggaacatatatgagagtatacagatctcggctcataatcgtaatttcactttctaatcagcagcaacagcttccaaccgaatgaggaaaagtcacgggactagggttggtggacagacagccagacattgcgcttgactttcaaattcaggcgtttaatttatgctggtacagcagtaactagtgtaccgtaaggaaaacctagtgaaacccttgttggaatcgggaaactcccgttggataaaatcaatatgaagttaaaagaagtgcagagcgtgcgacattgagagtggtcaaataaatgagttcctaggtagttggccaagtcaagtcgagctataaaggaaaagcgctttccagccaaccacttgatgcttccacagagtcaatagtagataaatggcaatttctttccgcccgcttctttgggcctttgtttgagcttcgagaaaagcaaatagcgccaggggagacggaaaagatgggaaaagcgttgggtgggccgggtggtcaggctgggagccagagtcactgccacttgactattaaaatatgcgaaaggcccactaaacac

SEQ ID NO: 40349 - DNA, 1727 bp, DROSOPHILA
catacgacgcgtgtgcccgcggaaatcgaaaacgagtagctaccaagtgcagtgcagtgatgagtgcttccgggaagagtcttctgggcctgtggctctacaggagtggcgaacaggagtgggccgtcaagcagggaagtcccttgcaccagcttaaaaaggattccaccacatccggctccagctcgcatccaagtctcggcagaaacgcctccgctccgccggagccgccaaggctggccatcggtggtggtggtcaggataatggaagacagcattcccctggcgaacgcatctccatcattttcaccctgcgtaaccaggtgggaaacctggccagagccctccaggttttccaggagctgggcatcaatgtgctgcatttggagctatcgccgcttgagatggccaccaaccaggcggatgtcctcgtggatgtggagtgcgatcagcgtcgactcgaccaggtggtcaagatgctcaaccgagaggtggcctctgtgaactacacttccgtgaacacgcagggattggccagggctccgtcgctatcggcgtgctccagttttgacttcggcgatatggtgtggtttccgcgaaagatttccgatttggacaaggcgcagaatgtgctcatgtacggctcggagttggatgccgaccatccaggattcaaggaccccgtgtaccgtaaacggcgagagcagttctcggccattgccaacaacttcaagcatggcaaccccattccacgtgtgcaatacacacctgaggaggtgaaaacctggggcaccgttttcttggagctccaccgcctctacgtgttgcatgctgtgcctgagtacatggacaactggccggagctggagaagtactgtggctaccgcgaggacaacgttccccagttgcaggatgtgagtgtctatctcaagcgcaagacgggattccagctcaggcctgtggcgggttacctctccccaagggacttcctttcgggactcgccttccgcgtgttccactgcacccagtacattcgacactcctcggatccattctacacaccagaaccggactgttgccacgagctactgggccacatgcccctgctggccaactccagttttgcccagttttcacaggagattggccttgcatctttgggtgcaagcgacgcggatatcgagaagttggctacgctctacttctttactgtggaatttgggctgtgcaaacaggcggacagcacatttaaggtgtatggagccggacttctgagctcagtggccgagttgcagcatgccattacggcggagaataagataaagaagttcgacccggaggtgacgtgccagcaggagtgcatcatcacctcctaccagaatgcctactactacaccgattccttcgaggaggccaaggagcaaatgagagcttttgccgagagcatccaacggccatttggagtgcgctacaacccgtacacgatgagtgttgaagtcctgtcgaatgccaagaagatcacagcggtggtcagcgaactcagaggcgatctcagcattgtctgctcggcactgcgaaagatctccgccacggacgagaatctggatgtggatagcatcgctaacatgctccacaacagcctgaatgtgagaggtggagcttctggcggaggcggaagtccgtgcagtccggacaactcggataactctacggcggagggagattag

SEQ ID NO: 40350 - protein, 555 aa, DROSOPHILA
MSASGKSLLGLWLYRSGEQEWAVKQGSPLHQLKKDSTTSGSSSHPSLGRNASAPPEPPRLAIGGGGQDNGRQHSPGERISIIFTLRNQVGNLARALQVFQELGINVLHLELSPLEMATNQADVLVDVECDQRRLDQVVKMLNREVASVNYTSVNTQGLARAPSLSACSSFDFGDMVWFPRKISDLDKAQNVLMYGSELDADHPGFKDPVYRKRREQFSAIANNFKHGNPIPRVQYTPEEVKTWGTVFLELHRLYVLHAVPEYMDNWPELEKYCGYREDNVPQLQDVSVYLKRKTGFQLRPVAGYLSPRDFLSGLAFRVFHCTQYIRHSSDPFYTPEPDCCHELLGHMPLLANSSFAQFSQEIGLASLGASDADIEKLATLYFFTVEFGLCKQADSTFKVYGAGLLSSVAELQHAITAENKIKKFDPEVTCQQECIITSYQNAYYYTDSFEEAKEQMRAFAESIQRPFGVRYNPYTMSVEVLSNAKKITAVVSELRGDLSIVCSALRKISATDENLDVDSIANMLHNSLNVRGGASGGGGSPCSPDNSDNSTAEGD

SEQ ID NO: 40351 - DNA, 2565 bp, DROSOPHILA
atgctggtacagcagtaactagtgtaccgtaaggaaaacctagtgaaacccttgttggaatcgggaaactcccgttggataaaatcaatatgaagttaaaagaagtgcagagcgtgcgacattgagagtggtcaaataaatgagttcctaggtagttggccaagtcaagtcgagctataaaggaaaagcgctttccagccaaccacttgatgcttccacagagtcaatagtagataaatggcaatttctttccgcccgcttctttgggcctttgtttgagcttcgagaaaagcaaatagcgccaggggagacggaaaagatgggaaaagcgttgggtgggccgggtggtcaggctgggagccagagtcactgccacttgactattaaaatatgcgaaaggcccactaaacacatgcgtgggcagcgcttcaccccaactcatcagctgaggcgattaacttaatggtgctggctaactgattgaccgacaaacgactggctcccaggagccatccactttctatttgcccacgagctaaaggatttatggttgccccaagggatgcaggatgtcccccactccgccgatgtgaaggcagccagacggagatgaagcccggaacggagtcgaggtcacgatgaatggcagctcttgatttcggaataattaacttagacatctaatttgaatgggggtctaaactgtgactcggttttaattcgggaattggaaagggtaatttgatcaacacttaagaaacaacatttacatgtgtctgctttaagaacgtactttttaagattttagagtgtttctgaactatttgtttttttttatatatttatagtatatagtatagtatatatagtatacagtacatagtaattacctttctatatattatgaattcgttgaaaaattgcaatgactaattttgttcgctgtcgcttatctttgatttatttgtccgcacatttctttgtttaattacaaatgtcgtaccagatatttacttttatttatgtatatatcgtgaatcaacgtatcaaaaagtataaacgtataaaaagtgtttattagattgcaaaacaattacattttgaaatgtccatggttaagagacttgaattaaacaaagcaatcatcgatcgggggcaggtatccactgcagtagtgccaggtggaccaggctgaccagccctgttgacccaggacctttagggcacatcttacggaacttttgatgtcatcggtcaagagagcgttgcaactcacatcgcagccattgtgggagaactttccactggacggctggcaccagtacatgtcgttgatctggaaaatgccatagtcgttggatccatcggtgttgggaggccccaccactccggtgcggtaggagctctcgtgctctgcaatgcacgcccacttggacaactggtcacgagaaacacccatattggccatctcgcgcgccagtgagcagcgatccatggtgcgacccaggacagctggagtgactagtgccaggacacagattcctaggagggctctcatggcgaattggttggatgtcgatgaagtactgcgtggctaaagactgttcattcttttatacccggggaaataaaaaaaatctgattaaagataagaactatattctatacaaagaagaaaccagcggttcttattattgagggtattcaactaaatctgggctttctgggcacacctcacagactggatgatgtcgtctttgagcatgtcgttgcagctcgtgtggcaaccgttgtgtgagaactttgaacattggaccggatcacctgagttagtggtaagaaaatttcttaggaaaattataggtacctttagattgtctgatttgactaggcaacagaaaaatgcatatcttgtaggtaagttatggcagactgacgatttccatttccccatttacatttatcagttggggtggcgattacatctcctatcgtatcttataatataaaataatataatataatataatatattataatataatatattataatataatatattataatataatataatataattgctgttttagatagataatgaccaaccttattcataattttataattttctaaattaattgatagatagtttttgtacttttaaaattaattaaataattttcgaaattgcattttgtgaaatgaagactgattcgttcgtacacatttactataaaaatatatgcccgataagaaatccccagccgggggaaatccccattttctagatccgcccctggctgttcgtgccaaagcgcaacagcattgcaattcgcaagtcaccaccattggaaacggggagcggaagtgactcactgcgcaggcgcgcttcctgtcaacccccaggacagagtgaatgccgctgaccccccaacctttgccctgccagcggtaaacaaaaacaagtttggcttaccagcgagagagagagagagaaataaagagagagcttgcggatgacagctgaaagtcccgaatttccctggcttgggcctccac

SEQ ID NO: 40352 - DNA, 565 bp, DROSOPHILA
attcgccatgagagccctcctaggaatctgtgtcctggcactagtcactccagctgtcctgggtcgcaccatggatcgctgctcactggcgcgcgagatggccaatatgggtgtttctcgtgaccagttgtccaagtgggcgtgcattgcagagcacgagagctcctaccgcaccggagtggtggggcctcccaacaccgatggatccaacgactatggcattttccagatcaacgacatgtactggtgccagccgtccagtggaaagttctcccacaatggctgcgatgtgagttgcaacgctctcttgaccgatgacatcaaaagttccgtaagatgtgccctaaaggtcctgggtcaacagggctggtcagcctggtccacctggcactactgcagtggatacctgcccccgatcgatgattgctttgtttaattcaagtctcttaaccatggacatttcaaaatgtaattgttttgcaatctaataaacactttttatacgtttatactttttgatacgttgattcacgatatatacataaataaaagtaaatatctggta

SEQ ID NO: 40353 - protein, 142 aa, DROSOPHILA
MRALLGICVLALVTPAVLGRTMDRCSLAREMANMGVSRDQLSKWACIAEHESSYRTGVVGPPNTDGSNDYGIFQINDMYWCQPSSGKFSHNGCDVSCNALLTDDIKSSVRCALKVLGQQGWSAWSTWHYCSGYLPPIDDCFV

SEQ ID NO: 40354 - DNA, 3526 bp, DROSOPHILA
cattcctcccaagcccaccacctggtctccgtagtgccgttccagacccttgcgaatgcattctacaaagttttcccctccagtgcgctgttttgcggaaattcggagcacttgacctggttttccctcgctgaggaagaggttcaggatcagagcagcacgagattcggtttcgggaatcctttcgagaacacaatcctcattcgctcccctcacagtggccgtgtagcttccttgagtgagttcatcctcttcgtttagcgagaaattaaagatcccctcgcaattggagtgacgaatgggccacggacctgctcccggtccaactgcaaagatctttcctgctccttgggtccgccgagtgatctccttcagattgtagagcttatctcgctgcaccaagggccgcaaatagggtggccctcctgcttctaggagagtggcctttccgcccagtccacgctccacaaggccaaactgggagtcccttaaatccgggcaagcttccacactgacatctacggtccgaaagttctcatccagagcaccctgtatgactggagagcaggtggaaagctttatttgacgtatccgctagatgagaactatttttatcagctattccacgcgggagtgctcacctcttttcagttccgagaggggcggcacatggagtggcctctcctcaaagagcaactgctccgtttgaaggtgactcccgttcatggtatctctgcaaatatttcggtacgggttcagggcctttccttgctggaggtaaactagcgactgaccgaagcaccatcgtttggtaaaaatgtctgtcattcgaacgcctgtcatgataatgttctactgatacagggcttccaatttataaaagtatgtggttttctggtttgagtttctattaaatatactatttataatgacctgttttcaaaataacaaagtactaacctagagaagtaattttagattttgtaaatttggttggccagctagctgataagctattttagtatttgttaagcctgacagggatttgagcagataaaaagactgtttctgttttcgagcttatgttttgtttatttactattatttattgggggttggggcaatggaaaagtcggctacaactagatacggcagataagatctagtcgcgtcccactttgtgagtggccacgggcttatccacccgcaccacccgttcggctacgttcaggtaggcctcgtactcaacgatatccggcgtggtgtcgtaatggtagtgaccgccccagttgctgaaggagaaggagtggaagtgctgcaggcgaaggtccaggtcgtgctccttggtcaccagcgtgcccacggcgttcagctgggcgggcatctcgtagaacttgagccactcgttcacctcctcgtcgctgttgatgggcgtcttgctgaagtcccgcatcacgtgctggtgggcagcgcccttcttgatcagaaaaatgccacccagacccaccaccttgtccccgtagtggttctccaggcccttgcggatgcactcgatgaagttctgttcgccagtgcgctgcttggcggtgattttcaacacctgaccaggcttgccctggctgaggaagaggttgagaagcagggcgcacctgggctctgtgtggggtatcttctccaggacgcactcctcctgctctcccctcacagtggccgtgtagctgccgttcgtgagctcatccttctcgttcacggacaagttgaagatgccctcgcagttggatccccggatgggccaaggtcccgctccggcgcccacggcgaacaccgtgccggggccctggatctttcgcgtgatctcggcgatgttgtacagcttatctcgctgcacgaggggcagcagaaagggtgggcctcccgcctccagcagcgtgggcttgccgcccagtccactctccaccaggccgaactgcttggccttcagatccggacaagggcccacactgacattcacattggcgaagttggccgccagggcaccctgtataactgtgagagaggtagggtaaccattagagctttatctcgacctccatctagacgagatatggcaaaagctgagcaaaagctccaccgccaatcatatgtttctgtttctgtttgagatttgctcaatgaaaacagcaaacaaaaaacacagaacgtagaacccaccgaaaaccggctgtggaaagttcggcaccgttctgctgaaggtcatttgcacatggcacgtattgttatctgcgggatcgctgggaaatccaactcgactcaccgttctgcaactctgacaatgggggcacgtacagcggcttctcctcgaagagcagttgctccgtactcagttggttctggctcattttggttggagatgtgtcctagttactttgctccttattgcgattctggcctcgttccgattcaggtttggattcctttctctagcccaccaagtattctagtcgcgctgaggctacctaccgctcgctagatcgttgcaaacacgactgtctgctgaaaccagatggggtctcgttttttaaagttgagtgctcggctcccggtttgccctatagttaacattgctggtacggccggtcggcacagggtgcatccgccgataagataaactcttgtgccgtatttagtttaattagagtcgagatcgagttcttaaggttcctgcggggaggtggagcgatccatcagctctcacgcttaatgcgcatgtcaggaaggcgtatttacggtgcggctatttcgttacagtagcacctccgtttaacgacctatgtcaatgtgaggcacacacttttccatgaatgccacaaaaactttccacttcgttgtcactttcgctgcccgtaaaggttctatagggctcggaccctaaaataactggttgctgctccatttgatggctcacatttacatattctctgtctacaaaagccgccaagaaagttgttgtccccaactgacccataaattaagccaaaccaaatgttttcaaacgacttggttgatggccaattaagaatatctgtttgtggtaggaataggtagtgcggtccacgcagagcacctttcactgtaccccactgataagtccagccctctttcggttggtgtccactgatagtgcccgtggttggatccgcgatcgagttttgtcatttagcggtcacgtttgctacgtcagtgggccgtatcagataagagtgtgtatatgtggtttccatatagccagaatatagttcaattcgggtgttactcgggtcaagccgcaagtgatgggcgaacaaatcgagcaagggcgcgaatttgatgtatggccagctaatgaggtgcagattggctggcctggattctttcgaagaatagatagcgtgccattagatgtgccacgacgaaatgacagcatccacgcctcgcagacgagcactctggttgtccaggatcatgtccaaactggtccatgcaatcc

SEQ ID NO: 40355 - DNA, 1258 bp, DROSOPHILA
cgagcggtaggtagcctcagcgcgactagaatacttggtgggctagagaaaggaatccaaacctgaatcggaacgaggccagaatcgcaataaggagcaaagtaactaggacacatctccaaccaaaatgagccagaaccaactgagtacggagcaactgctcttcgaggagaagccgctgtacgtgcccccattgtcagagttgcagaacgttatacagggtgccctggcggccaacttcgccaatgtgaatgtcagtgtgggcccttgtccggatctgaaggccaagcagttcggcctggtggagagtggactgggcggcaagcccacgctgctggaggcgggaggcccaccctttctgctgcccctcgtgcagcgagataagctgtacaacatcgccgagatcacgcgaaagatccagggccccggcacggtgttcgccgtgggcgccggagcgggaccttggcccatccggggatccaactgcgagggcatcttcaacttgtccgtgaacgagaaggatgagctcacgaacggcagctacacggccactgtgaggggagagcaggaggagtgcgtcctggagaagataccccacacagagcccaggtgcgccctgcttctcaacctcttcctcagccagggcaagcctggtcaggtgttgaaaatcaccgccaagcagcgcactggcgaacagaacttcatcgagtgcatccgcaagggcctggagaaccactacggggacaaggtggtgggtctgggtggcatttttctgatcaagaagggcgctgcccaccagcacgtgatgcgggacttcagcaagacgcccatcaacagcgacgaggaggtgaacgagtggctcaagttctacgagatgcccgcccagctgaacgccgtgggcacgctggtgaccaaggagcacgacctggaccttcgcctgcagcacttccactccttctccttcagcaactggggcggtcactaccattacgacaccacgccggatatcgttgagtacgaggcctacctgaacgtagccgaacgggtggtgcgggtggataagcccgtggccactcacaaagtgggacgcgactagatcttatctgccgtatctagttgtagccgacttttccattgccccaacccccaataaataatagtaaataaacaaaacataagctcgaaaacagaaacagtctttttatctgctcaaatccctgtcaggcttaacaaatactaaaatagcttatcagctagc

SEQ ID NO: 40356 - protein, 322 aa, DROSOPHILA
MSQNQLSTEQLLFEEKPLYVPPLSELQNVIQGALAANFANVNVSVGPCPDLKAKQFGLVESGLGGKPTLLEAGGPPFLLPLVQRDKLYNIAEITRKIQGPGTVFAVGAGAGPWPIRGSNCEGIFNLSVNEKDELTNGSYTATVRGEQEECVLEKIPHTEPRCALLLNLFLSQGKPGQVLKITAKQRTGEQNFIECIRKGLENHYGDKVVGLGGIFLIKKGAAHQHVMRDFSKTPINSDEEVNEWLKFYEMPAQLNAVGTLVTKEHDLDLRLQHFHSFSFSNWGGHYHYDTTPDIVEYEAYLNVAERVVRVDKPVATHKVGRD

SEQ ID NO: 40357 - DNA, 14197 bp, DROSOPHILA
tttcattttgagacctccactgtcactggtatgcaaatcacgttcagcttttaatttagtttactatttaataatacgcataattacatacagagtaattgtgtttcgtttttgttttgttttttttttttttgttttgttttttgttttagttggatttaaatttaggcttaaacgatacaagaaagtctattacaagtatgccatgtacgcatgtatgtatatatagtggtatttgtaattgtataatttgtaattggtaatcgtaaaagtaatccattggatgcgtgcactctgaatcggttttaggttttcgattttcggttttgttacgagagacttgagctgcgattttggttaatctggttgcagtgtcagttacaattacagtttactatagtcggggctgatcgttcgatatgctatggatttgtatcgtatggttagatcgagagatagcaacggaagtatactgtctatacacaaaaacaacaacacttacatgagaatagatctacttacatacattcctaaacaattaggcgtaattatgcttaagtacgaactaggctggccaaaaattattgtaacgccacgtggatacttttcgatccaacctcgctggcgatccagtttatacagctgtcgtatacggcaaatgttacgttacgttacgttacgttaatctttaatctaggtctacaattcatgcgggaatagtttcatagttggcttaggtcctagcttcgaataaatcgttagtgctctcgcaagcttcgtttctcgtatacatggtttacattcatcatagtcttttaagtttagtcctggaaatcatgaaacaaataatgcaaacacataaattgtacaattgccctaagcctgggcctaggttttggttatcttataacgcatcgctagcgcagcctcgcaatttgaattcccaacggtcggcttttcacccgtaatccgaaaagctttcgaagcttttcaacaaatttcagtagaccgaattggaattcgaattgtagtgttcgtagttgtgtggcgccatctgtaggtaggaaggaatcgcatttagttcggacgcccgccgccgcagcgctgcgatgctgtggagtgtgtcgttggcgccatctgacggcgactgcatagactgcggaagctgctgctgttgctgtgtgggtgttggtggcgccatcgggtggtgttggtgagtttgctgttgctgatgttggtgagtctgttgttgttgctgctggtgcagcggctgttaaataacagaaatggattaacatttagtgttgattattaaagcttatggtatgttatactttacaggattttgaagtctaagcttttatgaaacttatggttttgaatttttggaaacaagctaattactattatgttgccaaaactttcaaatactgtatgtgatctcattttctttgtattgattacatgtacattattttcttttactttaaatataaaacaagtttatcatattataagtaataaagttgtgttataaatggtgtttcaaaaatttatctacaactcatgtgctataagcacaacaccaattagtttgatttccgcttgcacttcactgtttaaaagctgtgccataaatttgttaaacattcattcatcaacgaaatgttttcatacattttgtgggcacaacttttcgggggcactcaccatgggctcgccgttcagctcgttttggctggagttcggctgcgcggaaagtggcggcggggtcaccgaggagcagctgttcatgttcggcggggtggtggcgctcggcgaaccactgggcccacaactgactccgcccacactgtgctggtacatcatggagtcgcctgcggggaaaattacgagacacataattaataagccgtcgtcaaaattgcacagatgtatgctaagtcattggtttactagaattttgtattcggtgttgtaagtgaatcagaaaagaaatattaaaagcaacatattttgataaatacatcccaggctattaaaataatatcattcaatgtagtattgatttatcaaataagtttagcgacgtggttggttttaacttgattgacaagacttgtacatcttgattatcttatgatatatatcatttttttcgttgtcattttgtgatgtcacccaatgatttgtgccagcaaggcagggcccaaaaaatttaaagccctcaacaaaaagtgtaacaatgaaaactttgctgacggtagcaagagccgaaaaataaaaaaaaaaaacgacatgaacatgtctccaaaatgtcaattagcacaactatacgaaaccaaataaagaagatgaaaaaatgactttgggtattcctgaaaattaaacggctgcctgttaattgatcgagcaaacaggctgcccggagcattataaatgatacgatatgcatatgtttttggggctaccgaaaaccgaaaaaagtgtgatgagttcaaagaaatgagggactcagcggactcggcgtcgtgtttggtcaattgtcgacagaactggaactgaaactggaatcggaacccgttggcatcgaaagcaaagcaaataaattccccggagcaaatatgcgactaaacaaagcgcacccccccgataaataaaatcatgccaggcgaaaaagtgtcaacgctgagccattgtcgtcagcatgcagatggaaaattttcgggcatgtgatcgtcatggtgggggcttctatttgggggcctgacacccagcccacaacctacctagagcattcagaccgtagtgctgatagctgcccgctcccaaggcggaacccatgttaatgcccgagtttaggccactgttcagcgaggacgagagtggcgacgactgattcagctggccaaagcctgggcccatatatacgtatgttccgaaggagcagcagttagtaggggaaatgacagcagttagtaagggattgttagttggtagcgcccttgccgggctccatgtgctcactcacctgccgtcattggattgacacccacgctccagcgatctccgccaaacattcccgtgccacagagaccatcgcccatggcgatattggttatattggccccaaacggcggaagtccatgggagggcagcagggcgcccggggtgcggaagacattggttgtcttcttgcgcttcttccacttggcacggcggttctggaaccagacctgtaaggataatagcgtaaggagctatagcaactgtgaaatataggggtaaacaacgatacctaagtacttcaactacttgatcactggaattcaagctaatatttccatttgcatcaaaacccacagatttaaaggtagtatttgaattattgtacataattatcttcaaataataacattaatctttaaggggtttcccagcctaatccttaagccgctgacagccctgcgtgtgtgtctgcttgttttcggctttgtgttgggcaaggctccgcccaaaccctcggagttcttccgaagttgctgcctcctacaaacatggtcttaatcgagatcaattaccgccgtgacagtcaaaacatgtctcgacacagccaaacacacacgcacacaaaacacacacacttgcagaaacggcaaccggaccagatttacatgcgcataaattcgatatgtaaatttctcggccgatatgtggaagtggcccacccaccagccgggcaatttggcatctttgactaccgagtgttggctggaccttcgatatgctcttgtcttggggcagggagaggtcgaggcccgtgtcggatgtgcccgcttcaaattggcatttccatatgcataagaacagcggagccgaacaaggtagacacgttgaggttttgacatttacaaggcagcacacaagcactccccccatcaccttctgcagcccactcgactacacaccaccacccacgaacttggacaggtgagctcgtggagttggggccaaaaagggttgcctacatttagaggcaggctgtatccgctcgttgtgtagattgcatggccttctgagttcacagcactaaactttcagccaacgctttcctttcagaatttgtagcattctatttttctgacttcttcgggttgtgataaaaaataaaaacaaagtgccagccgttgaatgactagtgacatggaaacgattttgccaggccatcaggccttcgcatccacatcactcgcagtcgggttgacaacttaaccgttatgcacaaccaaccaaccacccacacaggcactttctggcacacacacacacacacatatgtacataggctatatggctatatagtatttataaatcccagcatttcgtggcaaatcttgagctgtcaccgactgtcggcgtcgactgttcctgtctgagtgcgccagactaatggcaaaggaatacggccaaaatagcgggccaaaagcgagaaagctgggagctggaagcgggaagcgcgggggagttgtgcctgaaagagccaaaaagaaaaatggcaagtttcgagcaaagtaactttgcttgtaaggccttctgatggcctgatggtccccagtgggttcgtcatatgtcggacaacaacagacagaagcagaagctgaagctaaacctaaaacaaaaacccaaccagttcgagcagcaaataaatcgatctcatttcaaaaataagagtgttgtcgaaagtaaatagtttagttagatatattccatttaaaaatatatatattcctcgttacggaggaaaaggatgcagcaaatctgaataagataatctgtatcctgattttatggcatttttagagacatatttttgaaggggagttgctaaatcgtttaacaattccaaatcttaagatctgacttttattttctccgtgtacgtgcccatcccaacagaaacggaactggaactatcgcaggttgttcaggtcggaatatcactcgttttctggatgttacaccagggacgctaatgtgccagattgtgcaagggataatggatgaagaaagggtgggataatggggtgtatctacccgcagatatatacatatatatatatatatttatgcctggggggttgggctgtgtcggcgaccttgacttgtttatgttttttacgtgcttatgcgtcgctctattcattaacttttaatttaataatttgagacaatgtctgactgtctggccttcgttcttgccatctctctctctctctctctctctctctcttcccccatccgtgttgccgtctccctctggcttattgggttcggtaaatttaatttagcttgctgttttattttgctagccacattcgtgtgagagcatttccctactcgaccgcacagacacacccacacaaagaatgcgaacggaagtaggtagaagaagcagagcgaggcggaagcaagaggaagagaaagccaaaagtcattgcctgcttttttggtctaaggctgcgagccattaaattggcataacgtgcatgacgtgcacggcacgtaaataggcgttaaaatgtcggttaaacaaaacatttattttttatgtcttcccgaagagcgttcgtatgtatttgcattattttttggagggtgtgtgtgcgtgtgtgtgtgtgtgtgtgtgtgccaggcaatcccagtttgtatttgtgtggtttttccactgatatgcttctgctcctggcttcttactgcgcgttccttcagttccacccaatttgaacagtgaacccaaacaaaacataaaaaaatagctccttatgtcgcgttaaattgtgtgtctaacggtaattttttaagcctcacccttatgcataaattatcagccgttgagtggctgactttcagccaaaaatcaaatcatacgccttttatacgtttttttttagggaggtattttctagagagaaaggcatgcatatttcatattttgtcagccagcttactaagagacttttgataggtaatcaaacctatattgttttataaaaatacaatattaatgctttttacctatgagaatgccaacaaattgtacaaaatatttgaaaggtatctatctacatctagatacattttaaaatgaaaacttttttctgatttaagaatagcattttcgggtgtaaagagaaaccacctagttcagtctgcaatgccagactcacaaaaaatgaaaaccaaaacaagttggtggtccaaataaaaatttcagccatatgttccatacgaaagcatttccatgtttggacttttaattttcacttcacaactgacacaaacaaaggcagtcacaaaggcggagaagacaccaccagccagcattctgcctggcaaaaggcaaacaaacaactggaaacggggacaggaagggcaactgttgcaaataataaatgagtcaagttcatgaaaaggcaattccttgtggcaggccgcagatattagcacccagaacccaagagcacaacagtagatccagaaatgcccacgaggggcgagcaaatggaggcagaagtcagaaattaagtatcggccaaattacacggatggggggaggaactgcggctgcaaatgggataacaagtgatttgctttgattttatgggctggtggatggtgtcctgcccatccggggtggctggatctaaatctggatctggatctggttgtatatcctattatgatatggggtgggtgtcgcagtagcaggaggggttttttattatgaacctgtctgtttattgggctagtgtcatcgtgaccctcagcttatgattgcagttgcgtgccataatggtatatcatctgtttgtgatcccctcgttgtcgtcttgtttacgatatccgctcggttcgttatgcaacattaattgcacattatgcctaatggccgatttaacagctgtaaggataatcagagcgaacttacaggagcatttttacgtttttacgttttcacatgatttgcatgtgtcaccgagtgcccacatcgatggcaacatagaaaagcactttgccgcactgcaagccgccgcacttgaaaagccaatttcaaaatcgtcgcagttgtgagagctgcagagaaatgcaatcaaaattcgattagccccaatgcaaatattatttgcggggctagttgcagtcgatggaaatcgaaggacaggacatgagcggacaggtggagagcatctcttaataaacgcttgattggcaaaagccagaaagtgcaataatatttttcggctcgtttgcgttgacaatttttgctggccagcattccggcgactgcagattggttattgcctcgctccacgctcctgctccagctgttgttgttgttgttattattcttactgccgctgctggatttgttggggcataatcaaaaatcaattggccaggatattgcttttccttcagtccactctccgccgaccccttggggctgccaagcaaccgaaatataaaatggccactcaacaaagtccacacaaactgtcccctggctggcggcctttgatgtcgtccttgttttttttcttttgttcttcttgactgtgtcttcagcttgagcatctttttattatcattattggtcctatctgtgctttcatatcctggcgagtgcgactccggctctgagtggtttatggaaatcgcttttcggccaatatcttttcattcctgagcgtataaaaaatgcgtataaattcataaaatgccgtctcgacttctgctccccttcgccgtcgcacacgcacaaataccagtcgatttattttatgttatcctttaaatcctgctttacgagtcagccccaacaacacttgccgcgaccccagaaagccaaccaaccacccacccgcacagcctgcctgccaagccaaagcaaagcaaaccacccattcagctcggaattccccagggattggagctccaacccgccgagaccgagtccactatggccgtctctctcccacactcccgcaaccccatctagccgtctctttcggcaaaatatgtcctctgacagacatcatcaaagcgattccttggcctctctttgggtttgccgagaccgagttctgaacttagtgatttatgaaatagtttttcatatatattttgtcaaattttttttgggacttgtgtttttcattttggtcattcattttgtgggttgccggggcaactgcagcctccttacggggcattcagattgggcttcagtttcggaagggggggagggggattgggtttcgatggttggggactccgggggatggtgtccaatgcaacccccgaaaatgttacgctgcattcgtggagcatgcgcagctccaggatgctgccctcggattcgttttgctccagctttacaaagtttttcagcctttttcgcttctattttttttccattttttttttttttttttgtttgggtcgtggagactcttgtcattctatcaatggcagcagcatttggagcagcttatcccagaaaatacccccaatctggcgcacatcccgcaaagtccgtccggcactttggcacgccattttcacacaaacatttcaatgaaaagtatcaacgaaattgcttttggaattgcttcatatgccataaacagaatgcgtgccagatttccttgatgctctttatgtgcattttatggagaatgcgcccccatccattgccaaccatttccaccgccccagttcccagttttattttaaagctcttgctaaatttagcccgtccacttatttgatatggcccccaactcacggctagcacttttcctttttctcttcgcttgcatattttcgtttttggtatttcaattaaagtttaattaaaatttgcgatgccatggttatacagacgcgacccagtcgcctttggaccgacttggagtggttcgctgaaaaatattcgccattttacagtgtccccgtattcccttcactttcagccggtattttaataaagattctcgctttttatgagaatatttcgtctaattttggcaaaacactcgcatattggccgggagtcacatagatatagcagctaatatccccagaatctcagaatctcgttttctccagaatctcgagcagtcggggaatggctattagaggggcattaagcggctcagcaaataaattagttctgtctgaagtcgaggcaataatttatcagtgctcacagtgggcaggcccatgagttcactcatcctggatgggaatgggcactcgtccacttcgctaagcccaatcgatattccctattcctgctgagtcagaaaatgttaaagttgcttgcaaggagcgcatatttgagtactaaaaacagaaaaattctagaatattgtgactctaatttcttaataaatgaaattaaaatacgacattaataataatcgataaagtaactattatatttgaattcactgaaagcaagtaagcaaacttggataaatttagattgcatttgccagaatattgccaggttgctaggcatattattagttttcccaatctcttcctgaattcaccgcattttctgtgagttatcctgggaactggcctttcttggccctggttgctgggcaaattaatcacgtgagaaattcatttagtgcaccggcacccacacacacccaccaacacagacacgtgctgtgccgccgttcgaccttccccacacacccctaacccagccgctaatgttgcaacaatttaataaacaaaccaataaatgttgctgccttcgagacaaagccgaaacaacgaaccactgctgttgacaatgccagatcatgataagtcaatttggtgggccatcttcttggtcacccccatggaaatccccacccggcgaaaaggctgaccccccgcgaggatgtcaccgtgtgacaaacagattgtcctttgcaaattgtgtgtgcacagtgtgaaaacacaaattaacaattgccgggttgctgcccgctgctttcggctattctaatttggcccaaaacgtggaaaatccgattagggaaagcgtggggggaaagctccttaactgcgacttttatttttattaaattatatttaccataaatgccgctccattgtaacccacacgtgtgagtttcccgctcagccactacgcactacgtgagcttcataacttatgcacctgcttaggcctcggaaaatatccttgtgcttccttcacacgcacacacatacaacttggacttgattttcgttggctaatatggacaagcgtttttcgggcatttatcgtgcaaaggatgtgggtatggctgtctttatgccgtcattaactgcaaatccttgtagattgatttagggccagacgtgtgtgtgcatatcgaatgaatgcgagggacgacctcagcggccgcatagccgtgaaagtgtgaaattttcgatgctctaaatgttttatttcgccttcgactgcgaacttaatttatatgctaattttattaaacagcaatcccaaaactaatccaacggcctgacatcctctaagccgcaacgacaacgcaaaatcaagcattaaaacagcaggactacaacaacatggcaacatgggagagcgagagaaaaaaaagagagaaagctgtatgaaactgccgacggcaattctaactgaacatccttctcaactcaccccgcatcctgctgattttacccccccggcaggtgattgcattgtcctttcggacaaccggatctcggggctggcgaagtggttggaaaaaagcattaacgggcaacactgatacgcaattattaaaacaatttatcaaagtaggacacatccggcggcgggcaggacgtgggcaggatcatcatgaaggtgtcgccgccgctgagttgctcactcatggctaattgttttagctagaccagtagttgtagtcgctgtccaagaggcaaaagccaaaagccaaagagccgaatgccccaaactttttgccattcatttacaccgcagagcaattcccgcacatttcggagcacaaatcccaggcaatgagcaaaagcaagcagtgaaagcggaaacggaagcttaaacacaaatttaatgaagcagtaaattcgattgtcgcataaacaaagcccgcccgcatgcaaaaaggaccttcgcggagctgggattggggattcggtggcgaacggtagagagacaaggataatggcagctgcacaggggagctgtgccagccacaaaaggataatgcccattgtgtgtatatatgcatgtgcctgtctgtgtacttgtgtgtgtgtgtgtgtggcacaaactttgcaggcaaaaggaagagcatcctgggcagagactctctctgtgtgtgtgtgggtgtggctgaatgcccgactaaatgtgactttatgtgctttaataaagtataattttgggcgcttaaatggcgttcggcggcgactttcagaccagagcctcgtaaactgttgcaagctggcagaaggatgccccatgccatccgaaatccgaaatccaaatgtccgttgcggttgtgtgcaacacaagtgaaatgtcatgtcgctccaaaaacgaactgagcccgatattccgacagctacgaccactgacaactgtcgagccgcaggacaaaccacgcaaatttagttgatacagtgaaagaaaagatggtttttcaggtaggatcaatgtactcacagctgctgacgaaagttcgttaacaggaaatttaataattataactaaacggtcaaaaggaacaggcctatatttggattgcaatgattgaaaataaatagtcgaaatggtaagtgaaatgtcctcaatattacaagctattaaggcagcttttcttcatgtgaaaatccaaactaatggaaaagtgagcattgaaatagaggcctcagtgtcacattgtctaatattgactgcaatcaatgcaacaagccaattgatgcatgacaggatatttagccatgtccttgcatacatgagcatgaatataaacaaaacctaatagtctattggaattaaaactctgatgcatatgtatgttttaagccctattttgaggcgatttcacgctttttactttttacctatctttcttgcgaagaacaaggattaactcacctgaacgcgggactcagtgaggccaatccgcatggcgatctcctcgcgcatgaagatgtccggatagtgcgtcttcgagaagcagcgctccagctcgttcaactgggcgggcgtgaagcgggtgcggtggcgcttctgcttgtttttgtccaggtgctggaagacagacacgaccagaggtgaaaggataatgagaggattgacctgaacgggtggacgggtcttacaacagtgacgaactaccatactagaaatgcaagctacgcactacgttagggtatacgaattacggtctacagaagttacagttagagtgggtaatagtagtgggttaggagttctacggttctaagtatgaaaatcaaagtacacttacttttgtttatagtttacgtaatacgtatatgattcataaggtacgaatatgattcatggcacatttaattaggttcattacacaattcagaacacacacattcacgtttttggaaacagattttcattggcagattttcgtttcagatttcgaatttcggatcgaattggtttggattgtatttgattttggattttttttttttttttggcatagcagagtagaatttgaaggaaaaaataaacatcgaaaagaacatggattattaaaaaagtttcatattaactaggcgctatgacgcatcctctctcctgccacaaggacactctccctctctcgctctctctctctctcgccttctctttctatatagcgctggcctgctcacctgatcctgttgctgcatgctgttgttgttgttgccgttgccgttgttgttgttgccgtttccgttgccactgcttccgtttccgccgttcagcgcattggaattgtcgcacagaccgccggatatgtgcaggcgtgccacgcccccgcccactggcactccgccggaggatccaccacctcccgctccgccgccaagatcggccaagttggggcccacaggcagttggccaaaactattgacgcccgcgtgcagtgctgtcagcgcggccttgggcagatcacaatccttggggcctgaaatggaaacatgaagttcatacatataatgctatataatcgcagaagactacgacaaaacttatacattaacccatactttaagcttacaaagacatgaccgacggcctttttagacgcacttatcattgaatttatcattaatcgcaccctaatatcgaaatcaattgagcactgtttaactttagatttcaatttcagctggctgggacaaatatctcaataggcctaataaaacttgacttgtcttagattctgcaaacatcgatttatatttttttcacagaataatgatttcctacgtctcgggttggttactggctctgattttcggcaacatactctttttgttgttttcgaatgtattgaaaatgattctgctgcaattggcaatagttattccaccgatctttgcctgtacatacgtttggtatcaatccgcaggtgcaactcgtagcaattcccaattaaacggatacaatgtgcgccgcaaaagagcgagaatgtttccaaatcgtccgatgtcaaatgtgaatgtaagtttgattggcttaatgatttgaaacacgttgcatatgcatatatccacaatatttcgcagatggatttggactaaagcacgcacgcacacgagtttggcaaatgttttgttaaactgttgttgaatttttaaaactgtttcacaattgagatccgcattcgtatatcccgctcaaacggaaaacgtttgtcttttaattaatttcttgattggcgaccgtcgagctaacgaactagaggattgctcacaacgaactgcggcgatcggataaattgaatttttcaacaacctgtcattcagaaggcgaaagatgccaaaaacagtaacgaacgtgagagagcgaagctgagtagaagaaaccgaggtgcgagat

SEQ ID NO: 40358 - DNA, 1047 bp, DROSOPHILA
cccaacttggccgatcttggcggcggagcgggaggtggtggatcctccggcggagtgccagtgggcgggggcgtggcacgcctgcacatatccggcggtctgtgcgacaattccaatgcgctgaacggcggaaacggaagcagtggcaacggaaacggcaacaacaacaacggcaacggcaacaacaacaacagcatgcagcaacaggatcaggtgagcaggccagcgctatatagaaagagaaggcgagagctggacaaaaacaagcagaagcgccaccgcacccgcttcacgcccgcccagttgaacgagctggagcgctgcttctcgaagacgcactatccggacatcttcatgcgcgaggagatcgccatgcggattggcctcactgagtcccgcgttcaggtctggttccagaaccgccgtgccaagtggaagaagcgcaagaagacaaccaatgtcttccgcaccccgggcgccctgctgccctcccatggacttccgccgtttggggccaatataaccaatatcgccatgggcgatggtctctgtggcacgggaatgtttggcggagatcgctggagcgtgggtgtcaatccaatgacggcaggcgactccatgatgtaccagcacagtgtgggcggagtcagttgtgggcccagtggttcgccgagcgccaccaccccgccgaacatgaacagctgctcctcggtgaccccgccgccactttccgcgcagccgaactccagccaaaacgagctgaacggcgagcccatgccgctgcaccagcagcaacaacaacagactcaccaacatcagcaacagcaaactcaccaacaccacccgatggcgccaccaacacccacacagcaacagcagcagcttccgcagtctatgcagtcgccgtcagatggcgccaacgacacactccacagcatcgcagcgctgcggcggcgggcgtccgaactaaatgcgattccttcctacctacagatggcgccacacaactacgaacactacaattcgaattccaattcggtctactga

SEQ ID NO: 40359 - protein, 283 aa, DROSOPHILA
MQQQDQVSRPALYRKRRRELDKNKQKRHRTRFTPAQLNELERCFSKTHYPDIFMREEIAMRIGLTESRVQVWFQNRRAKWKKRKKTTNVFRTPGALLPSHGLPPFGANITNIAMGDGLCGTGMFGGDRWSVGVNPMTAGDSMMYQHSVGGVSCGPSGSPSATTPPNMNSCSSVTPPPLSAQPNSSQNELNGEPMPLHQQQQQQTHQHQQQQTHQHHPMAPPTPTQQQQQLPQSMQSPSDGANDTLHSIAALRRRASELNAIPSYLQMAPHNYEHYNSNSNSVY

SEQ ID NO: 40360 - DNA, 3545 bp, DROSOPHILA
tgtctggatgtccgtcctcaacgccaatgagtcaatattattacggtcgacgcttcacactctccgtgaaattggcaaaagggaaagcggccgcaaacgctggcaaaaatgctttcaattaattaaacacccgaaaagcaaggctataatgagaatgcaatgtgctgtgcaaagtgctctaaagagagatgtttggtcggggaaacccgcagcgggtccctcgatcaactcaatcaacaatgatgccaatttacaggacactcgatgcacgtagcgaaagcttaaatgatgtccaaactttatattatatctttgaaattgttttaaagtcatttgggatctgtaaagttgtctaaagatttgctgtaatacataaaatatatttataatatgattgatacacgtttaatctcttctatttaattcattgtgtgcctttcaaggtcttcagcacatcatcatttttatacatttttagaatatatttcggaaattataaatcaaatttaagccgcatatttttcacgagtgcagtctgcggcatgcagctcattaataatacagataatgtgtttggcggcaatcatttttcggttgcatgccatcgcggtggcattgattaacaccgccaatggtcaacgcaatgtcagacgaaaggcaatgatattgggcgggaaaaggggaattcggttcagtatggtcgtatgaagatgtatggcgaattaatgtatttttggtagtgttttactcggtaaattgcttgttaagttcctgatcgttgaacgagcataattccattcagctgaaatgtaacctgcggtcgattaaatgtcatatgacattttctactgacattctttaaaaacttacagcaaatacgaaacagaactaaagctcttaaaaccgccaagtcatgtgagaccatttgcaacagtgaggcagcctataaaaagcactgtttcccagctcaagcaaatattcaaacaaagccacggacaagatgttaagcaagttttttccccacataaaagaaaagccattgagcgagcgggttaagtcccgagatgccttcatttacttggatcgggtgatgtggtcctttggctggacagagcctgaaaacaaaaggtaatgaaatcaatgtaagcacatatataagtattaaagctaccataatttcccgtaaaggtggatccttccttataaactgtggttagcgttcgtgaacatagtaatgctcatccttctgccgatctcgataagcatcgagtacctccaccgatttaaaaccttctcggcgggggagttccttagttccctcgagattggagtcaacatgtacggaagctcttttaagtgcgccttcaccttgattggattcaagaaaagacaggaagctaaggttttactggatcagctggacaagagatgccttagcgataaggagaggtccactgttcatcgctatgtcgccatgggaaactttttcgatattttgtatcacattttttactccaccttcgtggtaatgaacttcccgtattttctgcttgagagacgccatgcttggcgcatgtactttccatatatcgattccgacgaacagttttacatctccagcatcgccgagtgttttctgatgacggaggccatctacatggatctctgtacggacgtgtgtcccttgatctccatgcttatggctcgatgccacattagcctcctgaaacagcgactgagaaatctccgatcgaagccaggaaggaccgaagatgagtacttggaggagctcaccgagtgcattcgggatcatcgattgctattggagtaaggtgtttcaaatgctacaagaacactgtgtcgcaaagacatagtaaaatgaaatatttgaaacagttttcttctattcctttcctttttattaatggcctttttttatttcttagctatgttgacgcattgcgacccgtcttttcgggaaccatttttgtgcagttcctcctgatcggtactgtactgggtctctcaatgataaatctaatgttcttctcgacattttggactggtgtcgccacttgcctttttatgttcgacgtgtccatggagacgttccccttttgctatttgtgcaacatgattatcgatgactgccaggaaatgtccaattgcctctttcaatcggactggacctctgccgatcgtcgctacaaatccacgttggtatactttcttcacaatcttcagcaacccattactctcacggctggtggagtgtttcctatttccatgcaaacaaatttggctgtgggtgtcaatattttagatatatcattgattttacacctattttaaattactttgttattatagatggtgaagctggcattttctgtggttacggtaattaagcaatttaacttggccgaaaggtttcaataagttgagagggacgagctctgctactattatattatatattatattatattatatatatattattttatattatatattgctgtaccctaataaatatttagtaatatcactgtttttcatatatatcaaactttgtggcgccctcgggtggaagagttttgaaagccagacaaactggaatactgcagtttttcgcaaaggaaggtgcatgggtcggatacaccacaactgtccacttaataaaatgcattattgccaaataactaatgtagttacttacaaaaaaaaaaaccgaaacatataaaagctacaaaaacaaaatatgtgagagaatacaagggaaatgtataattcatacaaactctttaagaagagtttcttggttaattgatcgattttaaacttttttttttacttatattttccttttaggtgtgaaggtgtagtttgtaggtgattgtggtcgaatggaaccatacatttgttaacgttttccccggtgacattcccggaaaacttttagcaaatacgaaacaaagcttaagttcttgaaatcgccaagtcatgtgagaccatttgcaacagtgaggcggcctataaaaagcactgttttccagctcaagcaaataatcaaaaagagccacggacgaaatgttaagccagttctttccccacattaaagaaaagccattgagcgagcgggttaagtcccgagatgccttcgtttacttagatcgggtgatgtggtcctttggctggacagtgcctgaaaacaaaaggtaatgaaatcgatctaagcacatatataagtattaaagcaaccataatttcacgataaggtgggatctacattacaaactgtggtcaactttcgtgacattgttgatatttatccttctgccgatatcggtaagcgttgagtatattcagcggttcaagaccttctcggcgggtgagtttcttagctcaatccagattggcgttaacatgtacggaagcagctttaaaagttatttgaccatgatgggatataagaagagacaggaggctaagatgtcactggatgagctggacaagagatgcgtttgtgatgaggagaggaccat

SEQ ID NO: 40361 - DNA, 1300 bp, DROSOPHILA
atgttaagcaagttttttccccacataaaagaaaagccattgagcgagcgggttaagtcccgagatgccttcatttacttggatcgggtgatgtggtcctttggctggacagagcctgaaaacaaaaggtggatccttccttataaactgtggttagcgttcgtgaacatagtaatgctcatccttctgccgatctcgataagcatcgagtacctccaccgatttaaaaccttctcggcgggggagttccttagttccctcgagattggagtcaacatgtacggaagctcttttaagtgcgccttcaccttgattggattcaagaaaagacaggaagctaaggttttactggatcagctggacaagagatgccttagcgataaggagaggtccactgttcatcgctatgtcgccatgggaaactttttcgatattttgtatcacattttttactccaccttcgtggtaatgaacttcccgtattttctgcttgagagacgccatgcttggcgcatgtactttccatatatcgattccgacgaacagttttacatctccagcatcgccgagtgttttctgatgacggaggccatctacatggatctctgtacggacgtgtgtcccttgatctccatgcttatggctcgatgccacattagcctcctgaaacagcgactgagaaatctccgatcgaagccaggaaggaccgaagatgagtacttggaggagctcaccgagtgcattcgggatcatcgattgctattggactatgttgacgcattgcgacccgtcttttcgggaaccatttttgtgcagttcctcctgatcggtactgtactgggtctctcaatgataaatctaatgttcttctcgacattttggactggtgtcgccacttgcctttttatgttcgacgtgtccatggagacgttccccttttgctatttgtgcaacatgattatcgatgactgccaggaaatgtccaattgcctctttcaatcggactggacctctgccgatcgtcgctacaaatccacgttggtatactttcttcacaatcttcagcaacccattactctcacggctggtggagtgtttcctatttccatgcaaacaaatttggctatggtgaagctggcattttctgtggttacggtaattaagcaatttaacttggccgaaaggtttcaataagttgagagggacgagctctgctactattatattatatattatattatattatatatatattattttatattatatattgctgtaccctaataaatatttagtaata

SEQ ID NO: 40362 - protein, 397 aa, DROSOPHILA
MLSKFFPHIKEKPLSERVKSRDAFIYLDRVMWSFGWTEPENKRWILPYKLWLAFVNIVMLILLPISISIEYLHRFKTFSAGEFLSSLEIGVNMYGSSFKCAFTLIGFKKRQEAKVLLDQLDKRCLSDKERSTVHRYVAMGNFFDILYHIFYSTFVVMNFPYFLLERRHAWRMYFPYIDSDEQFYISSIAECFLMTEAIYMDLCTDVCPLISMLMARCHISLLKQRLRNLRSKPGRTEDEYLEELTECIRDHRLLLDYVDALRPVFSGTIFVQFLLIGTVLGLSMINLMFFSTFWTGVATCLFMFDVSMETFPFCYLCNMIIDDCQEMSNCLFQSDWTSADRRYKSTLVYFLHNLQQPITLTAGGVFPISMQTNLAMVKLAFSVVTVIKQFNLAERFQ

SEQ ID NO: 40363 - DNA, 4191 bp, DROSOPHILA
aataaattgcttttgaagtggggaaacaggttaaaagatctgattttaagctaagtatgtttttcttgtggtgcacatcatcaatagttttaagtgcaaaagatcatttaataaaacctaaggtcgtattaacgaagtttcgtcacagaactaaatgaaatgaaatctgatcatgttcaaattcaatgttacattacttctgcgaaccaactgtcagtttaacaaaaaatagacaaaacccataaacaaacaggcagacagccgaaccattgaagcgccaagggtcaaaagagttgagcttgagatttgaataccatgatgacgggcaccgacgatagtccgttggtggaggagggcggtccgaaagccaaccagtatcgactgaccatttggcacaaggtaatctgaagaccacggacacacacagagagatcatagaacgtactatacaatatatctattgcaccacataattaggttgtgttctttatgctgggactcatctcggcgctgaccatctgcgttctggtcagattgtcgaaccgattggcctccgatgccgaaaagaaggccttgatgcacttccgagaactttcatccggccggaatggtcaccgctttggccactagatgttgttgtttgtccacataccactctatatattttctgtgtgtttgcttttcactgttttggtttgtttgtttgcaaattgcttaaataaagtgctaattgattgatgcgggttgggttatggaactacggtggctagagtgcaaattaaacaacaagcaattagctgaagatcaggaaaagctttgaatcaacttcatctggaggtgtcagacccggggggttattctatttgctatctaagacccgtatcgcctatgtgggcttacgcggcgtatgagtgatgcagtcgttgttctccttctcgcagttggcaatctaaacacatgcatctttactaaaattgtgactttgtaggtctccatttccatgaacgaaccggaaaacctgaaaccacctgccaaatccaacttccgccgttatcttcagtggatcctagcacctgtcctgaccgccatttccggtctgatcctctactaccaagggccttggtatggagtggccacgctatatgccgcattgatatccatactgctggtgcgtccaggatggcgctggttctacattgcagctgttaccacacccagggatactgtgtaagtaacaaggattgggaagttagttccagagtttttttaaaactgtattccttagagccctctttgcctacatccgtgtgctgctcttcattaagcgccaggagcgcaagaacctgaacatcggagacatctttgagtcaaatgtggcccggcagccggataaactggccattgtcagtgagtcccagcagtggaccttccgccaggtgaacgagcattcgaaccgggtggccaacgtgttccacagtcacggctacaaaaagggcgacgtggtgggtctgctgctcgagaatcgcgccgaatttgtagccacctggcttggtctctccaagatcggcgtgatcacgccgctgattaacacaaacctccgtggagcctcactgcagcacagcattaccgtgggccagtgcacggcgctcatttacggcgccagtttccggtcggccgtgatggatatcgccaaggatctgcccgcccacgtcggactgtatcagttcaacgacgagtccaaccaggaggtggtggcttccgagggccttagccagggactggcccagcagttgaacggccttctggagacggcggccaaggataaggtggccgccggcgcttctcgggcggatcatcacgacaagttggtctacatctacacgtcgggcaccacgggcttgcccaaggcagccgtcatcacgcattctcggtaagatttgccactggctgcagtaagtttctcctttacaacgattcctctactttcaggtactttttcatagctgccggcattcactacacgcttggcttcaaggatcaggatgtgttctatactcccttgcccctatatcacaccgctggcggagtgatgagcatgggccaggccttactcttcggctccaccgtggtcataaggaagaaattcagcgcctccggttacttttcagactgcgcccgcttccaatgcacggtaactggctattggatcatccaatatgttgtattaatgtgccttatttttctgccaggtgggacagtacattggggagatggcgcgctacatcctggccacgccatcggctcctcacgatcggaaccaccaagtgcgaatggtgttcggaaatggactgcgtccacagatttggccgcagttcgtggagcgcttcgggattcgaaaagtgggcgagttctacggagccactgagggcaatgccaacatcatgaacaatgacagcacagtgggcgccattggattcatatcccgcatactgccgcagatctacccaatatcgatcataaaagcagatccacatacgggagagcctttgaggaacagccaaggactgtgtgagagatgcgaggcggatgagccaggcgtcttcgttggaaagattgtgcggggtaatccctgccgtgagttcctcggctacgttgaccagaaggcctcctccaagaaggtggtccacgatgtcttctccaagggcgacatggccttcatctcgggcgatctgctggtggccgatgagcggggctatctgtacttcaaagatcggaccggcgacactttccgctggaagggtgagaatgtctccaccagcgaggtggaggcgcagttgagtaatctggctggctacaaggatgtgattgtgtacggcgtaagcatacccaacactgagggcagagcaggaatggcagccatctacgatcccactcgggaggtcaacgtcagccagctgggcgtggaactggccaaatccctgcccaactacgccaggccgcagtttctcagattcctgcgcaaaatcgacctgacgggcaccttcaagttgcgcaaggtggagcttcagcagcagggcttcaatccggagatcatcgacgatgaactcttctacgcccaaccggatggcgtgtatgctccactcaccccatccgtatacgagaggatagttagaaacgagctgcgattctaggagcgccggactttgttcttgggaagaagaaaagtcaagactgtgccttgtatgttggtgaagaggatatcctttggattcggcttgtggtgcgccaactacttttaattctggctaagtttcttattgtccggacaatataaactttagcattggaaatttactgttgaaagagcgtttccgcgggtaaattattattttgtaactatttccttctacaattcctacatacataagtgtcacatcgtattgtatacattgtatagataataaaaataaaattcagccaatgataaatccatattgtgctctattatgtgattatagcattttccttctgtaagacaggattttgattggttttcattagatttgtaatttagtttattgtgcttagttaaatagtttttaaaaatgaaacttacaattgaaagagcatcattagccactttacgttggagtagttagaaaatctaatatcccggcttccttaaacagttccaatcaaatcgggatggctttagctacgattacacttttcaatagaacctaggttacatccattgcttgagcaactgatgccttcagcttaagtggaaccagattttcaggtgaacggatttggaaacggggtcgtataaaatactttcagcagtctttggatctatatccgctcaatccttgggcggcacatccttgctcaactctgcacgcttcctctgctccatgcgctcctctacctggtccaagcgctcgctcatggcatccagggagctcagcagtcccgcctggatctcgccatatcgcttcatggccaggaccagactctcctcgataagttcgctctgctgcgcgtactccccgttgttctgcgttatgccctttagctgctccagacactcggcgggaatgctgcggaagtactccgcgcccagggccggttccagctgcttaatcctctccagctgctcggcctgcgtgtgcagctcgggggccacgg

SEQ ID NO: 40364 - DNA, 2016 bp, DROSOPHILA
atgaacgaaccggaaaacctgaaaccacctgccaaatccaacttccgccgttatcttcagtggatcctagcacctgtcctgaccgccatttccggtctgatcctctactaccaagggccttggtatggagtggccacgctatatgccgcattgatatccatactgctggtgcgtccaggatggcgctggttctacattgcagctgttaccacacccagggatactgtagccctctttgcctacatccgtgtgctgctcttcattaagcgccaggagcgcaagaacctgaacatcggagacatctttgagtcaaatgtggcccggcagccggataaactggccattgtcagtgagtcccagcagtggaccttccgccaggtgaacgagcattcgaaccgggtggccaacgtgttccacagtcacggctacaaaaagggcgacgtggtgggtctgctgctcgagaatcgcgccgaatttgtagccacctggcttggtctctccaagatcggcgtgatcacgccgctgattaacacaaacctccgtggagcctcactgcagcacagcattaccgtgggccagtgcacggcgctcatttacggcgccagtttccggtcggccgtgatggatatcgccaaggatctgcccgcccacgtcggactgtatcagttcaacgacgagtccaaccaggaggtggtggcttccgagggccttagccagggactggcccagcagttgaacggccttctggagacggcggccaaggataaggtggccgccggcgcttctcgggcggatcatcacgacaagttggtctacatctacacgtcgggcaccacgggcttgcccaaggcagccgtcatcacgcattctcggtactttttcatagctgccggcattcactacacgcttggcttcaaggatcaggatgtgttctatactcccttgcccctatatcacaccgctggcggagtgatgagcatgggccaggccttactcttcggctccaccgtggtcataaggaagaaattcagcgcctccggttacttttcagactgcgcccgcttccaatgcacggtgggacagtacattggggagatggcgcgctacatcctggccacgccatcggctcctcacgatcggaaccaccaagtgcgaatggtgttcggaaatggactgcgtccacagatttggccgcagttcgtggagcgcttcgggattcgaaaagtgggcgagttctacggagccactgagggcaatgccaacatcatgaacaatgacagcacagtgggcgccattggattcatatcccgcatactgccgcagatctacccaatatcgatcataaaagcagatccacatacgggagagcctttgaggaacagccaaggactgtgtgagagatgcgaggcggatgagccaggcgtcttcgttggaaagattgtgcggggtaatccctgccgtgagttcctcggctacgttgaccagaaggcctcctccaagaaggtggtccacgatgtcttctccaagggcgacatggccttcatctcgggcgatctgctggtggccgatgagcggggctatctgtacttcaaagatcggaccggcgacactttccgctggaagggtgagaatgtctccaccagcgaggtggaggcgcagttgagtaatctggctggctacaaggatgtgattgtgtacggcgtaagcatacccaacactgagggcagagcaggaatggcagccatctacgatcccactcgggaggtcaacgtcagccagctgggcgtggaactggccaaatccctgcccaactacgccaggccgcagtttctcagattcctgcgcaaaatcgacctgacgggcaccttcaagttgcgcaaggtggagcttcagcagcagggcttcaatccggagatcatcgacgatgaactcttctacgcccaaccggatggcgtgtatgctccactcaccccatccgtatacgagaggatagttagaaacgagctgcgattctag

SEQ ID NO: 40365 - protein, 671 aa, DROSOPHILA
MNEPENLKPPAKSNFRRYLQWILAPVLTAISGLILYYQGPWYGVATLYAALISILLVRPGWRWFYIAAVTTPRDTVALFAYIRVLLFIKRQERKNLNIGDIFESNVARQPDKLAIVSESQQWTFRQVNEHSNRVANVFHSHGYKKGDVVGLLLENRAEFVATWLGLSKIGVITPLINTNLRGASLQHSITVGQCTALIYGASFRSAVMDIAKDLPAHVGLYQFNDESNQEVVASEGLSQGLAQQLNGLLETAAKDKVAAGASRADHHDKLVYIYTSGTTGLPKAAVITHSRYFFIAAGIHYTLGFKDQDVFYTPLPLYHTAGGVMSMGQALLFGSTVVIRKKFSASGYFSDCARFQCTVGQYIGEMARYILATPSAPHDRNHQVRMVFGNGLRPQIWPQFVERFGIRKVGEFYGATEGNANIMNNDSTVGAIGFISRILPQIYPISIIKADPHTGEPLRNSQGLCERCEADEPGVFVGKIVRGNPCREFLGYVDQKASSKKVVHDVFSKGDMAFISGDLLVADERGYLYFKDRTGDTFRWKGENVSTSEVEAQLSNLAGYKDVIVYGVSIPNTEGRAGMAAIYDPTREVNVSQLGVELAKSLPNYARPQFLRFLRKIDLTGTFKLRKVELQQQGFNPEIIDDELFYAQPDGVYAPLTPSVYERIVRNELRF

SEQ ID NO: 40366 - DNA, 3567 bp, DROSOPHILA
cctttttatgttcgacgtgtccatggagacgttccccttttgctatttgtgcaacatgattatcgatgactgccaggaaatgtccaattgcctctttcaatcggactggacctctgccgatcgtcgctacaaatccacgttggtatactttcttcacaatcttcagcaacccattactctcacggctggtggagtgtttcctatttccatgcaaacaaatttggctgtgggtgtcaatattttagatatatcattgattttacacctattttaaattactttgttattatagatggtgaagctggcattttctgtggttacggtaattaagcaatttaacttggccgaaaggtttcaataagttgagagggacgagctctgctactattatattatatattatattatattatatatatattattttatattatatattgctgtaccctaataaatatttagtaatatcactgtttttcatatatatcaaactttgtggcgccctcgggtggaagagttttgaaagccagacaaactggaatactgcagtttttcgcaaaggaaggtgcatgggtcggatacaccacaactgtccacttaataaaatgcattattgccaaataactaatgtagttacttacaaaaaaaaaaaccgaaacatataaaagctacaaaaacaaaatatgtgagagaatacaagggaaatgtataattcatacaaactctttaagaagagtttcttggttaattgatcgattttaaacttttttttttacttatattttccttttaggtgtgaaggtgtagtttgtaggtgattgtggtcgaatggaaccatacatttgttaacgttttccccggtgacattcccggaaaacttttagcaaatacgaaacaaagcttaagttcttgaaatcgccaagtcatgtgagaccatttgcaacagtgaggcggcctataaaaagcactgttttccagctcaagcaaataatcaaaaagagccacggacgaaatgttaagccagttctttccccacattaaagaaaagccattgagcgagcgggttaagtcccgagatgccttcgtttacttagatcgggtgatgtggtcctttggctggacagtgcctgaaaacaaaaggtaatgaaatcgatctaagcacatatataagtattaaagcaaccataatttcacgataaggtgggatctacattacaaactgtggtcaactttcgtgacattgttgatatttatccttctgccgatatcggtaagcgttgagtatattcagcggttcaagaccttctcggcgggtgagtttcttagctcaatccagattggcgttaacatgtacggaagcagctttaaaagttatttgaccatgatgggatataagaagagacaggaggctaagatgtcactggatgagctggacaagagatgcgtttgtgatgaggagaggaccattgtacatcgacatgtcgccctgggaaacttttgctatattttctatcacattgcgtacactagctttttgatttcaaactttttgtcatttataatgaagagaatccatgcctggcgcatgtactttccctacgtcgaccccgaaaagcaattttacatctctagcatcgccgaagtcattcttaggggatgggccgtcttcatggatctctgcacggatgtgtgtcctttgatctccatggtaatagcacgatgccacatcacccttctgaaacagcgcctgcgaaatctacgatcggaaccaggaaggacggaagatgagtacttgaaggagctcgccgactgcgttcgagatcaccgcttgatattggagtaagctgtttaaaaggacttaccgtcatcaatcttaaatataaatactaccgggttgttttctatcaatgaaatttgttgcacttactgtaatttacaatttgttttgacaaatttttttatttaccttactttttcagctatgtcgacgcattgcgatccgtcttttcggggacaatttttgtgcagttcctcttgatcggtattgtactgggtctgtcaatgataaatataatgtttttctcaacactttcgactggtgtcgccgttgtcctttttatgtcctgcgtatctatgcagacgttccccttttgctatttgtgtaacatgattatggatgactgccaagagatggccgactccctttttcaatcggactggacatctgccgatcgtcgctacaaatccactttggtatactttcttcacaatcttcagcagcccattattcttacggctggtggagtctttcctatttccatgcaaacaaatttaaatgtgagtatcaatcaatatgagctataatgtatgtatgagattaaaattactattcttttatagatggtgaagctggcctttactgtggttacaatagtgaaacaatttaacttggcagaaaagtttcaataagttaagatatgcaagctctgctattataaacctacactcgagaaaatatttcttcacattaataaaccttcagtacttactgcttgtggcgcccccggaagtatctcttgcgaaatattagtgtggtaattttataagtgattatggactcattttcgtaaagcaaaagaaaattatttgtcggcaaaagaaaaccagacaagctccaccataaaaggacttaaagttgggtcagtaaatctactgcagttgtctctttcgcacgagaaggcgcccagggcgtgctttctcttgcccgccactgtccatttaataaagtgcaaacaggcaagtgattatttcacagctattgttcgaaaaggatgcggatgcgggttggaccaaaaagaggcgtggtctggggtaggagacaacaaaggatttgcgttataaccaaggtaacgaagcagaacacacaaaacatataaaagcagcaaaaacaccatataacgagaaggacaagcgcgaaaaaattgtgcagcgcgaataaaaaatttaactaaggaaattaatacaatggtgcaaaagagggacagtaaaggaaggcctgggtgagattggagatgggtcaacagcaagagacattttgggagctgttttattgcactcttaatctagcatcctgagtaacacacacacacagtaaaggacattcagaccctttttcacttcaacaaatcattgagatcactgcttttgagttccgtgttctttcagtctcatctatcatttgactaatgtcatttagcattagacctcttgtactatgcaaatttagctgctatatttcgactaaaccttccaaggtcggtcgtctagtgaaaaaagttcacaaattagcgctcatcatcaatcaatggtgggctagcagctccagccgaggtcaatggggtgaaatgctgacgctaattgcaatttgtggtttcagtcagctgcaagaggagcggcggcaacaagaccgatatatgtacaatgtactacatcgcactcccttcgaacagcgtttgcatttgaggacctcgatgatggattttggccagcagtgcgaagccgaaaaac

SEQ ID NO: 40367 - DNA, 1304 bp, DROSOPHILA
gccacggacgaaatgttaagccagttctttccccacattaaagaaaagccattgagcgagcgggttaagtcccgagatgccttcgtttacttagatcgggtgatgtggtcctttggctggacagtgcctgaaaacaaaaggtgggatctacattacaaactgtggtcaactttcgtgacattgttgatatttatccttctgccgatatcggtaagcgttgagtatattcagcggttcaagaccttctcggcgggtgagtttcttagctcaatccagattggcgttaacatgtacggaagcagctttaaaagttatttgaccatgatgggatataagaagagacaggaggctaagatgtcactggatgagctggacaagagatgcgtttgtgatgaggagaggaccattgtacatcgacatgtcgccctgggaaacttttgctatattttctatcacattgcgtacactagctttttgatttcaaactttttgtcatttataatgaagagaatccatgcctggcgcatgtactttccctacgtcgaccccgaaaagcaattttacatctctagcatcgccgaagtcattcttaggggatgggccgtcttcatggatctctgcacggatgtgtgtcctttgatctccatggtaatagcacgatgccacatcacccttctgaaacagcgcctgcgaaatctacgatcggaaccaggaaggacggaagatgagtacttgaaggagctcgccgactgcgttcgagatcaccgcttgatattggactatgtcgacgcattgcgatccgtcttttcggggacaatttttgtgcagttcctcttgatcggtattgtactgggtctgtcaatgataaatataatgtttttctcaacactttcgactggtgtcgccgttgtcctttttatgtcctgcgtatctatgcagacgttccccttttgctatttgtgtaacatgattatggatgactgccaagagatggccgactccctttttcaatcggactggacatctgccgatcgtcgctacaaatccactttggtatactttcttcacaatcttcagcagcccattattcttacggctggtggagtctttcctatttccatgcaaacaaatttaaatatggtgaagctggcctttactgtggttacaatagtgaaacaatttaacttggcagaaaagtttcaataagttaagatatgcaagctctgctattataaacctacactcgagaaaatatttcttcacattaataaaccttcagtacttactgcttgtggcgcccccgg

SEQ ID NO: 40368 - protein, 397 aa, DROSOPHILA
MLSQFFPHIKEKPLSERVKSRDAFVYLDRVMWSFGWTVPENKRWDLHYKLWSTFVTLLIFILLPISVSVEYIQRFKTFSAGEFLSSIQIGVNMYGSSFKSYLTMMGYKKRQEAKMSLDELDKRCVCDEERTIVHRHVALGNFCYIFYHIAYTSFLISNFLSFIMKRIHAWRMYFPYVDPEKQFYISSIAEVILRGWAVFMDLCTDVCPLISMVIARCHITLLKQRLRNLRSEPGRTEDEYLKELADCVRDHRLILDYVDALRSVFSGTIFVQFLLIGIVLGLSMINIMFFSTLSTGVAVVLFMSCVSMQTFPFCYLCNMIMDDCQEMADSLFQSDWTSADRRYKSTLVYFLHNLQQPIILTAGGVFPISMQTNLNMVKLAFTVVTIVKQFNLAEKFQ

SEQ ID NO: 40369 - DNA, 3737 bp, DROSOPHILA
tccgttcggttttcctgaacatccgcgatcgggagaacggaagctgtgtcaacccctgttcgcccaagtgcggcaagtgcaccctcttcacgctggaatcgccgatcacggacgaggacgtgatgcacattcacgtttacaagaagcgcacggagagctgcaagttcctgctcgggctgaccgagctgccgatgaagccgatcttcgatagggtgaagaaggagttctattcacagaacataaactgggagagtaacgtcgagtcccatttgtcgcgaatgcccaagctgaggggcccctgcaagaaggccaatgactgtgtgtgctacgagaggaatagggagcggcgcgaacagtggtgtcccacctcagagctgaccaagcggatgctgccgctcttcaacctctgcaaaatgcagacgggcaatatagtgctgatcctgagactggtgtgcaatgggccctctgtggtatcctccttccccgtccagagaccagtgtgcaaggatccctgcaactgttgctgtccttgcccgcccacttggcctgctccctgttcgtcgccattcgatccctgcgatccttgcaagaccgtgccagccaagaagacatgagtaggaaatgcagctgcgagcctttatattccgtactcatttagttgccataagcatttttattgtttgacaagggatgcgcctagcaactgataatcattcgcatatcttaactataaataaagtatttgaataatttttataccaattctggtgtttcagtgacttgaggaggctattgtccattataatataatttaatattaaaatttatatatatgttagaaataagaccttactaggcattttaggcgtaataaaatctacatacagacagactcatctgcctaaaagacaatcttaatatcgaaaatcaaggaatcaagttttcaaaattcatccgattccagtagccctcgcaaatccagtcggtttagcagttcgaacaccacagtctccccgtctggacggccattcaaaatcagaatctaaattcaaatttactcacaaaatttttggaagtgcgagtgttcgggcatataaatttctagtttcgacaaaacaaaagcctagccaaaattatttcctttgaaaatggacaagtctgataaaactgagaaaactgagaaatccgataagtctgagaagccagagaaacctcccaagattgcaggaaacttcctctacatgttcgagttcgtagtggacgatctgctgatcacacgccagaatctttgcgctccggaggagtatccaacctgcacagagatcacgttccgctcgtcggtttacgtgaatctctgcgatcgggaggtgggcacgtgtgttaacccctgttcgcccaagtgcggcaagtgcgccctcttcactctggactcccccattacggacaaggatgtgctgcaggtgcatgtctataagaagcgcacggagagctgcaagttcctgataggactgtcggagctaaaggtgaagcccatcttcgacagggtgaaggagtcctttgacatcgagaatcctgactgggaagacgccatgctggggcacatcgcccagctgcccaagatgaagggtcccaccagcaagggcctcctggacaactgtgcctgctacgagaagctgaacgaacgtcacgagcagtggtgtcccacatcggagttgtccaagcgactgctgcccctcttcaatctctgcaagatgcagactggcaacatagtgctgatccttagattggtgtgcaatggtccgaccattgtgtccacgttccccttcagcaaggtctgctcccgcaatcccaagtgcccggagccctgctgcggtccttgtggcccctgtggtccctgcggcccctgcccaccacctcccagctgcggctcgtgcccaccgcctcctagctgtggcccaccatgtcctccaccctgcgacccctgcgatccgtgcgatccctgcagtccctgctgtggcggcggaactgccaccggcgggcccatggataagaagggctgcaagggctcgtgtgcccagcctccttgtcgtcgctgtacaatggtggatccttgtgccaagcgagttgagcctccggcaaagtgcctcaggtactactcgtgcaatctggacaagctctgtccctgtgactactgcgaggacgagttcgatagaggtgactataatctatcatcagcatatataaatgcttccttttaatgatgtaatgtatatacttcttcccagaatgccccactgttcccacaaagcgttgcaatctctcgccgatcgaacaaaagctgcagaaatgcggtccctgcggcggaattccaccgtacccacgcttcatccaggagaagatgcaggccgagctcttgaacaaaccggaaaaggatcccaagaaggacaaggatggcaaaaagggtggcaaggatggaaaggacgcaaaggatggaaagggtggcaaggacgacaagggcaagaagaagcgtcaggctggaggtgctgtttgccgcgtaggagacgagaatagtccgtccgccgtctacgaagactgcgatcctgtctgcgcaggagtcctccaggcgaccaagaaaattcggtacaaggagcccactgtcaggtgcaacggacgggaggaggagtacgaaatggcctgtgatgaaggtgagctcatatatgtatgtatttagaaaacgatttcaactgggatttcgagaatgccaagtaggcttcgaaatgaacaacaacacaaacgtctcgtaactccagcgaaacatttagtaacatctagtagtcggggtgtagaagatcactcgtttagcatttgttttatacattcgaacgggaaatgttgtctgccgcacaaaatacagaaaaataaaatctttcgttgttgttacccgagttttggatggaaattaaaacagagaatcagtacgtccgaactattttttttcctatcaagttaaaaaattttcgaagcgatccactaacccaaattcaattttcatttcagcgcgaaaacgagctgtgcggaaattgcgccacttactggtgaagtacaatatccaaattgagaattgaaggctttcggaattgagatttcagcttgagcctagtgaataattgtattgacttacacactcaatcactcaaccgcacaacatggccaagaagaggggaagaaagggcaagaagggcaagaagccaaaggtcgactgcaagttcaagatcaccaatgagatgctcaagcccatgaacgagagtaagtacacgcggatccctgcaccgaagctcgggcttaaggatgattcatcccttccaattggtatcctcagatgtggacgactgtgatggctgctgtcagtgcgcctgcgattgcgactgcagtccggagttggctccctgcttcatccagccgaccaagccggatccgggtccggaggcgtacgacgagttcgaggcctgcctcaatggcagcggtctgaccatacgcgtactcaagaacacccacaaggtggagagcgtgatggatggcagcgagactgcgcccaatctgggcgcaggcgatgatccctgctatcgcgatgaccccaatgactgcgagcccgcaaaggagtcctgcctgcacgatatgctccagcgcagctccttcgctcgcaaccacatcaagcgccggaccggcggccgcatcat

SEQ ID NO: 40370 - DNA, 1666 bp, DROSOPHILA
caccacagtctccccgtctggacggccattcaaaatcagaatctaaattcaaatttactcacaaaatttttggaagtgcgagtgttcgggcatataaatttctagtttcgacaaaacaaaagcctagccaaaattatttcctttgaaaatggacaagtctgataaaactgagaaaactgagaaatccgataagtctgagaagccagagaaacctcccaagattgcaggaaacttcctctacatgttcgagttcgtagtggacgatctgctgatcacacgccagaatctttgcgctccggaggagtatccaacctgcacagagatcacgttccgctcgtcggtttacgtgaatctctgcgatcgggaggtgggcacgtgtgttaacccctgttcgcccaagtgcggcaagtgcgccctcttcactctggactcccccattacggacaaggatgtgctgcaggtgcatgtctataagaagcgcacggagagctgcaagttcctgataggactgtcggagctaaaggtgaagcccatcttcgacagggtgaaggagtcctttgacatcgagaatcctgactgggaagacgccatgctggggcacatcgcccagctgcccaagatgaagggtcccaccagcaagggcctcctggacaactgtgcctgctacgagaagctgaacgaacgtcacgagcagtggtgtcccacatcggagttgtccaagcgactgctgcccctcttcaatctctgcaagatgcagactggcaacatagtgctgatccttagattggtgtgcaatggtccgaccattgtgtccacgttccccttcagcaaggtctgctcccgcaatcccaagtgcccggagccctgctgcggtccttgtggcccctgtggtccctgcggcccctgcccaccacctcccagctgcggctcgtgcccaccgcctcctagctgtggcccaccatgtcctccaccctgcgacccctgcgatccgtgcgatccctgcagtccctgctgtggcggcggaactgccaccggcgggcccatggataagaagggctgcaagggctcgtgtgcccagcctccttgtcgtcgctgtacaatggtggatccttgtgccaagcgagttgagcctccggcaaagtgcctcaggtactactcgtgcaatctggacaagctctgtccctgtgactactgcgaggacgagttcgatagagaatgccccactgttcccacaaagcgttgcaatctctcgccgatcgaacaaaagctgcagaaatgcggtccctgcggcggaattccaccgtacccacgcttcatccaggagaagatgcaggccgagctcttgaacaaaccggaaaaggatcccaagaaggacaaggatggcaaaaagggtggcaaggatggaaaggacgcaaaggatggaaagggtggcaaggacgacaagggcaagaagaagcgtcaggctggaggtgctgtttgccgcgtaggagacgagaatagtccgtccgccgtctacgaagactgcgatcctgtctgcgcaggagtcctccaggcgaccaagaaaattcggtacaaggagcccactgtcaggtgcaacggacgggaggaggagtacgaaatggcctgtgatgaaggtgagctcatatatgtatgtatttagaaaacg

SEQ ID NO: 40371 - protein, 503 aa, DROSOPHILA
MDKSDKTEKTEKSDKSEKPEKPPKIAGNFLYMFEFVVDDLLITRQNLCAPEEYPTCTEITFRSSVYVNLCDREVGTCVNPCSPKCGKCALFTLDSPITDKDVLQVHVYKKRTESCKFLIGLSELKVKPIFDRVKESFDIENPDWEDAMLGHIAQLPKMKGPTSKGLLDNCACYEKLNERHEQWCPTSELSKRLLPLFNLCKMQTGNIVLILRLVCNGPTIVSTFPFSKVCSRNPKCPEPCCGPCGPCGPCGPCPPPPSCGSCPPPPSCGPPCPPPCDPCDPCDPCSPCCGGGTATGGPMDKKGCKGSCAQPPCRRCTMVDPCAKRVEPPAKCLRYYSCNLDKLCPCDYCEDEFDRECPTVPTKRCNLSPIEQKLQKCGPCGGIPPYPRFIQEKMQAELLNKPEKDPKKDKDGKKGGKDGKDAKDGKGGKDDKGKKKRQAGGAVCRVGDENSPSAVYEDCDPVCAGVLQATKKIRYKEPTVRCNGREEEYEMACDEGELIYVCI

SEQ ID NO: 40372 - DNA, 31526 bp, DROSOPHILA
aacatatctgagtatctgaagccttatacattaaataaacctattttgtccgaagaaaagaaaaaccatatcgccaatgctgccagtacgtcaaccacaacgccattgaatataacatcagatgacgaattctcttcatattctaacaagtggacgagtacttgcgttaattttcaaccattagacgttgaatcaagcttaaatatttcacttaaagtcaacgctggcacgaatcaggccgaattattaatgacaccattaaaaagttccactcctcttttcatttcttctaatggcacatccgataattttaatttgaggaaaagctctcctcccgacagcgcgttcaccaccacggttaacgtcaacagttttgaaacggtactagtatctggaagccaaactgcctcaccgtcgccgtcaaacttaaagtcaccaccatcaatagctccattattatcctactcggattatatgaaacaatttgagttaccagaattgccgcaacccattatggatctttcagaaaatgatactgctactcaaagcgattcctttaatgtaatcaataatactcttacgaacgctgacaatttaaattcctacaaccagatggatgtagaaagcaaaagtagtctacagttaccttcttattccagtgaatcatttgatccgtgtagtgtgcctagtttttcaattaagaacaaagaatataaaattgtcgaaaagctggacagtctatcaaatgttgaaagcgtagaatcaccgaaaaccttagtaagtccagtaaacccattgaattgctcaaaattattgccagggacggaatcaatagtgagtaatgatgtagcgttcgatgatacattttacgatagctttaatgttgacataaaagaactgaccgcatttgttgaccatgttgccccagaggacggtttatacaatttcccaaacgataagacttcagttgaattcagttttgataagaccgaggatacaatagacatgaatcagaacttaagctcaggagaatgtggttattataagccatctcaggcacaacaaaaagctagtgtagtagcatccgcagcaagtagtgttcttgacggaatttcaaagggcttaaaaggggggctggacggcgtttttagtggtgtcagttcaacagttgatgtcactcaatcaaatcccagttccaaaagaggttttagctttaacttagcatcaaagattgtgccaagtgtcggtggattgctaactagtacaagttccacctctataaaacaaacaggatcagaaactaatcctaccctaatattgatttcacctgaaaatgtttctagtcgtaacagtaattatatacctacgacatctccatcttgtactcaaaaaaatggcgaggaaaatttatattcggctacagtccacaataagtcaacgaaatcgaattcatactataatgaagtgggagaaattagttcgaccttagtcagaaatgtttgtgacagttacgataatagctatgatgagatgattttaaccaacgaaatggtaaatatagggatgctcgacagtgaatctgagtttggcttaatagaaaattcatattcgtatcaggtaccagacaatgagcaaatcgacagtgttaactcgtataataataagacccaaaatgtaacaaataatggcatagaaaaggcaaatacaaaaaataaaccagtgcctcttcatgaccctcctacgaaaaaagcaagtactgttggcatgttcggatcaattttgggaaaagctgctgcagcagtgcaatcagcaacgcaagcagtcaatcaaagtgcgtcgtcagtggcatcagtcgttgcacaaaagccaacaatcgtaccgagaacgaacaacgtgcttttgttgtctagcgtatgctcacctaacgagattaaaagaaattcaagttcagtagaatttgattcagaatatggatatcaaatgcccgatgtagagtctctatcaagccattacgcaaatactggcggtgattatgataatagtaatatgaaaatacatgaatttggtacatatgcagatgatagaccatacgcagattatcatacgaatggcaatcaaagccaatttaaagaagaggcggtgattcctggggaacctgaagtaattaatacaaacatactcccgattggcccgcaggccaccggcaaaaaacttcctaccgtcaatggtaaatcggcgttacttattaaacagatgccgacggaggtatatgatgatgaatcagatacagatgaattagatgtcagtccatcaaccggaaaagtacctagctatagcatttatagtgagcaggaagattactacatggatcttcagcaaacgacaccgtcaattcagccaaacggtttttatgaacaagtcaataatggttatgactaccgagaggattactttaacgaggaggatgaatataagtatctcgagcagcagagggagcaagaggaacataatcagccgaagaacaagaaatatctgaagcaggccaaaatatcaaaaatacaaccaccatcattagatttcattgacgtagggcaagacgatgactttatatacgacaactatcacagcgaagacgatagcggaaattacctagagggaagctccagtggaagcgttggtcctattgaagggtcaatcataaaggtggactcgaatatagaagcttcgtttgcttcgctcaacaagaagagtgactctttcacaccgacaaacgattcccttcaaaagcatgacactgttattggtgaatcaacaaccaaacttacgcgccttaggacagaaaaaatgtgcccagacgtagacgaagaagatgaaaacctaagcgatcacgtttccgatcttactgacttaagtaaactaatctcacaaaaaaaaaaaacgctcttgagaggagaaactgaagaagtcgtaggaggacacatgcaggtgttacgccaaacggaaatcacagctcggcaacgatggcattgggcttacaataaaataatcatgcagcttaatgtaagtttgtaatacacatttttttaatatttattataatatagtttttgttgagtgtcacgacttttaaatacctgccctcaattaaagtaggggcaacgtaaattatattgcttataactttcggtccgattatccatacctataaacatattatcgtttaatgctaatgtaatttttatgatatgtgcgttaaaatgacaaggcaatttataaaactagaaaataatcaacatatttttatgcataagtataggtgtgaaggtttttatcagtttgtgggttttccttgaatatttcgtcaattctctacaaaaaaattgtagtaaaaattagtattttaaaaaactagtttaaaatgataaaattatcgaatagaaacaaaagaggacgctgaatttgcaaaacaggtaacataaattttacaattttttacagtttttagcgattgtatgatagttatatatatactttctacggtgggaaacgcttttactctacagtaaaaggtatattagaaggaagcgtttccgaccttaggatcaatagccgagtcgatctggccctgtccgttcgtatgttcgtcgagatctcaggcaatataaaagttaaaaggctgttattaagcatacagattctagggacataaacgcagcgcaagtttgttgccacgccacacttttaaaaaatgttttgacttttcttcgttttcttgtttgtcttgcctacttctaacgccaaaaaaacattttggccacccctctccttacaccgaaaaaacggtccatccaatcttttaaacaatttttaatgtataccagaaaaatgatgaaatcgagtaacgagtaactcgaccgcgacaattctgtttaaaaatgtaagaccacctttcaaaagtgtggggttgacagttttcggcagtttttgagctttaaagtagccgaacaaaatatactaatggtagagataatacatttatgaaaaatgtgttcgtgacagtttagttggtttttggacgatagtaggtatcgaattattataaaagaatcttgcaaagttagacatctgaagaatctgcatgctaaatctcaactatctggcttatatcgctttaaagatatttgtggtcaagaatatgtatactttatagcgaactctagctgttacatatttttaacaaatctagtaccctttcaacgttcagctatttaaattgatagcattgtttaaatatattcttaaaatatcagtagttcgttgtctgttaagtggttttctagaaacaggtcactgacacacaataaggtttaattgcaagggtgtataatgtatgttatcatgttccgatggtagcagacggagccgacctgcgtaatcaactacgtttgttttagagggtaaaattgttttaaatgcgggcaacaaatacttgaatgggaaatataaatgttttttcccgcattagtagaaatatgagctaacgaccttacgcggtaaaacgaaaaaaaacttacttttaacgacattacaagatgggtggaattcagcatttggattcaagtcagtattctagacagtctattgaattctgtctgcgcaaaattattttaaaaaacagatacgtcttcctaaaaaaatgttttacggtaccaggtatttaagtccgcttattacgtgaggccctcggcgaatatatatttcgcttgaattgagtgactggttaacatcgatgcagttcgatgcattttgttaatgtgcagctaagcaataaagcgacatcttttatgtccaatttatggagtcagaaacatccacataatgttgatacaagaatacaatctattaccgatcgaacccgtaaactaagcactcttttaaagtgccaggagaagactactcatgtaagtctgtgctgtaaaatactaattgctttggttttctgacgtttggaaatcatctatcgtacagtggagaacaattgtgaaagaaatgaattttcttcagagttgtaaactgattcttattgcctttggttcgattttagggtcgaatcataacgagtgttaaggttccagtgtgcgaaacgcttggctcgttgaaaaggtttcaataagaaattttttttttttcctatatgaaccatgacttttaagtggacaaaccttaaaaacttcgttcaatggcatcaaaggggtatactagattcgttaaaaagtatgtaacatgtagaataaaatgtttacgaccatataaagtgtatacaattttgatcaggataactaccaggcttgttctataagatttcaatccccatatatgtatgccgaaaaaatttgaatcatgaccaaaactattaggcttacactttaaaaaaatcgttgtttctttacgtataccaacaaattgctgaaacttctgatgtaatctaataatataattacaaaaatgtaattacaaaaacacagcatcgcaattattgaaccgagcgctttcggtttattcaaaatactttcggtctccggttaatagtccgcttggttttacgaatatatgtacaaaaatataaagtatgcagaggcggtcaaaagtatttacacaacgtgctttcttttcaattgtcaactttgatcgcttattgctgctgcttttgtactcagaaacgaacatagcggtatttgtcgtacttctacatctatacagaagcaaacgaaagaagaagtggaaaaaataactgtttattggctaaaaatagaagcattgaactgatccttgtctgttgtcaaaagtatttacacacaatttttacgcgtcaaaattatttacacagttcaaattgaagattagtctttgatttgcattgagtaagtgaagttctagttgatgttgatcgcttaattggaacttaaactaactgttaacaggtaagttaatagataaaactaagcatataatttgtaaaatggcaaaaacaaaggagctatcagttgggcatcgagtcgagattgtcactaaacttaagactggttcttctgcatccaaattagctgagttgtacaaaatatcacgtaaaactgtgtacaatttagttaaaaaaaaggacactgggaaatttggaaaattaaaagaaacctggccgaaaagttgcattgaacccaagactgcagacacattattggagttgtactcagtaatcccaccattagtcccgttttaattgccgcagcttcgaaaaatttaattggaaaacatatagtacactgcgtcgcagaatgaaggaagttgacatcaactcctatgaaaaacgtctctcatttgccttggagtataaagagaagcctatcgagttctggtttgatgttttatggactgatgaaattgggtttcagtttcagagatcctttagcaagaaatttatgcatttcccaaaaaaactaaaggttgaatgccgtccagctaatcaatcgatttggtggtggcacggtgatgttctggggctgtttaagctactttggatttggagacatggtaccgatagagggtacaataaatcaaacaggatacctccatatcttaaatgagcacgcattcacctcaggaaatagactgttctccacgaaaaaaaaacgcaaaaaacaattaaaaaagctgtatgtaaataattttgacgcgtaaaaattgtgtgtaaatacttttgacaacagacaaggatcagttcaatgcttctatttttaaaccctaaacagttattttttccacttcttctttcgttgggtaaaaagctgttttggctgcctaacaattttttaacgaaaatgtattgacgaatttaaggaattttaaagtatatacagctttaagggttttacgaaaagtggtattgtctgtcaagcacttaaacataaataaatgcatactaggattgagcagacagacaaaaaaaaaaacaaaattttcatattaacaaattcgccaaaaacataatttttctcctgaatataatttttttaagtattggttgtttttttcgttgcctttcctttactagtatttttatttctttgcttcgccagtacgcttatcgtccaccctgacctattgctaattgataaccaccatatattttataaacacaaatctaacaaatttaggattttgtaacggtataaataagacaccgccgttttatcttagaaatttcatatctgtttcaatgaatggcaacattaactcaaaacttttaaacaattcatgtaacgaccgcaaattgatgctcgataaataacggaaacagttcctcgcatttcttgagcaatgggcatgtcacagtcaaaactttcgactaaagctttcaaaattgttcttaaatatttaatgtttgtcatttcctttttaagggaattccattggacttgatcttgagacaattctgacataacgcaatgtattgcccctgaaaattattcaaaattgattagggagtacgactaaagcttttaatttgaatggtcttaatttgacatatttcgaggcaactcttaacaaaatcgttcgatgtaattattctgaaaacctgttaaccgtttacgaattgtaaacggttaataaatggtcttagatgtgacattataaaaaaaggagtaagttcagtttattacaaaaactttaagagcgtttgacagagaatggttaaggcatgcgcaatagatagaaaaatattctcttacatttttcccgtcttacccacacttgacttttttctgtatacataagcttttcaatggtgtactaaaaactaaagttctaagtgtgtaactgtcatccgcgcaaagcttacttgctggtagcttcatgaaaacggagctaggcgcaacaaagaatttactaaattgtactgtgaatttcaacgtttttttaattcttagcagagcacaaataattgttcgtagtggtttcaaaccgtttacattaagaaagccagataaaaaagcttaggccttttagttaaaaattgcatatacataattttgtgcacagaaagactataaaacagttttgtttttataaaaaagaaaaaaagctggaatcgctcttaagcccagataccaaataattaataaacgcatccattttaggatcccctttacagtacatacaagcataattgaaaaacctaccaatattaaaccacatttggtactagttaattaattgcacaagttttttagttgaagtaaatttcaaacagacacatgtgtattttgttacaactaatataggtcatatttaaaaagcatttttatttactttgagtgtgcttagaagtgaaattaagaccgggttttatctaaatacgttttgaaatacacatacatacatagtacaagaacctaattttaatagttatgtgtattttttttgtcgtcaaccacttaacgctgtttaggtacatatgtatataacaattcagtattacagacgaaattggcttttgaaataaacgtatgtattccacacagagcattaaaacacattttaaaaacaaaattatttaggtaaaaacaaaactaatccatcgaataaaaccctaattaacggtatgatgaacacatctcagctgcaagtgaccggggatacggaaaaaaaaagtcagttgcttaaaaaggaactcaaaataaacacccaggaaaagcttatctttgcagaaaatgccctcaaaagccagattaaaataaaggagcagttacgacttcagcaacaatcaacgatttatgcgtcgtcactattgagctcttctgctgccggatcagtaagagctccgctcttaagccaggggcaccttaattctatccaacacaacatggattttgaccttgccaaagcacaaataccggaaatgcaaccaccgatgagtaagtcgcccaatggattggatttctcttacttaagttatccaagcataaatactaatgaaagtatgatatcgattaaaagtgaacaacagttgtgtcagagctacaattcggagcaacactctgactacattatctccgattatatggataaaattgcaacaaggatcagtttactcgagacagagctgaagtttgcttggcgtgcattggatttgctttctacggagtacggaaagatttggattcgtttggaaaagcttgaaaacatatcaatagaacaacagtctgtcgttggcaaccttgtggatcttatcggcgcatcaaaaaaagaacttcaaaaagtggatatcgaaagaatgaaagtacccttatatcaagatgaagatcaattgctaccgttggaaatggaagacacattagatatagatatccaatcatctaatcgtgactttgataagaatcttacttttgaaaatcatgaaaaaacttttgtaacaaaacatacgcaagctactaaatcggaagaccttatgaattccgcttacgcaatagattcccatccaaattttgaaaacattgatttcaatggcaaaaacttagacattgggataataaaatttggttttgaaaaaggctacgagccaaaacaaaaaggtaatcaatcggattttgaagcatacaaggaatcaagaactaaactttactcagattctgaccttatgttatatgagaggcagcagtttctagcaaatagcgcgcgtgccgaattaatgaaagaatttttaaatggacgtcgagttttaaatgagatttcggcatcctcgggtgcattgtcaaaaagttctgagaaggataaaaatcttgtaaagcctagagaaccactgttaagtgagatagatgatacatacgtgagacggtcaacctgtgaacttgtcagccctagtagtaataatttttttcaaatagcagcctctaaaacaggcgagggtggaaatcaggttttacccattgaagacactggaggaacagaaagtccagctaatattaatgaagtagacgaatctttttataaaaatctaaacgaggcttatcgagacaatgaattgagctctgagatatttaaggttgatgcattgctacatcagtctgaggccacacatgaccacatctcatttatccgaaaccagtcaacttcttccccagttttaaataatcagagggtgaatgctattacaggtacacaacctttacagactgcaaaggcgtgtctcgtaacagagccaaaccaacatttgaacaaagaaccaagaaagcacagaaaaaaaaaacatcatacaaacgaaatggatatgattaataaactaaagtgtatccttgcacaagcacaatcaacagagattattaagagagacattgaagaattgggttcgaaactttcagatgcatgtgtaaaacaaactgaaacggaaaataaatcagacaaccatattagtaccagttatttaaaagatgatatacgaaaaatgttaaacaacgtaatacagactttattgggggaaataaataaaattaaagggttacaatcattgagtgcaacgcaattgagtcagttacaaaatgccgtatggtcggaagaaaggttttttcaaaaaattagtctggtcgataaaaagttgactttgctgttacttaatccgttaactgttactgaagaactgcaaaggctttgcatttcaaacacaaatgaaaagtttgttctggtaataaaaaagttaaaaaaaaatattgacactctaaaaaaattagttggcagctcattggatgactttaaaatagataattcacacgcaaatatgaccacatttcacagccttaatccatcccataattctaatgatagcagttttagtgcacatttattaagaaataactccaatctggatgaacagttgaaaattcttgaaactcaagagattgaaatacaccggaaaaagaaaatagacgaaattgtgagcggactttccgaagaaacctatacttttaacccagatatggaatataaaagccaacatagttgtaccaactcaactgataatattataggattctcaaaaaatatttacaatgaagatgaatatataaagtctttaagaaagagtctagaacgccacaatagcatgatctttttactacatttgcaaaatcctgaaaaacacaaagtgttggctgatataaatgatgcacaaatggattcaaatcgagctagtctcagtcctccaccaccagctccaaccgacacagtttacttaaatgatgcaattaatcaaattacatatcaacaacgaaatggaaaatcagactctggcctatcgtcgatgagcggctggtcagccaactcccaagtgtcggttggacttcaaaattatgatcctgcatgtaataatattttggaaaattgtagcgaaagattgcaaacataccattcatttcctttggctgaaaattcgaactttcacagtttcccactcagtcatgaacaagctcaaactactaatcaaactgagtttgtaatattagaagaaaatctaaactatatttatgagctttctaaaaatttacctatttgctctgcctatgaaaataaatctattttcgatatgaaatatgaaatttgcgactcaaatgaaattggaaaattttccactgtggacgaaatgctggaatgggaccagctaaatgaaccggataaacaaaacttttctgggaaacggttaaactccaaccttatgccagatctcttgactgctcaaataccaaattccatatcaaaacacaataaaaacacaagtgttaacattgaatatgttagacaaaaagaaaataaaggcatggataggcgaagcatcatagaaccaaatatttataacggaaaatcggaagatcaaatttgcagaccttgtttgacagataaactcgtattttatccctcatcgaactctattaccgatcacaatagcagccatgatttcaattgtttgagtcaacaggatcaaacacggattattaaggaattcggatctgcgcatttgaatcaagatccaacaaactatcttgattatacgtctggtacttattctaaagcgccgccagaggtccttactcacgaaacgaactcaagtcacctggaattcaatcatgaatcagagtcactgttcaactctcctaatacttctagctattgtaaacaaaagtttgttccaggaacatctccagcaaagccttcaaaggtatggaagaggctaaacaccatattagcagataatctaaagctcaagcgtgtatcaaagtttaatagatcactgtctttacccggtgatgtgcaaagtcaaggcctccagagacagcctcgtggccaggccggttcgtgtccgtttatccacaagcgatccaatctggccggtagcccggttcagttatcgaaaagaattcaaaagcttcccatacgttttataggacgagcgaaaggagtcccattcgtgcggcgctcatcaagcccggactcagctgtttcattagattccgctgccgataaacgcttctcaagcgaaaaaggtttaaaaaaaaaaacaatttcgtccaagatgagtggtttaatgcaaaaggcaaagacgtacaaacggcacagctttgtcctgcgccgcggctgtaacatgtcggattctgaattagagatgccggacttcgtttcatcgggtaacgataatagttcaatatcgacaagagaaattttgttgaatcaatcgatcgaggtagaagatgaacaagaagattttaattataaaaatcggtgtgactctaaaagtgtgttaggtggttcaattgagaagctaaatggcaacctaacaaataatctattccccattgtaggtgacctaaaaaaaattcaaagccccttaccactggctgtcttaacagaaattccttcctataaggatgaatatagcaataaatccgatagtatcaaaaattcacccattgaaatgccaaagattctcttagaaacggcatgcaatcaagaactcaatttagcacattctgacgacgatgttgataagaacatactggcaaactcggccaaagactatgtaaatgcccccacatttagtatattaaagacagttgaagatgcttccgaaccaacgatgacaccactccatacaacaacaacgacaaacagcagtcttaatgtcacaagcgctttatgggtcacgcagcagtgcttagaccttccaaactatcccgggtgggggtcgcgagaagatgacgataaccgcagtcagcattctgctcgcactctatcttcttctcgtcgacaaagcactgaggatagcattgatacagacgacgaatacttttattatgagcttcgccagttagaagagcaagaaaagcagagggcgcacaattctgcaattccatcttgtgaacgacaaaatgataatgatgtgttgttttcacaaattggacaacttcttcaaaacgatgttaacggaggagacggttttcgccattctaatgggtgtaatgatggggaagacgctattattttttctccaagtgaaagtgttaagttacgaatgtctgaagtgtttaaggaactgaaaagcgtggttagtttaaacccaagcgttaataatgacgcgacttttgagggcgttcctattgtaaaaccaacatatgaaaaacttgagacagtctccgacttgcatagcgcttggcaggatgttaatggtgatttacaaattgcagcttcagacatcgattctaatgaagatctagttggaaataagggtagggaaactccaacttataacaaacagcgaaaattgagacggttaaagaaaaaaactcgcgatcgtaaaataaatatatctaagaatgcaaccagttccagttcctcttgccattcagaaaatgaatgtaatacaccccttggtcaatgtacccagaaatcggtggcagaaaaagatacaaatgatatatcaaataaatcggaggcttctagcgagacatcaggaccagatacgccggcagagcttagcgatgttgatataagcgaaactgaaaacggtttgagggctgacgacggccagaatatagataacatgcgtggaaattcagggtctcttttaaaggtgaatcggaagtacctattacaatttgatgttgaccatagtttaataaaccagcccctggaaacatctcagtataatacgcacatgttggagaatattacaagtgcgtcaattccatcgcagaatcgccaaatagactcaaaaacgttaatgagtcaaagctcacatgcggatggatcccaggctgtaggcaatgaaaccgctgtaggtctaagcagtagcaagtggaaattgttaaaaactttaaaagagcgcaagatcgaggaaaaaaataatcaagataaaataaaagaagatgaaatgataaaggacagggacaaggtaattataaagaactataaagaactttatttcaggcctactttaaaatgttcgtaattaaatcactgcaaatcttccaaataaaagatactacacttcaaacatgttaaaaaccagggctgtgaaccatttggaagctaaacccttccgaaccgatttaaggattttaaggagaggcgttgccaaagtgtttttgaataccgaaagaaattgtaaatttctatcttctttgttttattgtttgcctagccaatttctacaccataaacaatttggcctcaatgcggtcacgccgcattttcactagctgagtaacgggtatctgatagttggggaacacgactactaaattgttttgtataatatataatatctgcaaaggtatataaggttatatcttcctttcttcttcccgttactcgtagagtaaaaggttatactagattcgttgaaaagtatgtaccaagtagagggaagcgtttccggccatatagagtatatatattcttaaccgagtcgatctagtcatgtccgtctgtccgtatgaacgacgaaagctcaggaactataaaagctagaaggttgaaattcagcgtacagattctagagacgaacaacttgaacaatttttaaattttttcttattttattccccaatatctataggatatcgcagaaaaattatgaaatttcgcgttcgcattcacattagcgaactcacattagagttacgggtatctgatagtcgggcaactcgactatagcattctcgtttgttttgtattacattctgtttaaaattttagaattacaaaataagtgttatcggacgactttcgcttattgctgccatatataacaaacatgaaatcaaagagaaatgttagtaaaactttaaacatatttctattacttataatcataaaatggtctcaaagggaatatacctttcagaatataacctttttaaattttttaatgcgatactgaattatttcaaaaattgatttattcactggcaagtaacgcctttcgtatatgcaaccttctgtaacacataatactttttccagaatggaggtggtcctggagaagtgggattacgtacaaatggtcatcccggtgacaatccattctatagcaatattgacagtatgccggacataaggcctcgaagaaaatccattcctcttgtgtctgagctggtaagttctttacaaattttccacactgtttcccttgatgcaaggatttaaacagttaattcgtaaaaataggttttactaaggcagtggcagatccaggagtacgttcagcggatttgcaatcaaattgtttgtttattcattttttttaaagtttcgtgggtcagtcactgatttcaaaaattgtatggaaaaaataaaggaaaatatattaatccaataatctacgactctgcttactctatcacactattttgaaaatgtcgtatcttacgtcgatgattttatggacggcaggttctcaaggtatagactgaagatttttaataaaaaaaagttattacaaaatgttaactagccattttatattaaacatattttctattaaccttttaaattcactgaaatatgcaaaattctattgttgtctttattttaaatgtagtttagcactttagactccataaaacacacatttaagaattaccgactaatatccgtatggtatatgaccgaaaaataaaaacaaaccctgttgtggaacgaaatctattaataatccagagcattttaaagagcaatcaaatagtccaaattaacatttcaaaatgtaagggtgaattgcagtctttacccatttttgagtatagaaagcttttgagcagaatcagtagccgagtcgatctggccatgtccgtctgtttgcccgtctgtatgaacgtccagatctcgcaaactataagacctagataaagcatgcagattctaatgatgtttgtgctgagcaagattgtttcagaagattgtcacaaagacaaaccgagcacaatataagtataaatatattatatttttgtttaagtggcgtcaatttctatgattttaatttacctcattgacgtaccctgaagaacaaaggaaatacaaaaggacgccaactataaatggttacgaatacatttaaaaaaaaattttttaaataaacaaataaataaataatgttttaataataatatttattaatacaatataatattaaattatttaatttaatatataatttcgtgcatgcgtacaaaaatacactgtagattattcaggatttcagagaataatttggtagccatcataacaccgttaaaatgctaattttgtttaacatcgcactagtaagaccctctaaagttttttcttaactgcaatataacaaaaatttgatttagaaaacaaacttctttcattttaaacaacaagaaaatatatgtgtactttatacaaaaaagacgtgtagaatttaatcaaagccttcgtaattgctatagaggagcggactggcaatatagttttgtattcgtaaaaaaggccagtgtatttggcctcattcatttcttctattgcaaactttcaaatcgatggtagcgtagaatataattcaggattacttaaattcgatgtcgtgcgaaagccagtaaacgaaatggcatacaaattgatttagtaaattccccatcttaaattaaaaataatgtaattgacgacgttgtttgtttaaaaaattaatatgtttaatgatgcatcttacgtaattaatttcgtgagtaattaataatttttgattcttttggtcaccggctatcaggcgaattatcctaatgcgccctcgaaaatggatcaatgttatctcctaagtttgcaagaaaatgtcgagaccacggttggtagataaaacacatacacgtttgaaagtatatctattataaagcatagaaagatcattacaaaaatacgaaaatcgtacagtattacagtcgtttaaaattattaagaaagtataccaatggtactcgtacataaagattcgtgcacttttaattgtatttatctcaaaactcttattattttattaactcttatttgtgttcgcattctgcctgtaacgctttttattagcgtaattaaatatttcttaagtatcttcagtagagctgtgatgaagaacgtttatttggctattatgttttaacgccgagattgaatagagatcttttaacataataaaatttattaaatgcttaaaatgaactcattgatgtctaattcctcgttacgtccctttagacaatggccgctacaaaacgaaatgctggactcacatctgctgttccacgtgcaacgctgaatgacgaagatctggtaaggccatttgcttaatttttaaatttgataaaatatacattagagctagtgcgcaaataaaatgaccgtaaaacctgttattttatagcgttggcacattttgcttgttttaaagtatctttatattttatttggtttgaacagaaggaaatgttatttgattttttttgtaatctatcgttatctgtttccaatccatagaaaatgcacgtgtacaaaaaagctctacaagccctgatatatcctatatcctcaacaacgccccacaattttttgttatggactgctacgtcaccaacgtactgctacgagtgtgagggtcttttgtgggggatagcacgacaaggggtccgttgcactgagtgcggtgtaaagtgtcatgaaaaatgtaaggaccttctgaatgcggactgcctgcagcgtaagtatattcaccacacatgtacatttaaaaagcaataaattgtatcctacaatcaaaggtgctgccgaaaaaagctcaaagcacggtgcggaagacaaggctaactcgattattacagcgatgaaagatcgtatgaagcaacgtgaacgagagaagcctgaaatttttgagttgattaggtaatattacattcaatagtaaaagttgactagtgcgtataattacagtgataaagcctttaattattttaatttcaaaaccttaagtgggggtaataagttaatctaaacaaaataatacttgatgttatgcaaactccaactcttaaatactaaaataagtaagctagtttggtaagcggccagaactattacacacaaaagaaagttaactttaaaatgggattcattcactagagccgtgttcagcgttgaggagaagagtcatgccggtcatatgaaggctgtgaagcaaagcgtcctggatggtacaagcaagtggtcggccaaaatagcaatcacaggtttgaaagtttcctctcaccgtcctagttttctgttgtcggtttaatttaagttggatgtatgtgaatgtatttgcaattcgcattggaatgacacgctgtattcattattattatattggtatgtatataaaaatacaacattggtttacaataaggaatgtgagattttgtgtaactgtatttaacctttgtattttaaaaatgtgtgatatgcatgtacgcattacatacatgtatacatgaatccacatataaaataagctgcgagtttatttctattcaaaaagtttacaatttttttattattattcagcagtcaataatcttatgtggcaaagaacaaaagcgtgtaatttggttctaaatggggccagtattatattagcctcgcggcctaatttcatgtatgggctcgccgccctaacatgtaagattcagtttttagcttttgctaaggtaaacacataaatggagtcaataagaaataagttgggcagtcctctttgttgttatgatataataatttaattttttaatctgggtacagggtaaataagtgtgcgcaccgcctggccaataaaaattagtatgttgatatttaaaaaattttcttggaatgtctaaaaacccaaatcaaaaatatatgtaactaatttaatttaaggatgacattcggtgtggatcccgatacacacatagattcattagagcaggctgagcacgcaacagttgagggaacatctaagtggtcatgcaaactaacaattacaggtacacaaacaaagccatttggcattgcttacctcatttttatgttgtcttataattttatcctttaattgcatcctaaatttttattttcaattttaccactacaaactgaattcctatcaattacttaaaagcaaagggtctttttttcttgggcttgagattaatataaataaatgcataatttgttgttttacgtgatacggggaaaaaagggtataaaccaccttactgtagttttcgtaaacgatatttaaattttattatttttacatttattttataataaattttgcttttttactttgcaaaaataatacttcaaatttgttatttctacttctaatgaacatttaattggttactaatttttatgatattatcccatatagagttataaatacccacaataacataattatatttaaagtagattgattcaaatgtaatttccttaatcactggaaatgttcctttatactttagtattatctaccgtgaatattatttatatatgaatgggctactaaaagaaaactaatgattttattttgtacttttttttaatggaaaatcaagagagaaaggtatagtcgagttccccggttaacttattacaggttaatttttccaatgctttaatattttttctctatattctaccgttattgcagaaaatgttgaaacttctcgttggcacattcactagctgggtaccggggaactcgactatattactattactattgttttaaatatatttgcataaaattgttcaaaaagttggtcagggacgggaaaaatgaattcaaaataatagttagtcagcctcttttggataatagtagctcaacatttttaatctattattcaatagcaaatacggttacagatctattaccattcgctgcgtagaccaaattgttttattgttttcaagataaaaaccaataattcggtgcattacttgaacaaaatataatttctgatgttggtataacatttctatatataaataaaggtttctaaagaaaggttgatgcttttccgtataatttttgtaaataaatttctgcttattttttcaatgttcgtattcttttatgtgttattgtactccgcagcaaaattgtaaacgtatgtcttaacacgcgtattatttttgtttcaattcacattttaggcatttaggtataattgctattgttgttggtcgaattggtttgccttttactataaaaaaaaattaacaaaaaactggatgttatgttttcatatctataatgtaataaattactcacaactaaatattttagataaataagaaaagcattaaagtatttaaaattatagcgggtttcacttctggctttgtggttttttaaattaaaaaagctgcagtatatctatgttattatttttaaagcattatttatactatatactggtccataaatattgtatttctatgatagatgttattatgtactgcgtttatcctatgatattccatgatttcttaaaagcgtatagaaaacttgcccctgatagtcaaattcttgcttttcatcttctaagctgatagggattactagtggttaaaaccccctgtaatttgaaaaacaaactctcctgactctgcttatgtataactatttaataattataggatttttagagaagaatacaataggcaataatgcgcctatacaaaaaatttaatttttgtattgtagtctttaatgaacatggaagaaagtttgtttcggcaaaccgaaacttattgcccatgcagtaataaaatttttatttaataatgcgtttttaatcaaacacatattttgtatgtatgtgtgtccaatataatcacatgtacacacacaaatgagttagtcttacttgcattaaacaccactgaattaaaaaaaaattttgtgaaatggaaaactctcttcaatgacttgcagactcggggactttttaaactactatagtttgtttgtacatataagcgcagagcagttctcagacatttacatgattgtatgtatgtatgttttagttagggcatatgtacatacataatgtacactgtttcaatgcaagttgatgtatctttttttacatgtttatgttatatagttatatcttttgaacctaatattattccttaactaatatattgcattaaactgttaatataattccttttttgtatttatacagaactgagtgttttttgttcgataaccatgcatattgccgatacaacgtacatagcttaaacacttacatacctatgtacatgtcacttgcatatttctgactagcaatcatgtgtacataaatgtatatacttatattatcttagtgattgtgtatatgtacatacatatgtgtatatgtgacagagcaatccggtcagcagcactgcactgtttctgctgagctgctttaaagatcattactaaaaagactccgtttttctctcttcttctttctcccttgaaaatcaatttctaacactgaaaataaaaaccaacaaaatttaatcattgttaaaatgcacataataaaacttcttcgtttcaacccccaaaatcgtattgaaattaaattaaaaaaaattcaaaatcctaaattgtaactattttacaatcaacacaaacatcaaatcaaaaatggcgacaatgatatgaaaacgatactttcttacatctggaacataattttaatcgtaatgcaatattcgataaccacactttaaattgttggttttcggattatggttttggaaacgatgaactgatgaattgttgaaccgactatatttgacctggtttgatgcagtgatttgtgctcaaggcctgatagcgaaggataaaagcggtaccagtgatccatatgtgacggtgcaagttagcaaggtgaaaaaacgaacgcgaacaatgccgcaggaacttaatcctgtgtggaacgagaagtttcacttgtgagtacttgtgccctaaattgaatcctttccttaaactccgcaatatcaattgtgtatgcttataaacaataattacaccaaaaatgcactctcacttatgtatactaaaattaggatcactattgttttttatgtctgaattcagaataagaaataatctagtcaagggcgacattgcaatgatcaatatattggtattggtatattgatattctatatgaaaagtttaccattaagagtatcgtttgaaaaaaggcatttgagtaatgaataatatctaacgtctttggattgatgttgttcaagaacgtgaatgtatacttaaccatcttgtttcgaattaaaacgtagaaatatcaattgaaggctcagtataagttacttattgagcaaccactacaaataatttgtttcaagatatatgatataatatatatatatataagatatatgtatatattaagtagaacgctgatttgtttttttgaataggacaaaaccgtagcgtagcgggcgaaatagacggggtttcaacagaaattccctaaaaaatttcggtgataaaaagggactattgaaagctggttaaaaaacaaataaaacaacatttctgtcaactttttcgctgaagttttacacaatttttgaaaatataaccttaggaagacttacaggaaagatcaagcagcgaaggcattatagatttgattctttctacaggccgatgaaacaaaggatctttaaattaatcaaaggcatataccaaacctttttggattgtttttaatttttcgttcccacctgatggaacataacagagctcccttaaatgatatgatttcccacaaatgttctcatacattttacacaagaaactaaattttttttaacaatacttgttaacaacctaattgcattttttgttgctatcgtctgactcaacaagcgagtttaccctatgattttgatatggcaagttggcaagtcttttaactttttttagttgaagagacatcatttaattatctttaccaatgaagtcacatatgggcttatacggaaactagactattaacgtctgtcggccgtctttttagaagtcaggaaccttaaaaggtagaaagttgagattaaactttcagattcccgagacatacgtaacgtattataaattctgtgcgaacttgaacttagaaaggtatagttcttgcaacactcatttaaatattttacggatttcaactgagaccagatctatacattttttataaagtctggactttaaattccaacgctttatttaactaaggaggtttgttacacatagatgcatagtacatagaaacacaagcgttaaaaaattatttaattgtcttataaaaaatatttatggcttccaccataatgatgcaagagtaagaggtctgtccaaataaagctagatataaaattatttagcattagaagagtatatcaaattataaaatattagaaattacacaatttttcttgaatttttaatatacatttaccaaattattgcaaatattcaaattatgataatttggcaaatgtatatacaaattataataaggtgtttacaaatgttgtattactataataaataaattattttttattgggtggatgtagcgagtgccacaactcctccgaccgcattaaggttcgtgtttgggacgaagacaatgacctaaagtcgaaactgcgccagaagttaactcgagagtcggacgactttttgggacaaacaattatcgaggttcgtactctttccggtgaaatggatgtatggtacaacctggaaaagcgcacagataaatcggccgtatcaggcgcgatacggcttcacatatctgttgaaataaagggcgaggaaaaagtagctccttaccacgtacaatatacctgtttacacgagaacctcttccattatctttgcgaagaaaataccggaatggtaagtaataaatagagtaatctattaaataaaaagtttctttctaccacatataatgcaaattgacattcatgttaaaggtcaagttgccaactcaaaaaggggacgatgcttggaagttgtattttgatgaaatacccgaagagattgtcgacgagttttcgatgcgttatggaattgagaatatttatcaagctatgacacatttccactgcttgtctgctaaatacctatgtcctggggtaccagctgtaatgagtacccttttggcaaacataaatgcttattatgctcatacgactgcttcgtcagctgtatcggccagtgatagatttgctgccagcaattttggggtaatcaatgaacaattattagtataatacgccatttaaaacggcaacctattgtttcttagaaagaaaaatttgttaagttgctggaccagttgcataactcactgaggatcgatttgtcaatgtacagaaataactttcctgcatcgagtccagaaaagctaatggatctaaaatctacagttgatttattgaccagcataacatttttccgcatgaaggtaatttaattatatataaaaatatatactaatttattatatatataccaacctaggtacaagagctatctagcccgccgagagcaagtacagtagtcaaggattgtgttaaagcatgccttagatccacttatcaattcttatttgaaaattgttatgaactgtacaacagagaatttcaggtaaacatgtataaaatatgtcggtaagcataaaatataatataattttaaaatttaaataactttaaaaatgcagacaatgtcgttcgtaagcatttcgtagacggtccgtagtaatgcccagaatataaaacggttctacttttcgaataatttgataacgccgtagtcgagttcctctcctagcatatcaccgttactcagttagcgggagtgcaactagaaatttcaaaatatatatgttgggtatagaatctacaatatctacaagatttttacaactttgaatattgtggtggttttttgtaatatgtaaatgtaatatcttgtaatataagatataatatagatatatccctcacttttttatttattgaacaacttcttgtcttacaaaacccaggttgatcccaacgaagcaaaacgtgcaccagatgatcatgaacccaagcttgatagcgtcgacttttggcataagctaatagctttaatcgtatcggtaatagatgaagacaaaaacagttacggaaccgttttaaatcaatttccgcaagagctaaatattggacaggtaaacttatttttgttgctcttgagaatacaaattttactttaatacacgtatgcagttatcagcatcttcaatgtggcatctctttgctgtggacatgaagtacgcgctcgaggagcatgagcaacatcgtctttgcaagtcatcggcttatatgaatcttcactttcgagttaagtggctatatagtaactacgtcaaagaggtgcctccctacaaaggagcggttcccgattacccagcatggttcgagccttttgtgatgcagtggctaaatgaaaatgacgacgtgtcattggaataccttcatggcgcatttaagagggataaaaaagacggggtaagactgataaaaatctttcgtgacgtaaaagagacctgctcgagaacgtatctcataaagatatgaaatttatgtattacctaatttaagttcttttatcattttggaaatagttgggtgctatttgtgcagaatctcgcaataatttacttgttatgttttatgttgaccataaccatatctctttcattcatcatccggaaaggacgcgtttaatttttgagtttattatgtgcaagatatgatcccctatgtacctaagcctgatatataactatattgatacaagttgagtaaaaggttaaatgtatattaggttcgttgaaacaggcaggtactacagataatatgttgagacttagcatgccgcttcaagaggcatagacgcagcacaagtttgttttcaaatgtcccaacgcccacttcaaagttagatagtttttcatatttttatttgtctttttttttttttaaagtagacataatatagtaaaatggtaagccgtcaagaaaaactaaccaaatgatagttaacctattcaaaatactttatggcatcactataattatattttcaaattgggtgatctaacatctggtaggaaatccctcaaccgatgaagatatcacctatcatcgcatgaatattttgtttacttgagcaggtttttaaatgataaaatttatattataaccagttccttaattaaaactaattgcattgtgttgtagtttcaaaagagcagcgagcacgcgctcttttcaaattctgtagtcgacgtttttacgcaattgacgcagtgtttcgatgttgttagcaaactcgagtgtcctgatccagaaatttggaaacgttacatgagacgttttgctaaaacaatcgtaaaagtgctaatagcctatgcggatattgtgaaacttgagtttccagagcatatgaaggatgaaagaattgtgagtagaaaaataagtcgagttttatttcgatgagacgtatccattacgattatgcccccatttttcccctctgcggtaataggcttgcatacttatgaacaacattcagcaactaagggtgcagctagaaaaaatgtttgagtctatgggtggggataagctagaggaggatgcagccaatattttgaaagaacttcagcaaaatcttaactctgcgttggacgacttagcttcacaattcgctatcaggtttgtttcactagacatcaaagttacgaaagaggacaaaatatatttttaatttaaacatctttagtttggagccacgaataactcaatcagtgcgagaacttggagacatgctgctttctattaaaggaggcagtggaacccttgctgctggtaatcttgcagctcaaaggaacgcggtcgccgttgaggccgatgaagttttaaggccgcttatggatttacttgatggctctttaactctctatgcgcaatcatgtgaaaaaaccgtgttgaagaggttactaaaggagttatggaagatcgtaatgcgaatattagagaaaacaattgttttaccacctatgactgataaaactgttcgttatataactctatggaaattatagaaatatttaattaatatctacttttttaaatagatgatgtttaaacaccttactgacaatgcaaaaaacttggcatcgaatgcaaaaattgaagacatgggtcgtttgttcaagtcacatatggcaggaaagcaggatgttaagagtgctctgagcggggtaatggacatatcaaaagaagtagaaaaaaacttgtcacccaagcaatgcgcagtgcttgatgttgccttagatacaataaaacaatactttcacgcgggtggcaatggactgaaaaagacctttctcgaaaagtcgcccgagcttcagagtttacgttacgcactcagtttatatacacaaatgaccgacacactaatcaaaacctttatatctagccaagttcacgagggtaagtgaaacttaaagtaatcctgcataatgactgttggcatcttttttcttaaacacttttaattttaaaatttttacaatttttggtaatacattaattataagtacttcattattacgttgtcaatttcgagaatgcggcgtcaacttctacgttagggttaagaaagttgaggatttttattttatttcttatttgagaatgtattttgccattttttatcggtaaaccaaaattattttgaccacgtccaccctttgggccataatccgccaccagctgtcacaccaaagacattactattttttgcaaacttgtttcttgctggcttttgagctggttctatattgcggatagagaaatcggaagcgtttttgtgtttaagagtactctaaagcgtttcacaatacatcgctgcatcggcgatttcttctctgcacagccgatccaaaaagaaacctagtcaaagggaaaggaatttgcagacgattctttttctgagagacacgccccctttttgcggattgtcgtgcgattaagtttttgtgcgtatgagcgtatgcgatggtgtttaaatgcttaacattgtcgtagtgatgaatcgcaggataatccggtttataattttcgcttgttttcatacaacttgagtgttttcttaactttagaaacattggttttgcaatatgcagccattgttctgagggacccaaaaatcatgcttgctccgctcgtacccaccctagggatttatttttccatattttaaaaaatgctttaattttttaccttaaaaatgctgtcacgctttaatgtttttattagattattatatttatttgaaaatgtatatcgatattgaaaaataaatttttaatttcaccctcgcatacgcactagccgagtatcgggtatctgattgtctaggaactcacatatcttgttaattctattttgttaacttattttcattacttatatgtagtcgatctagaaaactcagaggaaagtgttggggaaatatccgtgcaaatagacttattttcccatcccggcaccggtgaacataaagtaaacgtgaaaggtgagttcaaaatattgccattatatatatgccattacattttttcctttagttgttgctgctaatgaccttaaatggcaaataccatcgggtatgttcagaccatttgttgacattaatttaataggaccgcacctgcaagaaaaaaaaaggaagttcgctacaaagtcgaagtctaacaactggtcgcctaaatacaacgaatctttcagcttgtaagaccctttatcaaaaggtaaaaagttaaataaattttcataaaatgttttacttataccagcaccattggaaatgaggagcagctggacttctttgaattgcacatttgcgttaaggactattgttttgctcgtgatgaccgacttgtgggcgtggctgtaattccattaaaagatatatcggaaaaggtatgcagtactaataacatattacgagagtaataaagtacatttatgtgtattatgaataatagggatcggtcgcatgctggttacccttaatgagacgaattgaaatggacgaaacgggctggaccattttaagaattttgtcacagcgaaataatgatgaagtggccaaggaatttgtcaagcttaaatcggaaatacggcaggagccaaccatgggtacataaaccgggcacatcgtactaccaaatcctcaaaacttcaacaatattaaatacaacataacattgtttaattggacaaaacaactttatttgaatttattctttggacaggtttttattacaagaaatcctaggcaacaatgctagttgaagaaatcatgcataatatatgaatataaatatatatctaaacttaaagtatgataaaaaaatatgtatatgtctggtcaggtatacagaaataatacgtttattaggttaaatatttatgttttaagcaactttaaaatgcgcacccacacacttgcaaaaaaaaattgtaatatttctgtcttttggcacttgtacatttgtacataatgcagggcagtcactgaattagttatttttaaattcattatcatctgtacattctaaactcacaacacgcacattcctatttatgtaaataagtacctgtataataattaattggtaattcttgaacaaatttgttaaagattcttcacataagtccatgtgaatctttatttttttctattgcaataaaataaagtatattacgtaaatcgtggaaataataattaacatgttaagatgatccttaagcaaacctctaaatgtggatgtgcaggtcttcatagtatggaagtaatatctttaatataactttaatttatatttatttatttatatttatatttatatttaagtgtgtctcagtaggggctaaataattctaaactagctctgggggcgtaaagtaatagatgcagacaccagcttaggttttgttgagccggtagcttatccaaaaggacgaaaagtctcataaatcgtatggcacattgtaatacttgaagaggtcttggctttatccttgtcaaatgctaacccaatgagttgggccctcaataattaataaaagttctaaaaacgagcacaataacaatacaacacatatatctccttcttgttgtgaattttaattctgtcgagcatgccgagtgtgtatatatttggacttataactttagagtaattaaatgcttaaacaagaataataacaaaaatgtatgtatttatacacgttcctcgtagagtaaattcgttgaaaagtatgtaacaggcggaaggaagcatttccgattatataaagtatatatattcttgatcaggatcaatagccgagtcaatgtagccatgtccatatgtccgtatgaacgtcgaggttttttctagtctaacgccttgaagccgccgaaccagtcactcccacaatttggaaaatttttaaaattttttttcattttatttcccaaaatctattgatataccgaaaaatgatgaaattttgcgttcgcattcacacttgctgagtaacgggtactcggggtactcgattatagcatagcattctctctggttttttactaaacatttatttcattttaaagtgcagtctttaaaaataaaataataaatagcttctgtttgcaaaataatataaacacacatttatatatgtattccatatgaatgtcaaaatcagttgctagaatttgtaag

SEQ ID NO: 40373 - DNA, 7843 bp, DROSOPHILA
tagacatgaatcagaacttaagctcaggagaatgtggttattataagccatctcaggcacaacaaaaagctagtgtagtagcatccgcagcaagtagtgttcttgacggaatttcaaagggcttaaaaggggggctggacggcgtttttagtggtgtcagttcaacagttgatgtcactcaatcaaatcccagttccaaaagaggttttagctttaacttagcatcaaagattgtgccaagtgtcggtggattgctaactagtacaagttccacctctataaaacaaacaggatcagaaactaatcctaccctaatattgatttcacctgaaaatgtttctagtcgtaacagtaattatatacctacgacatctccatcttgtactcaaaaaaatggcgaggaaaatttatattcggctacagtccacaataagtcaacgaaatcgaattcatactataatgaagtgggagaaattagttcgaccttagtcagaaatgtttgtgacagttacgataatagctatgatgagatgattttaaccaacgaaatggtaaatatagggatgctcgacagtgaatctgagtttggcttaatagaaaattcatattcgtatcaggtaccagacaatgagcaaatcgacagtgttaactcgtataataataagacccaaaatgtaacaaataatggcatagaaaaggcaaatacaaaaaataaaccagtgcctcttcatgaccctcctacgaaaaaagcaagtactgttggcatgttcggatcaattttgggaaaagctgctgcagcagtgcaatcagcaacgcaagcagtcaatcaaagtgcgtcgtcagtggcatcagtcgttgcacaaaagccaacaatcgtaccgagaacgaacaacgtgcttttgttgtctagcgtatgctcacctaacgagattaaaagaaattcaagttcagtagaatttgattcagaatatggatatcaaatgcccgatgtagagtctctatcaagccattacgcaaatactggcggtgattatgataatagtaatatgaaaatacatgaatttggtacatatgcagatgatagaccatacgcagattatcatacgaatggcaatcaaagccaatttaaagaagaggcggtgattcctggggaacctgaagtaattaatacaaacatactcccgattggcccgcaggccaccggcaaaaaacttcctaccgtcaatggtaaatcggcgttacttattaaacagatgccgacggaggtatatgatgatgaatcagatacagatgaattagatgtcagtccatcaaccggaaaagtacctagctatagcatttatagtgagcaggaagattactacatggatcttcagcaaacgacaccgtcaattcagccaaacggtttttatgaacaagtcaataatggttatgactaccgagaggattactttaacgaggaggatgaatataagtatctcgagcagcagagggagcaagaggaacataatcagccgaagaacaagaaatatctgaagcaggccaaaatatcaaaaatacaaccaccatcattagatttcattgacgtagggcaagacgatgactttatatacgacaactatcacagcgaagacgatagcggaaattacctagagggaagctccagtggaagcgttggtcctattgaagggtcaatcataaaggtggactcgaatatagaagcttcgtttgcttcgctcaacaagaagagtgactctttcacaccgacaaacgattcccttcaaaagcatgacactgttattggtgaatcaacaaccaaacttacgcgccttaggacagaaaaaatgtgcccagacgtagacgaagaagatgaaaacctaagcgatcacgtttccgatcttactgacttaagtaaactaatctcacaaaaaaaaaaaacgctcttgagaggagaaactgaagaagtcgtaggaggacacatgcaggtgttacgccaaacggaaatcacagctcggcaacgatggcattgggcttacaataaaataatcatgcagcttaataaaaattcacccattgaaatgccaaagattctcttagaaacggcatgcaatcaagaactcaatttagcacattctgacgacgatgttgataagaacatactggcaaactcggccaaagactatgtaaatgcccccacatttagtatattaaagacagttgaagatgcttccgaaccaacgatgacaccactccatacaacaacaacgacaaacagcagtcttaatgtcacaagcgctttatgggtcacgcagcagtgcttagaccttccaaactatcccgggtgggggtcgcgagaagatgacgataaccgcagtcagcattctgctcgcactctatcttcttctcgtcgacaaagcactgaggatagcattgatacagacgacgaatacttttattatgagcttcgccagttagaagagcaagaaaagcagagggcgcacaattctgcaattccatcttgtgaacgacaaaatgataatgatgtgttgttttcacaaattggacaacttcttcaaaacgatgttaacggaggagacggttttcgccattctaatgggtgtaatgatggggaagacgctattattttttctccaagtgaaagtgttaagttacgaatgtctgaagtgtttaaggaactgaaaagcgtggttagtttaaacccaagcgttaataatgacgcgacttttgagggcgttcctattgtaaaaccaacatatgaaaaacttgagacagtctccgacttgcatagcgcttggcaggatgttaatggtgatttacaaattgcagcttcagacatcgattctaatgaagatctagttggaaataagggtagggaaactccaacttataacaaacagcgaaaattgagacggttaaagaaaaaaactcgcgatcgtaaaataaatatatctaagaatgcaaccagttccagttcctcttgccattcagaaaatgaatgtaatacaccccttggtcaatgtacccagaaatcggtggcagaaaaagatacaaatgatatatcaaataaatcggaggcttctagcgagacatcaggaccagatacgccggcagagcttagcgatgttgatataagcgaaactgaaaacggtttgagggctgacgacggccagaatatagataacatgcgtggaaattcagggtctcttttaaaggtgaatcggaagtacctattacaatttgatgttgaccatagtttaataaaccagcccctggaaacatctcagtataatacgcacatgttggagaatattacaagtgcgtcaattccatcgcagaatcgccaaatagactcaaaaacgttaatgagtcaaagctcacatgcggatggatcccaggctgtaggcaatgaaaccgctgtaggtctaagcagtagcaagtggaaattgttaaaaactttaaaagagcgcaagatcgaggaaaaaaataatcaagataaaataaaagaagatgaaatgataaaggacagggacaaggtaaatggaggtggtcctggagaagtgggattacgtacaaatggtcatcccggtgacaatccattctatagcaatattgacagtatgccggacataaggcctcgaagaaaatccattcctcttgtgtctgagctgacaatggccgctacaaaacgaaatgctggactcacatctgctgttccacgtgcaacgctgaatgacgaagatctgaaaatgcacgtgtacaaaaaagctctacaagccctgatatatcctatatcctcaacaacgccccacaattttttgttatggactgctacgtcaccaacgtactgctacgagtgtgagggtcttttgtgggggatagcacgacaaggggtccgttgcactgagtgcggtgtaaagtgtcatgaaaaatgtaaggaccttctgaatgcggactgcctgcagcgtgctgccgaaaaaagctcaaagcacggtgcggaagacaaggctaactcgattattacagcgatgaaagatcgtatgaagcaacgtgaacgagagaagcctgaaatttttgagttgattagagccgtgttcagcgttgaggagaagagtcatgccggtcatatgaaggctgtgaagcaaagcgtcctggatggtacaagcaagtggtcggccaaaatagcaatcacagtgatttgtgctcaaggcctgatagcgaaggataaaagcggtaccagtgatccatatgtgacggtgcaagttagcaaggtgaaaaaacgaacgcgaacaatgccgcaggaacttaatcctgtgtggaacgagaagtttcacttcgagtgccacaactcctccgaccgcattaaggttcgtgtttgggacgaagacaatgacctaaagtcgaaactgcgccagaagttaactcgagagtcggacgactttttgggacaaacaattatcgaggttcgtactctttccggtgaaatggatgtatggtacaacctggaaaagcgcacagataaatcggccgtatcaggcgcgatacggcttcacatatctgttgaaataaagggcgaggaaaaagtagctccttaccacgtacaatatacctgtttacacgagaacctcttccattatctttgcgaagaaaataccggaatggtcaagttgccaactcaaaaaggggacgatgcttggaagttgtattttgatgaaatacccgaagagattgtcgacgagttttcgatgcgttatggaattgagaatatttatcaagctatgacacatttccactgcttgtctgctaaatacctatgtcctggggtaccagctgtaatgagtacccttttggcaaacataaatgcttattatgctcatacgactgcttcgtcagctgtatcggccagtgatagatttgctgccagcaattttgggaaagaaaaatttgttaagttgctggaccagttgcataactcactgaggatcgatttgtcaatgtacagaaataactttcctgcatcgagtccagaaaagctaatggatctaaaatctacagttgatttattgaccagcataacatttttccgcatgaaggtacaagagctatctagcccgccgagagcaagtacagtagtcaaggattgtgttaaagcatgccttagatccacttatcaattcttatttgaaaattgttatgaactgtacaacagagaatttcaggttgatcccaacgaagcaaaacgtgcaccagatgatcatgaacccaagcttgatagcgtcgacttttggcataagctaatagctttaatcgtatcggtaatagatgaagacaaaaacagttacggaaccgttttaaatcaatttccgcaagagctaaatattggacagttatcagcatcttcaatgtggcatctctttgctgtggacatgaagtacgcgctcgaggagcatgagcaacatcgtctttgcaagtcatcggcttatatgaatcttcactttcgagttaagtggctatatagtaactacgtcaaagaggtgcctccctacaaaggagcggttcccgattacccagcatggttcgagccttttgtgatgcagtggctaaatgaaaatgacgacgtgtcattggaataccttcatggcgcatttaagagggataaaaaagacgggtttcaaaagagcagcgagcacgcgctcttttcaaattctgtagtcgacgtttttacgcaattgacgcagtgtttcgatgttgttagcaaactcgagtgtcctgatccagaaatttggaaacgttacatgagacgttttgctaaaacaatcgtaaaagtgctaatagcctatgcggatattgtgaaacttgagtttccagagcatatgaaggatgaaagaattgcttgcatacttatgaacaacattcagcaactaagggtgcagctagaaaaaatgtttgagtctatgggtggggataagctagaggaggatgcagccaatattttgaaagaacttcagcaaaatcttaactctgcgttggacgacttagcttcacaattcgctatcagtttggagccacgaataactcaatcagtgcgagaacttggagacatgctgctttctattaaaggaggcagtggaacccttgctgctggtaatcttgcagctcaaaggaacgcggtcgccgttgaggccgatgaagttttaaggccgcttatggatttacttgatggctctttaactctctatgcgcaatcatgtgaaaaaaccgtgttgaagaggttactaaaggagttatggaagatcgtaatgcgaatattagagaaaacaattgttttaccacctatgactgataaaactatgatgtttaaacaccttactgacaatgcaaaaaacttggcatcgaatgcaaaaattgaagacatgggtcgtttgttcaagtcacatatggcaggaaagcaggatgttaagagtgctctgagcggggtaatggacatatcaaaagaagtagaaaaaaacttgtcacccaagcaatgcgcagtgcttgatgttgccttagatacaataaaacaatactttcacgcgggtggcaatggactgaaaaagacctttctcgaaaagtcgcccgagcttcagagtttacgttacgcactcagtttatatacacaaatgaccgacacactaatcaaaacctttatatctagccaagttcacgaggtcgatctagaaaactcagaggaaagtgttggggaaatatccgtgcaaatagacttattttcccatcccggcaccggtgaacataaagtaaacgtgaaagttgttgctgctaatgaccttaaatggcaaataccatcgggtatgttcagaccatttgttgacattaatttaataggaccgcacctgcaagaaaaaaaaaggaagttcgctacaaagtcgaagtctaacaactggtcgcctaaatacaacgaatctttcagcttcaccattggaaatgaggagcagctggacttctttgaattgcacatttgcgttaaggactattgttttgctcgtgatgaccgacttgtgggcgtggctgtaattccattaaaagatatatcggaaaagggatcggtcgcatgctggttacccttaatgagacgaattgaaatggacgaaacgggctggaccattttaagaattttgtcacagcgaaataatgatgaagtggccaaggaatttgtcaagcttaaatcggaaatacggcaggagccaaccatgggtacataaaccgggcacatcgtactaccaaatcctcaaaacttcaacaatattaaatacaacataacattgtttaattggacaaaacaactttatttgaatttattctttggacaggtttttattacaagaaatcctaggcaacaatgctagttgaagaaatcatgcataatatatgaatataaatatatatctaaacttaaagtatgataaaaaaatatgtatatgtctggtcaggtatacagaaataatacgtttattaggttaaatatttatgttttaagcaactttaaaatgcgcacccacacacttgcaaaaaaaaattgtaatatttctgtcttttggcacttgtacatttgtacataatgcagggcagtcactgaattagttatttttaaattcattatcatctgtacattctaaactcacaacacgcacattcctatttatgtaaataagtacctgtataataattaattggtaattcttgaacaaatttgttaaagattcttcacataagtccatgtgaatctttatttttttctattgcaataaaataaagtatattacgtaaa

SEQ ID NO: 40374 - protein, 1810 aa, DROSOPHILA
MCPDVDEEDENLSDHVSDLTDLSKLISQKKKTLLRGETEEVVGGHMQVLRQTEITARQRWHWAYNKIIMQLNKNSPIEMPKILLETACNQELNLAHSDDDVDKNILANSAKDYVNAPTFSILKTVEDASEPTMTPLHTTTTTNSSLNVTSALWVTQQCLDLPNYPGWGSREDDDNRSQHSARTLSSSRRQSTEDSIDTDDEYFYYELRQLEEQEKQRAHNSAIPSCERQNDNDVLFSQIGQLLQNDVNGGDGFRHSNGCNDGEDAIIFSPSESVKLRMSEVFKELKSVVSLNPSVNNDATFEGVPIVKPTYEKLETVSDLHSAWQDVNGDLQIAASDIDSNEDLVGNKGRETPTYNKQRKLRRLKKKTRDRKINISKNATSSSSSCHSENECNTPLGQCTQKSVAEKDTNDISNKSEASSETSGPDTPAELSDVDISETENGLRADDGQNIDNMRGNSGSLLKVNRKYLLQFDVDHSLINQPLETSQYNTHMLENITSASIPSQNRQIDSKTLMSQSSHADGSQAVGNETAVGLSSSKWKLLKTLKERKIEEKNNQDKIKEDEMIKDRDKVNGGGPGEVGLRTNGHPGDNPFYSNIDSMPDIRPRRKSIPLVSELTMAATKRNAGLTSAVPRATLNDEDLKMHVYKKALQALIYPISSTTPHNFLLWTATSPTYCYECEGLLWGIARQGVRCTECGVKCHEKCKDLLNADCLQRAAEKSSKHGAEDKANSIITAMKDRMKQREREKPEIFELIRAVFSVEEKSHAGHMKAVKQSVLDGTSKWSAKIAITVICAQGLIAKDKSGTSDPYVTVQVSKVKKRTRTMPQELNPVWNEKFHFECHNSSDRIKVRVWDEDNDLKSKLRQKLTRESDDFLGQTIIEVRTLSGEMDVWYNLEKRTDKSAVSGAIRLHISVEIKGEEKVAPYHVQYTCLHENLFHYLCEENTGMVKLPTQKGDDAWKLYFDEIPEEIVDEFSMRYGIENIYQAMTHFHCLSAKYLCPGVPAVMSTLLANINAYYAHTTASSAVSASDRFAASNFGKEKFVKLLDQLHNSLRIDLSMYRNNFPASSPEKLMDLKSTVDLLTSITFFRMKVQELSSPPRASTVVKDCVKACLRSTYQFLFENCYELYNREFQVDPNEAKRAPDDHEPKLDSVDFWHKLIALIVSVIDEDKNSYGTVLNQFPQELNIGQLSASSMWHLFAVDMKYALEEHEQHRLCKSSAYMNLHFRVKWLYSNYVKEVPPYKGAVPDYPAWFEPFVMQWLNENDDVSLEYLHGAFKRDKKDGFQKSSEHALFSNSVVDVFTQLTQCFDVVSKLECPDPEIWKRYMRRFAKTIVKVLIAYADIVKLEFPEHMKDERIACILMNNIQQLRVQLEKMFESMGGDKLEEDAANILKELQQNLNSALDDLASQFAISLEPRITQSVRELGDMLLSIKGGSGTLAAGNLAAQRNAVAVEADEVLRPLMDLLDGSLTLYAQSCEKTVLKRLLKELWKIVMRILEKTIVLPPMTDKTMMFKHLTDNAKNLASNAKIEDMGRLFKSHMAGKQDVKSALSGVMDISKEVEKNLSPKQCAVLDVALDTIKQYFHAGGNGLKKTFLEKSPELQSLRYALSLYTQMTDTLIKTFISSQVHEVDLENSEESVGEISVQIDLFSHPGTGEHKVNVKVVAANDLKWQIPSGMFRPFVDINLIGPHLQEKKRKFATKSKSNNWSPKYNESFSFTIGNEEQLDFFELHICVKDYCFARDDRLVGVAVIPLKDISEKGSVACWLPLMRRIEMDETGWTILRILSQRNNDEVAKEFVKLKSEIRQEPTMGT

SEQ ID NO: 40375 - DNA, 4945 bp, DROSOPHILA
gccctcttatcatttaggttcaaatggagggcattgagatttttccattcactatcattatactcactgctcggataattagccattagacgcttttgaaacattgggatgctggacaaactaactagttggctgactgattagcggagctgcctccacgatgacgcacattgttcgttagtgcagttgccatggattcgcccctaagaattcccatttaccacctgccattgagatgcccaataaaagcgatgggcggcgagcagagatggatgaacttctgactatcgtttacagaaattatatggctggtggggtatgaggaaaatagtaaggtcagctggaaagttgcttaaattatgtggtaaaattaccaaacttcagccacaaactgccaattaaaaacagttcaactatagtcactaagttttgaaattcgttttaaattcgttattctatcatttatattccaactctactaccactgagaaaacgcaaccattaaggtgaaagtgaggttttcttatgaggatatgcagaaatggttcaccatgacctgcatgggaataattaatgccggttcagggcttccaacctgaaaccgcactcgtgccgggcatttcatcctgttccatttcctagtcggtggttagtccaatctaatggcgtgtgagtgtatttgcgtaagcggattaacagcggtcaaatgtgtggatgcactttcagaaaagttactttatgttcgcagaattacaaatgttgccatacgtattgaatgcaaaagttctatggattcattttgaaaatactattgtgctgcctattttttttttactattaaaaatacaacattactataaaaatctattttcatccggtactgaaagggctactattttggtttatttctttgagtgtaaagtgggagagcaaataagtgaagcagcagtttcttttcccgctaaaagtccaaggtagccaagcaacaaaaccttctatttaccgcagagaagaaaagcagagttcccataaccaaagtccctcgataattgggagaagatgagtggtctgggtccggcagcctgttggctggcccacaagcgcatcgagtcctggtcgcgaatggccaaggagcgagtgggagcggtgcgtcgcgttactctcgatcggaattcggcggatgaggggacaccgagtgggagtggtgcctcctccactgccgggggcaatggggtttcggtggtgcacattctgccgattggcgagggctccaccaccccaccgccgcaacccatgaccccgccgccgtcggcctcgtcggtcacatcgaccaccagcggaattggcagcgtttcagccggtagtgtcagcgatagctgtgatttgcccacggactcggaggttcttataactgggaattgccactagtggacccttctaatctatcccatttattcgattccctcaggaggtggctattgccaaggaatgccaacccatccagccggccagtcagctgcatggaatgcacggcggcatgggcctaaaccatcaccacatgggcacagtttcggccaccggaacggacatcttgcgcggacccgccgaagtgttccacagtccgcttcacttgcatcaccaaagtcgctcctttccgccgcgcctccagcgcacgccgtccatctccagccagagcagcgtggacagcgccccatccaggcattcggtatgtgtgactatgaactaattgatattactatagtactatactattactgtgtacttaatatcgcagggtcatcgaggctcttcaccacagataaggacttttggaccagacggacgaagctcgctgccaagtgagcctggatttccgcaccatttggccaggtcacccagtcccatgcgaaccatttctttggatgctcgctgcggcagtcccgcccactcggcggatcctggtgatctgaggacgcccagtccctcgcagagcagcttggcatctttggccggtggatcgggaatgggaggcagcagtgcgggaaagggcgtggctggaggtcgttgcctttcgccgctgctaataccgcccagatcgcagcccggagtggatcccgcaatgggacccgcttctccactgggtgcccttcaaccagatctctatcgaatgccggacggacccgtttacctaacagctccggaatccagtcacgccgtgggtcgtttgcatttgcgcgttaagtacgactaccacctgttcgatctgacggttcatctgattgaaggtaatattcgtgttaaaattataattgaaatatatgtaaattttatttaacaaaatttattacaacaaattttaagtaaattaataacaaaaaaactcaactaaaaaacatccattagccataacaaaccattatttaagcggattaatattaattattggtgattattattcgctaaataaatattgatagtatttggttctgacctctaccgcatcgccattgttaagactcaagaattccgccgtatcattttctgcgattcgaagggtacgcgtcatgaaatatatatttctcagatcaagtttataataatgggcgtaggctttcataactctatgcatcggcatagagcggttaatattaaattctaaaactcttctctccacacaacgtaacttgatgttaatgcggcgcattcttatagtacttagtacttagtttatggaaaagattttgtaatattattgtagcatatggattcgatgacttgtaaagctgtgtatgccacgataatatttagttggatctatcttgagtttgtgttttatcaaggcattaattttgttttccttttcagctcacaatctcagccccatcgaagagggtggattccgggatccctatgtccgcctgatgttgcaaccagaagtggacagccggaagcgacagacccacattcacaggggcgaatccaatccctactttgaccagcatttcaagttcccggtttctcgggatcagctccagggcaaggaactgatcctccaagtgctcgactacgatcgctattcgcacaacgacattatcggcgaggttcgcatctctgtggatggcctagatctctccaagtcagtggaggtaagtaatggatgtggatttattaagacaactaaaagtaatacaaaatatatccagatttggggagacttgctgcgtaccaagaaacccaaggaggatcgaccggaactgctgtgctccttgaactatttgccgcaggccgagcgattgacggttgtcattatgaaggctagaaatttggatactcttcaggaaccatatgtcaaggtgaatattaatattaaatattaaacaataatgaatgtgaaccacaataatgaaaatgtcttaaacacattaaatcatactgctgattttcttccagatttatctgattcaaaatggcaaacgcatcaagaagaagaagacgagcattacaaagtcggacgatcccaccaatcccatttggaacgaggcgttcacgtttaatttgcaatcaaattatcttcacaatgcagccatcgaggtaacctttagcctttgcctttccacgtggaccaggccataaaccggtggtctgcgccgcttttaacagctccggctgctaattccgggcaatagccccggtttaatgcccggccgtgttttaattgaaatccgcccgttactccactccactccactccattctactctacatatacattttctgctatattttatatctcggcagatctatgtggtgggtgccgggagcgaggccacggaaatcggatgctgcggactgggcccccaggaaagtggaactggatgccagcactggcacgatatgattaacaatgcccgaaaacctacggctatgtggcactatatccgctagggccatccataatgaatgctggattatgaattatgatttttccaaaaaggaaacattcaattgctcctctcattgcgtctatataggtgtactactaatgtaaccgtgtctgtgtgaattttccaattgcatttttgggcgcttcgccgccccccaaagcttaaaatgttctacgatatcaaaatctcatctatatttaactatatatatatggatatgaatggacaatatatatatatatatatatacatatgcagctaactagccctccaagaagctcaatcaaaagttcctaagcaacgacagaatcttcgaaaaaaaaaaaacccacgaattatgagtatttgtgggtaattggttgaacggtttgatttttgttcttgttgtgcattttgtgcaacctcttgggaaaatagcacacacacacacacaaaaccagaagagaaccgagtacggatacaataggaaattggtaatcgcacatccaaaactgtcagccagacttgttgacatttccatcgacttcagcagacactcgaggagcctgccgcctcctttttcatccttctacgctcaaggaaggcattcaagtgtgcatttcttaaataattatgaatacaccgcaccgggaataataataataataataattcgtatataggtgaatggtcgtcaatcatgcaggaagccaaaactcgaggcaggactcgcccttttgtgccggcgacagttgacaaattgccatcgtcgtcctgttgtccttttgccattcgatcctgtatgcgtttgtcgtttcgtcgtcaactgtttgacagcttagcccgcagtatacaaaaaagcgacgagagcgagaggtgtagagaacttatgctaattgttaagttaaatacatttattccttccagccgagtacgtctatcacaaggaacaccaaagagaatttctcgagcacttgaacccaatttatatgtacttacaacgagtatttcaaggcatatga

SEQ ID NO: 40376 - DNA, 1868 bp, DROSOPHILA
taccgcagagaagaaaagcagagttcccataaccaaagtccctcgataattgggagaagatgagtggtctgggtccggcagcctgttggctggcccacaagcgcatcgagtcctggtcgcgaatggccaaggagcgagtgggagcggtgcgtcgcgttactctcgatcggaattcggcggatgaggggacaccgagtgggagtggtgcctcctccactgccgggggcaatggggtttcggtggtgcacattctgccgattggcgagggctccaccaccccaccgccgcaacccatgaccccgccgccgtcggcctcgtcggtcacatcgaccaccagcggaattggcagcgtttcagccggtagtgtcagcgatagctgtgatttgcccacggactcggaggaggtggctattgccaaggaatgccaacccatccagccggccagtcagctgcatggaatgcacggcggcatgggcctaaaccatcaccacatgggcacagtttcggccaccggaacggacatcttgcgcggacccgccgaagtgttccacagtccgcttcacttgcatcaccaaagtcgctcctttccgccgcgcctccagcgcacgccgtccatctccagccagagcagcgtggacagcgccccatccaggcattcgggtcatcgaggctcttcaccacagataaggacttttggaccagacggacgaagctcgctgccaagtgagcctggatttccgcaccatttggccaggtcacccagtcccatgcgaaccatttctttggatgctcgctgcggcagtcccgcccactcggcggatcctggtgatctgaggacgcccagtccctcgcagagcagcttggcatctttggccggtggatcgggaatgggaggcagcagtgcgggaaagggcgtggctggaggtcgttgcctttcgccgctgctaataccgcccagatcgcagcccggagtggatcccgcaatgggacccgcttctccactgggtgcccttcaaccagatctctatcgaatgccggacggacccgtttacctaacagctccggaatccagtcacgccgtgggtcgtttgcatttgcgcgttaagtacgactaccacctgttcgatctgacggttcatctgattgaagctcacaatctcagccccatcgaagagggtggattccgggatccctatgtccgcctgatgttgcaaccagaagtggacagccggaagcgacagacccacattcacaggggcgaatccaatccctactttgaccagcatttcaagttcccggtttctcgggatcagctccagggcaaggaactgatcctccaagtgctcgactacgatcgctattcgcacaacgacattatcggcgaggttcgcatctctgtggatggcctagatctctccaagtcagtggagatttggggagacttgctgcgtaccaagaaacccaaggaggatcgaccggaactgctgtgctccttgaactatttgccgcaggccgagcgattgacggttgtcattatgaaggctagaaatttggatactcttcaggaaccatatgtcaagatttatctgattcaaaatggcaaacgcatcaagaagaagaagacgagcattacaaagtcggacgatcccaccaatcccatttggaacgaggcgttcacgtttaatttgcaatcaaattatcttcacaatgcagccatcgagatctatgtggtgggtgccgggagcgaggccacggaaatcggatgctgcggactgggcccccaggaaagtggaactggatgccagcactggcacgatatgattaacaatgcccgaaaacctacggctatgtggcactatatccgctag

SEQ ID NO: 40377 - protein, 602 aa, DROSOPHILA
MSGLGPAACWLAHKRIESWSRMAKERVGAVRRVTLDRNSADEGTPSGSGASSTAGGNGVSVVHILPIGEGSTTPPPQPMTPPPSASSVTSTTSGIGSVSAGSVSDSCDLPTDSEEVAIAKECQPIQPASQLHGMHGGMGLNHHHMGTVSATGTDILRGPAEVFHSPLHLHHQSRSFPPRLQRTPSISSQSSVDSAPSRHSGHRGSSPQIRTFGPDGRSSLPSEPGFPHHLARSPSPMRTISLDARCGSPAHSADPGDLRTPSPSQSSLASLAGGSGMGGSSAGKGVAGGRCLSPLLIPPRSQPGVDPAMGPASPLGALQPDLYRMPDGPVYLTAPESSHAVGRLHLRVKYDYHLFDLTVHLIEAHNLSPIEEGGFRDPYVRLMLQPEVDSRKRQTHIHRGESNPYFDQHFKFPVSRDQLQGKELILQVLDYDRYSHNDIIGEVRISVDGLDLSKSVEIWGDLLRTKKPKEDRPELLCSLNYLPQAERLTVVIMKARNLDTLQEPYVKIYLIQNGKRIKKKKTSITKSDDPTNPIWNEAFTFNLQSNYLHNAAIEIYVVGAGSEATEIGCCGLGPQESGTGCQHWHDMINNARKPTAMWHYIR

SEQ ID NO: 40378 - DNA, 4585 bp, DROSOPHILA
catcataagtagtgttaaattccagttcaaaactatacacgagactttttcgaaacggttgaattgcaaatgggaagtgaacgaaaacaagaacgatcatgttaagtatacgtaaactatcgatagtagttgagcacggcaaggcaaggttgcattttgatgacagtagcgaaatagtattagcaatttttaagactaatcaaaacacaaacagagacaaaatggttttttccaaatctttttactgctagacgagagaacaaatttagaagaactagagataaagtagaggtagtgttgaactagtcgagttgttagtagttgagtgcattattggatcgtcaattacgaggagagctggacgatgcaaaggtttgtttgcagatttaaacttttcattggggaacaagatcggtaacgtagcgtagagcagttaggacaaaaaactttgcaaatttatagtctagtctaagccataactctgtgttttctgagctttttccaattgctgttgtgaactactaccattagcgacccttccagaaatgcattctttttacgtgtataaccgtcctaaatgttactactttatcaacttgctatgtcgatatacgtgtgtaactggttttaaaaatgtttgtgtgcatctaagaattgaatgtgtgttgaaatgttccctaggacaccacgattttactacatgtattcgatctaattgtgcaaatttccctaagttgcagtttaaatattttctttacgaataaaatatgctaaaatccaattttagtggaacataactgaatagtgttttaattgtatgtgggtttacaggtcatatgcgaactacgttcttttttatcaaaattatattcaaaagagggaaatcccccttgtacgaagcgaactagttccattcgatgggcggctacttaaagccggcgaaccagctcatctctaactttctgagcgatgtcccaccactggataaaagaccatctggcaacgctggcagcagtagaattatttatctccacaattcagtcacgaaaacaataagcaacaaagggactcccacagataagggagctgtatttttatagccacacctccgagatgtcaacggcggcgcgacctccgtctttgcggctgggccagcaggacctcaagtgccgttcaggatgcgggttttacggaaccccccaaaacgaaggattgtgctcgatgtgcttccgagaaaagtttaatgataagcagcggaagttgaagcgtaagttgaagcgtaggtccccagacaatgcttgcatataactccaaagccgatgagcgttgagtcatgaagtggttctttacagagacgggtggcgagacgggtcctggatcctcttcctcggtcgccaccttggatcgccgatcgccacagcatgcgcacctccagggaaaagtggagcagcaggtcaggaagccgtcggacaaggagcaggacaacttgggaaccctgcaaaagaaaaagtttaccgctgtgctgcaaaaaactctgcaggcgggagcccaaaaaagtaatattgcatagccacactgcctttaaatgcttatacttggatattccttagttacccaacagcgtggtcatgtgccggatcccacggagggccagttcctactgcaattgcggcaacttcgcattcccgacgatggcaagcggaaactcaagcttgaaatccagcgtttggacagcgacatccgcaagtatatgaacggaaatggcggcaaaaacatcaacgaactatcagatttggttcaaaacgcctacaccaaagtctcagacattgtgcacaacgatcccagcttcgagatagccaccaacgaggatcgcgatagtgccattgacttctttgagaaagtggtgatgacgcagaaccacaagtgagtcaagcggaacgttgatatcagaggagtacatatttttatctgggaaactctttttttttttttgcagatttctcttcagtccctatttcactaccgatgaggacagtgacgtgaaggtgcagaagcggatacgccagctgagctggattacggccaagcatctggactgcagcatcgacgaggtcaactcggaggccagggatctggtttacaatgctatatccgagctggtgggcatagattcgtactattcgccgcaggagaagctgcagtgcacttggcgctgctgtaggcacatctttgagcttctgaagcgggcaactggaggacccgccagtgcggatgacttcctacccgccctaatattcgtcgtgcttaaggcaaatccagtgcgactgcacagcaacatcaacttcgttacgcgcttcacaaacgcttcgcggctgatgagcggcgagagtggctactactttaccaatctgtgctccgccatcgccttcatagagaatctgaatggcgagagtctgggcgtcagcagcgaggagttcgaggctctgatgtccggacagcagccctacagcacgccctgggaaagtgccctgttggcctgcgagagccttcacctgatatccgagaacatgaagcgaatggagatgctgcagaaaaggaacgccctgataagctctggaataacttcatttgaaaaagagcttatcgatttccaaagagaggtgacggaacgagtagacaccgtgattgccaaggccccactcaacctgctgcccatcaaaacacccgcttttctgattggtcaagccagggcgcaccttctcaacgaaagcgaggctggtcattatcaagcgaatatgctgcacggcggctcattgacctcccagtcgctgacagcagccggtgggttggtaaagcccgcagcggcgtctaaagaatctggattgtcccttaaggataccagcatgagttcgatgggccgtctgtcgccacttcagcagaacgttcagccagccgatcacctcttcgcctctccaatctttaactacaccgcgtttgatgccgtctcgctcttggaggagcctgtgcccgatgcgaacacagacgtactcatgctgggctccgagtttcaaggaggcctgaccaatatcaactacgacttcgacttgtcggatcaaagtggggaaaacagcactgcggacgagtcaaagctgaatctcgacgaattcgaccccttggcgcagaagggcctagttgccaagccaccgccgcctctgccggagaccagtctgctggatagcacaacggatagccttatagatagcgaagtgcccggcacagctgtcctgcttccatcccctctgaagcccgaggtgtccaactaccggggcttctcaaacttcgatattcccagcatctcgtgcaacacgggagactttagttctctgggacaggacggcgcggatgctcccaaataaacgtttgttcactgggtcactgaatcctgcagctgtgtgaatgtaaataagtttaagtgaaatattgtagttagcccaacgcttcaattcaaatttctgcacatatttatttgtaccatatttaactagctttacagaaaggacgtttaataaatgcaatctaacacatacacaagttgtattgttttttacaataaacggttaactaagtttaatttctttcccaggggtaattgcatgattttcaaaagtcccgccaactgggcatcacttatccaataatctggcagcactagaaaagtaacaagagagattgttgttttcgaaatatctcaatcacacacgatttattctcagtttgcctgccgaaccgaacggacgtgagcgctcacgagaaatggctagaacccgaattcagatgctgctacttgttgttgcgctgacggcggtgataagtggagcaagtgcctccagcataccggaagagctgccccacaatccgctcgagcacgaccccctgcaccccaggcacttcgacgggggcgagcacaatgcccagtttgaccacgaagccttcttgggcccggacgagtccaagaagttcgacagcctgacacccgaggagagcaggcggagattgggcgtcattgtggaccgaatcgacgagaacaaggacgggtcagtcacattggcggagctaaagaactggatcgcctacacccagaggcgctacatcgaagaagacgtgggtcgcgtgtggaagcagcacaatccggacaacaatgagaccataagctgggattcctacatgcagactgtctacggcttcatggatgatctgagccccgacgagaaggaacaggaggaaaatggtatgtagcccaaatcgtcattgtaagcagaggcatcaatttgatagggaaatcactgttttgatgggcgggaaacatcacattaatctaatcaaattgtatttgttttttcgaacaggagtcagctacaagagcctgctgaaacgcgatcggtaccgctggtcggtggccgaccaggacttggatgacaatctcaccaaggatgagtttaccgccttcctgcaccccgaggaccatcccagcatgaagggtgtggttctgcgcgagaccattaccgatctggacaaggaccacgat

SEQ ID NO: 40379 - DNA, 2373 bp, DROSOPHILA
caacgctggcagcagtagaattatttatctccacaattcagtcacgaaaacaataagcaacaaagggactcccacagataagggagctgtatttttatagccacacctccgagatgtcaacggcggcgcgacctccgtctttgcggctgggccagcaggacctcaagtgccgttcaggatgcgggttttacggaaccccccaaaacgaaggattgtgctcgatgtgcttccgagaaaagtttaatgataagcagcggaagttgaagcagacgggtggcgagacgggtcctggatcctcttcctcggtcgccaccttggatcgccgatcgccacagcatgcgcacctccagggaaaagtggagcagcaggtcaggaagccgtcggacaaggagcaggacaacttgggaaccctgcaaaagaaaaagtttaccgctgtgctgcaaaaaactctgcaggcgggagcccaaaaaattacccaacagcgtggtcatgtgccggatcccacggagggccagttcctactgcaattgcggcaacttcgcattcccgacgatggcaagcggaaactcaagcttgaaatccagcgtttggacagcgacatccgcaagtatatgaacggaaatggcggcaaaaacatcaacgaactatcagatttggttcaaaacgcctacaccaaagtctcagacattgtgcacaacgatcccagcttcgagatagccaccaacgaggatcgcgatagtgccattgacttctttgagaaagtggtgatgacgcagaaccacaaatttctcttcagtccctatttcactaccgatgaggacagtgacgtgaaggtgcagaagcggatacgccagctgagctggattacggccaagcatctggactgcagcatcgacgaggtcaactcggaggccagggatctggtttacaatgctatatccgagctggtgggcatagattcgtactattcgccgcaggagaagctgcagtgcacttggcgctgctgtaggcacatctttgagcttctgaagcgggcaactggaggacccgccagtgcggatgacttcctacccgccctaatattcgtcgtgcttaaggcaaatccagtgcgactgcacagcaacatcaacttcgttacgcgcttcacaaacgcttcgcggctgatgagcggcgagagtggctactactttaccaatctgtgctccgccatcgccttcatagagaatctgaatggcgagagtctgggcgtcagcagcgaggagttcgaggctctgatgtccggacagcagccctacagcacgccctgggaaagtgccctgttggcctgcgagagccttcacctgatatccgagaacatgaagcgaatggagatgctgcagaaaaggaacgccctgataagctctggaataacttcatttgaaaaagagcttatcgatttccaaagagaggtgacggaacgagtagacaccgtgattgccaaggccccactcaacctgctgcccatcaaaacacccgcttttctgattggtcaagccagggcgcaccttctcaacgaaagcgaggctggtcattatcaagcgaatatgctgcacggcggctcattgacctcccagtcgctgacagcagccggtgggttggtaaagcccgcagcggcgtctaaagaatctggattgtcccttaaggataccagcatgagttcgatgggccgtctgtcgccacttcagcagaacgttcagccagccgatcacctcttcgcctctccaatctttaactacaccgcgtttgatgccgtctcgctcttggaggagcctgtgcccgatgcgaacacagacgtactcatgctgggctccgagtttcaaggaggcctgaccaatatcaactacgacttcgacttgtcggatcaaagtggggaaaacagcactgcggacgagtcaaagctgaatctcgacgaattcgaccccttggcgcagaagggcctagttgccaagccaccgccgcctctgccggagaccagtctgctggatagcacaacggatagccttatagatagcgaagtgcccggcacagctgtcctgcttccatcccctctgaagcccgaggtgtccaactaccggggcttctcaaacttcgatattcccagcatctcgtgcaacacgggagactttagttctctgggacaggacggcgcggatgctcccaaataaacgtttgttcactgggtcactgaatcctgcagctgtgtgaatgtaaataagtttaagtgaaatattgtagttagcccaacgcttcaattcaaatttctgcacatatttatttgtaccatatttaactagctttacagaaaggacgtttaataaatgcaatctaacacat

SEQ ID NO: 40380 - protein, 696 aa, DROSOPHILA
MSTAARPPSLRLGQQDLKCRSGCGFYGTPQNEGLCSMCFREKFNDKQRKLKQTGGETGPGSSSSVATLDRRSPQHAHLQGKVEQQVRKPSDKEQDNLGTLQKKKFTAVLQKTLQAGAQKITQQRGHVPDPTEGQFLLQLRQLRIPDDGKRKLKLEIQRLDSDIRKYMNGNGGKNINELSDLVQNAYTKVSDIVHNDPSFEIATNEDRDSAIDFFEKVVMTQNHKFLFSPYFTTDEDSDVKVQKRIRQLSWITAKHLDCSIDEVNSEARDLVYNAISELVGIDSYYSPQEKLQCTWRCCRHIFELLKRATGGPASADDFLPALIFVVLKANPVRLHSNINFVTRFTNASRLMSGESGYYFTNLCSAIAFIENLNGESLGVSSEEFEALMSGQQPYSTPWESALLACESLHLISENMKRMEMLQKRNALISSGITSFEKELIDFQREVTERVDTVIAKAPLNLLPIKTPAFLIGQARAHLLNESEAGHYQANMLHGGSLTSQSLTAAGGLVKPAAASKESGLSLKDTSMSSMGRLSPLQQNVQPADHLFASPIFNYTAFDAVSLLEEPVPDANTDVLMLGSEFQGGLTNINYDFDLSDQSGENSTADESKLNLDEFDPLAQKGLVAKPPPPLPETSLLDSTTDSLIDSEVPGTAVLLPSPLKPEVSNYRGFSNFDIPSISCNTGDFSSLGQDGADAPK

SEQ ID NO: 40381 - DNA, 3452 bp, DROSOPHILA
cccacatctgaagtaaaagctgaacagtcttggtctccatacttctcctccatttccacgtgctgttcggcaaaagacgtggacaggtattgtgccatactgaccacatcgtcttggtctataagctccacgacatccacatgaacttcatccggcttggcagcaacttcctgttgctcgaagagattctgtaaagtttcatgggcgttttccacttcgacgatgaactcataggcgccgatcagccggcgggcgcaattttgacacagatgcataggcagatttgggtccgtccatgtccactggaaataattgaacttatttttcgaagtttcttgaaattgtagctctttaccttcaatttggaaactgcctccaacaactgccagagctccaacttaaggtcgttgtatttgatttcatcgtggacatacagattggtctcgtgcgtctccaggcagacgcggcaagtctgcgagcttatatttacgtggatctccggtgtgtccatgattcggcatcatatcataaacgacgaattccaataaaaactttgcttgttaataacacctgatgttcagagatgcccgataaaatcacagctgttctggttcacagtcaccagaaataaaaaatattggaattgagatgtacacaattaacgatatttataaatatcttccgatagtctatcgtccggttaatcaaaataaagtgcgacgaattaacatattttcaaaattaagacgctttgatagatgtatttgtatagagatagaaattaaggttaaaataacataaatgccaaagtttagagcactattcaataattctcttgatttcaaattgaaataatacacaatataacattttctaacactacaaagtcacgatattcttcaaccaaccgatagtatcgcacacttgccattcgcctcatcacgcacacgcccgcttcacaattcaaacgaacggcattttattttcacaggatcccgggagtcgtgaatgttttacccaatatcggctttcattgttaactgaccaaaattgtaatctgttctgttagttgtcgagtgcctgtgccgtcatgtcccatccgtctgaccatgtgctgcgtcccaaggaaaatgctccgcacagaatgccagaaaaatcagctgcagtgcacaatatgcaaaagaacttgctattgggaaagaaggtacgttaagtggtaaatctctggagtgcagctgaaactcttatttggtaccattgtgatacagcccaacagcgagaatatggctccagctagcaaacccttgccaggatcctctggcgctttgatcaggaagccaggcctaggaggctccaattccatagcttcctccgaaggaaacaacttccaaaaacccatggtgccgtccgtgaagaagaccacatcagagtttgctgctccggctccagtagcacctatcaagaagcctgagtcactttccaagcagaaacccactgctgcgagctctgaatcctccaaggaactgggtgcggccagcagctccgctgaaaaagagaaaaccaagactggtgggttaatggttcagctgtaatcttttgcaattaccaaactcaattgtaattttctgcagaaacccagccccagaagccgaagaagacctgggagctcaacaactttgatattggtcgcctgctgggacggggcaagtttggcaacgtttatttggcgcgggaaaaggaatcccagttcgtggtggccctaaaagtgctctttaagcgccagattggcgagtccaatgtggagcaccaggtgcgtcgtgagatcgagatacaatcgcacctacgtcatccgcatatcctgcgtctgtatgcctactttcacgacgacgtgcgcatatatctgatcttggagtatgcgccacaaggaacgcttttcaacgccttgcaggcacagccgatgaaacgtttcgatgaacgccagtcggccacctatattcaggcgttgtgctcggcgctgctctatctgcatgagcgggacatcatacacagggacatcaagccggagaacttgctgctcgggcacaagggcgtcctgaagatcgccgacttcggttggtccgtgcacgagccgaactccatgcgcatgacactgtgcggcactgtcgactacttgccacccgaaatggttcagggcaagccgcacacgaaaaacgtggatctatggagcctgggtgtgctctgctttgagctgctagtgggccacgctcccttctactcgaagaactatgacgagacctacaagaagattctcaaggtggactacaaactgccggagcacatttccaaggcagcatcccatctcatttccaagctgctggtccttaatccgcagcaccgcctaccgctggatcaggtgatggtgcatccttggatcctggcgcacacgcagtgaacacattcttgtttaattttcagttaattccttttaattacatttttagtttagggctccccgcgtaatttaattatggcatcataaattttcatttatatagatacgagaaattaacatttatcaattaagtttattattatcattagcaataaagtttgtgtgtgttttcgaatgctagcgtacactcctatcttatgtagctacctaatctctagcgaaatgggttgacggaattgcaaatgcagaagtgaaacgtgtaggcagcgacaaaaaaaacaggcaacattgcccaaatgcagcgcagcgtttatttttatcacagaaaaccaagtatatagagtatatttgttaatgaaacttgtaaggatttagcaacgatttcgattactgctaattcgggactaataatttgcaaggcagaactgaaacagtcttcattttaaatctgtctgcatttgttcgtagctccatctcagagtattgtatttcctgcgagttttaatttcttgttcttcatttgctattaacgaaatgatggtagtcatgacgttgaacttaacttacaaactaaatagcttagggcgtgctcaagccaggatagattttgatttataatcttcaattaacgtacaaatttcaatgatcgatttgcgacatttcgttatgattaaccctagaatctatggcttaccgagcacggctttaatataaaggggtttctaagcctttgcacacttgccgctcaatattaatagaaaattatcttacttagtgtctaataacctcgcctcccttcttgcgtgctgcaccaccattggaatagtcgtcctctgcaatttaagttaaagtgttaagcatttattccgatttgtgagcacttccactcaccatcttgatcttcatccatgccgtcttccaggtggatgccttcggcgaactccttaccctggtcagcaacgatttcgttgtttagattgtctgtatcgagcaaatgctg

SEQ ID NO: 40382 - DNA, 1326 bp, DROSOPHILA
agtcgtgaatgttttacccaatatcggctttcattgttaactgaccaaaattgtaatctgttctgttagttgtcgagtgcctgtgccgtcatgtcccatccgtctgaccatgtgctgcgtcccaaggaaaatgctccgcacagaatgccagaaaaatcagctgcagtgcacaatatgcaaaagaacttgctattgggaaagaagcccaacagcgagaatatggctccagctagcaaacccttgccaggatcctctggcgctttgatcaggaagccaggcctaggaggctccaattccatagcttcctccgaaggaaacaacttccaaaaacccatggtgccgtccgtgaagaagaccacatcagagtttgctgctccggctccagtagcacctatcaagaagcctgagtcactttccaagcagaaacccactgctgcgagctctgaatcctccaaggaactgggtgcggccagcagctccgctgaaaaagagaaaaccaagactgaaacccagccccagaagccgaagaagacctgggagctcaacaactttgatattggtcgcctgctgggacggggcaagtttggcaacgtttatttggcgcgggaaaaggaatcccagttcgtggtggccctaaaagtgctctttaagcgccagattggcgagtccaatgtggagcaccaggtgcgtcgtgagatcgagatacaatcgcacctacgtcatccgcatatcctgcgtctgtatgcctactttcacgacgacgtgcgcatatatctgatcttggagtatgcgccacaaggaacgcttttcaacgccttgcaggcacagccgatgaaacgtttcgatgaacgccagtcggccacctatattcaggcgttgtgctcggcgctgctctatctgcatgagcgggacatcatacacagggacatcaagccggagaacttgctgctcgggcacaagggcgtcctgaagatcgccgacttcggttggtccgtgcacgagccgaactccatgcgcatgacactgtgcggcactgtcgactacttgccacccgaaatggttcagggcaagccgcacacgaaaaacgtggatctatggagcctgggtgtgctctgctttgagctgctagtgggccacgctcccttctactcgaagaactatgacgagacctacaagaagattctcaaggtggactacaaactgccggagcacatttccaaggcagcatcccatctcatttccaagctgctggtccttaatccgcagcaccgcctaccgctggatcaggtgatggtgcatccttggatcctggcgcacacgcagtga

SEQ ID NO: 40383 - protein, 411 aa, DROSOPHILA
MSHPSDHVLRPKENAPHRMPEKSAAVHNMQKNLLLGKKPNSENMAPASKPLPGSSGALIRKPGLGGSNSIASSEGNNFQKPMVPSVKKTTSEFAAPAPVAPIKKPESLSKQKPTAASSESSKELGAASSSAEKEKTKTETQPQKPKKTWELNNFDIGRLLGRGKFGNVYLAREKESQFVVALKVLFKRQIGESNVEHQVRREIEIQSHLRHPHILRLYAYFHDDVRIYLILEYAPQGTLFNALQAQPMKRFDERQSATYIQALCSALLYLHERDIIHRDIKPENLLLGHKGVLKIADFGWSVHEPNSMRMTLCGTVDYLPPEMVQGKPHTKNVDLWSLGVLCFELLVGHAPFYSKNYDETYKKILKVDYKLPEHISKAASHLISKLLVLNPQHRLPLDQVMVHPWILAHTQ

SEQ ID NO: 40384 - DNA, 2533 bp, DROSOPHILA
tgcatatatgatacatatcataaaatattgttgtttttaataaagcgacgacaacacattttttgcgactatcttataaacgaatttattgtaatgtttagtaatggtttaaatattgttatttgatttaccccaactcaaacaaaatcctacacataacagagtttgaatcacaaaaataaaaaataagagtttaataaaattaaattcaacgcccaaatctataaattattttaatatttatgtaattatcttgatttcaaacacaaatatttatttagatttattaatatcaattaaacttttgtttctttaataaaattatcatcatcatatcatcatatcattatctttgtattatatcattgcccatttaaaactccaacgggtcctgtaacctgtaacattatcccgaactgtacttggttgtatgctttcaataaggaatctgcatcgactttatgtaaaactatttacataacgcacacacgatcttatgtacgagaatgccccctttgaaatgccataaagatcgaaccgaaccgtgcggccttttcgcatttattattgagataggattggctttgtttctgctcgtagcgtagggcccctgccttttttgtttatcatccgagggactgggaccgggaccctctacctgttccgatgcaattcgagatttattttgtccagggcccaaccctaagaaggagcgctgaaaacgaaaatcagaaatcgcctggaggtaacaggtttccccggctcactcggcttgatttttcgagtttttcgaatccacaacaggtttccaacaaaagggaacaggtaaaggttttgtttttcgagttaaggttcttagggtctcgctgttccgtgaatgtggaagggtcaggggtacgggataagaacggtttttggcttacagattcttggaaaaaccttcgaggaaattacaatgacaaagggaaagttcgaataagaaatcagaaatgcaaacaagtttcggtattaatattatgtatttattcatactctcttaaacatagatggaagacaatgattaaagctggatatttgtgcatttcattttaaaatctccacttgcacagtgtggagagttaaagctgttgcggatgatgtttagagaccgaatccgttggagtctttaaagctgattggaaagtggtattttttttcggatttcccattttcctcgattacagttggacgagctcggcttccaattgctcgttctgggagttctgcagctcctcctcggaagtgggcagtgggagctccttcggcatggagtggttcttcagttgctggtggcccgatgccttgaagattttgcaggccaccttgaagatcttcttcatggccttggcgggtgtgtaggtcttcttctggcagacaggagtggtggtgtagatggtggtgttcatcagagtttcgtaggccatttttgctagttagtagtttgcttgcttggtcgactgatcttggctgttcaacgttgcgattgaatgtgatgtcctattcggaattgcgcaccgcttaaatacccgatccttgcgaaagcaacccctaagtcaaccaatcaggacgagtcctagcgcgcaggtgtttctcggtctctcaaaatatgagagtcacgcattcctcaactctctgcaggtagttcgggatcgtttcgggtcccttttttgagcgacccttgcacgtgtgcgaagtaaggccacaattttcgtaggccctaaataaatctctccctcgatttcgttttcgtcgtgggagagtataatttcagtcgaatgccaataggaggacgatgccggcaagcataacaaatagccaaaaaatgaaagaaatgaaaaaataaacgatcatcccttttccatcgggttcgggttagtaatttgagtggtttgtttgcggaggactcggctcgaatttatgccttgattagtttttggctattaattgttaataggctgacagtggaggataaaagtgacagaccctcgttaaacacatgttgtcggcaaacgagaaatatttacacgtcaacatttcatttttgatcagtacaggtagactgtggtcctttcgagtacagtgaacattcgctcgaaggtgtgcagggattttcaagattccacactcactgcagcgtagttgctctggcaggcttcactgtcctcacacttgttcttcggggttgttttggtccttggcaaaatttgaatttggagcgtaatgaaactcgaatttcttcgtttattgcatgaaaggtttctttatctttcccttaaatctgctatagggatttaagatatttttggatttcttgttgcatggaaccaccacttggaaatatggttttctgtgacaggtttcactgtccccacacttgtgtgttggttcgggctctccaagaaaattaaaatttcgtctcttgttgaaattcgaatttcgtctcctattgaaatacttggcacttgtaatttgggattcattcgtattccaatcc

SEQ ID NO: 40385 - DNA, 533 bp, DROSOPHILA
atcacattcaatcgcaacgttgaacagccaagatcagtcgaccaagcaagcaaactactaactagcaaaaatggcctacgaaactctgatgaacaccaccatctacaccaccactcctgtctgccagaagaagacctacacacccgccaaggccatgaagaagatcttcaaggtggcctgcaaaatcttcaaggcatcgggccaccagcaactgaagaaccactccatgccgaaggagctcccactgcccacttccgaggaggagctgcagaactcccagaacgagcaattggaagccgagctcgtccaactgtaatcgaggaaaatgggaaatccgaaaaaaaataccactttccaatcagctttaaagactccaacggattcggtctctaaacatcatccgcaacagctttaactctccacactgtgcaagtggagattttaaaatgaaatgcacaaatatccagctttaatcattgtcttccatctatgtttaagagagtatgaataaatacataatattaataccgaaa

SEQ ID NO: 40386 - protein, 81 aa, DROSOPHILA
MAYETLMNTTIYTTTPVCQKKTYTPAKAMKKIFKVACKIFKASGHQQLKNHSMPKELPLPTSEEELQNSQNEQLEAELVQL

SEQ ID NO: 40387 - DNA, 8934 bp, DROSOPHILA
tgcaagcgatgcagcgctcctctccactgggataacgacgaagggcatgttctccgcggaatcgcgggctcagtggtcccttttcaaagggatagttgatagtggccggttccttgaagatgtgcgccagggtgacggcaaatccacgtaagagttcaccgaagaacatggtggatgcagcacggtccgtgatgtcggcaaactccatgctcagttccttgttgtttacatacacatagcccttgggaacctcgacgatatctttgggttctgctcgctgggcggccagcagccgggctccatggctgccaaacaggcgctgtcctgtggggagaacattttaccattaaataacatgcttaagtcgaaaagttatactgaattaagcgagtttagacttttgttttggtatgacataagcttacataacctcactcgccgcgatttccacgaaaatgggaaatttcccggaaaacaacggatgtgaggggatgggtcgccacctaccgttgcgcgatgcggtgaaaattcgcatagttagcgacatttttgcgaccaaattaaactaaaattgccaaagaagttgttttgctattgaatttgcccgaacaaattagagctgggtttctttcgattacccacataaattcaatgctcaaatatcgtattcaaatatatcgtagtttcttaatgacataaaccaaaaataaaatatgagatataaaatataaataatgtaacaaagaattaaatattcgtgtaaaaataataaataatattaacaaataatccagaaagactgtgagaaaaaaaagaaaacattttttttatacgaatacccctaataaaaaccttaaagcttcgataatggcactatcgatataaattcgcacttttacacttttcaacattgactttgaaaatccccaccactacaatttacagtttaacttttcccgctacgcggaattgtgaaatttttcattgtttatgtcggaaaatggatcaggaggttatggatttctttgacttctcgaaggagttgaagcgcgtggccgccgccccgcaaggctacatcagcagcgatccgaggctaatggccacgaagttcaaatcatccgaagtgcccaaccgcgagttgatcggcaccgactatgtcagcaaaatcgtcgccaaggaaaagtgtctcctgaacggggtgagaactggaagcttgcgtcagcacttctgtttgtttatgtgtaattcgatccagacgctgctcaacgaacagcctcaaggcaaacgcattcgaacgctggacgatttggacaccgacgatgagggggaagagaccgaaattcgccgggatgacgagtactacaagaagttcagattcaatctgaatcgcgacaagaacttgtccatctacgccaagcgcgaggaaatattggcggccatcaatgctcatccggtagtcattattaagggcgaaacaggatgtggcaagaccacgcaggtgagcaaaacttaaataaaatcctaacttttttattaagtctatattttaataaagccaacgcaagcgaattataattaaaccttttatcctcgacttttgaaattcaaatccaaactagtcgagagtatttaatattatataataaataataatcttcaatatacttttcaactctttatataagaatagcaaagcctaggaaacttatatcctatatagttatatatcctatcctacatacttaaatacaatgaatattttatgtgcaacagataaacaagatcacatcgcgcaaaaatgctagttatttaattatgtaaaagttttataaactaactcaagtatccaaaatagctttgagttcttcttccgtgacctcctcgctttcacccacttccatttcctcgtcgtcactaaactcaatcatctcatactcttgctgcacgtctgctggaagttccctctgaaaaacggtggccgaggacatgcggcgttgataagtctcgttgacctccagctgcacttctagttcatccgcctggttttgcggctcccgttcctcgacgccgtacatggccttgttccgcaccctctggcgcacttccaactggttgcctgtagatgttgtggtacaattctcatctggagtactctttctagctcctagaacactttggatatcggcaaagacttctcgcaaatggccgaatatttgagagggcggcaaagcgtgctcatgaccagccgccaattgcttcttttgggcattgtatgccgcttccagttcacacaatggctggcttgcctggtccagtgctcgcagaccctccagttcgtatgtgagactgacgccgttcgcacgctgttgcttctgcatcaaggcactctgcctctgttccttggcacccgctacggtctccacacggtcgtagtccaccagattgtccaacccctggcaatagtcgagcgcggtgaagcggaaggcctgctcctgggtcaggcgccacagcatgtaggcgatctgatgagtgtccttccgctccggactatccttgcgcagatctagagcgtagtctgttagttcttgccaagtgcgcggtgagacctcgatcttaataaagttgtgcgtgggctgcttgtagtagattacgtagagcagaaagaaacctccgatcctttgagcgcgagatgccgggaaaacgtccccggtggtgcgtcgggagcacgacagtcgcttggccacatgcagggccgccagtgtggtggctatcacctctgtgtggttcgtctgggcagtgaagaggtgctgcagctgcagttctcgccagcaccggcagaacacctcgaactcgcagttttcgccatcattaaccaatcgctgaaatcgttgcaccagctcccagcagtcgtcaaagatattcagctccattctgaatcttaattacgcgaaatatatgcgcatctctcattcaaaagagcctcaaaatataaacaataacattcgccgggaataagcttttacaacactagccggggagttcatcgataaatatgtagtgttcataactgcttagctattttcaaaaaaaaagcgcaaaactataaaaactgtttgaaaaatgtgtaaaaaatacaattacatttttgttctgctttgtaaatatttagatattttcttataattattattagtattcaatcaattattcttacaggtgccccaatacattttggatgaggcctataaaagcggtaaatactgcaacattgtggtgacacaaccccggcgcatagctgccatctccatagcgaatagagtttgccaggagcgcgagtggcagcagaacacggtgtgcagcttccaggtgggcctgcaccgcccgaactctttggaggacactcgtctgttgtactgcaccaccggggtgctgctgaacaatttgattaacaacaagacgttgacccactacacccacattgtgctggacgaggtgcatgaaagagaccagaacatggattttcttctgatcgtggtgcgtcgcttgctggccacgaactcgcggcatgtaaagattatcctgatgtcggccaccatcgatgccaaggaactgtccgactactttaccaccactaactcaattccgccagtgatcaccaccaatcatcgacgtaagcactcgatcgagaagttctaccgtgaccagctcggcagcattatttggaatgaggaagatgtgggacaccagcaggtgccagaaatcaacaaacacggttacagggcagcggtaaagatcatagtgattattgacaacatggaacggaaggctgcaatccagtcgcggcagagctatgacgaggccctgcgctatggagctgtgctcatctttctgccaggcatctacgaaatcgacacgatggcagaaaatcttacttgtatgctggaaaacgagtaagcattgttatccgtgagaattgctcactgtacaaattttgaagtagctaaaattgtatcattataatttccaatctttattgtttaattgcagccccaacattaaggtctctattgttcgctgtttttcgttaatgacaccggaaaaccaacgggatgtcttcaatcccccgcctcccggtttccgcaagatcattctgaccacaaacattgctgagagctccatcacggtgccagatgtctcatacgttattgacttttgtcttgccaaagtaaaggtaaccgatacggctagcagcttctcttcgctccgcttaacctgggcgtccaaagccaattgtcgtcagcgtgccggccgcgttggtcgtcttcgtagtggacgcgtttaccgtatggttaataaacacttctatcagagggaaatgcccgagtttggaataccagaaatgttgcgcttgcccttgcaaaactcggtgctcaaggccaaagtgctgaatatgggatcaccggtggaaatcttggcattggctctatctccgccgaatctgtcggacatacacaatacaatattgcttctgaaagaggtgggtgctctgtacttaacagtagacggcatctacgacccgttggatggcgatcttacctactggggcacaatcatgtctcggctgccgttggacacacgtcagtcccggcttatcatattgggttatatttttaacatgctcgaagaagctattattataggtaagcgggcaacagtagttaagctttaggataacggggggaatattctttgtcttgcattaatgattttttttttaaatatgttgtagctgctggcttatcgacgcctggcttgtttgcgcacgaaggtggtaggtctcaattaggcgattcattttggatgcactatatcttctccgatggatctggctccgacttggtggccatttggcgcgtgtatctggtaagttatgcgatgcattactaatagcgtaataacttgtttcttcggcagacatatttgaacattgtggaaaatggtcacgaccaggagtctgctatccgttgggccaaacgtttccacgtctccttgcggtcacttaaggagatacacttgttggtgcaggaactgcgtgtgcgatgcacgcatctcggtctgattccgtttcctgttaatcctaaccaaatgatggacgatcgtgaaaaagcgatcatgctcaaagtgatcattgcaggtgccttctacccaaactactttacgcgttccaaagagtcgtgtgcagacacagatcgcaatatataccagacaatatcgggccacgatccctgccgcaccgtatattttaccaattttaagcctgcctacatgggcgagttgtacactaggcgcattaaggagctatttcaggaggtcaggattccgccggaaaacatggacgttacttttcaagagggttcgcaaaaggtctttgtcactttcaaacaggatgactggattgaaggttcatctaagtatgttcctgtgtcgggcagagttcaaagtgaggtgtacaaggcagttatgatgcgacaaaatcgtgtcgaacggccaatccacataatgaagtgagttatcaaggcttttactatcgattatgaagcttatgtttaatcatttacagtccgagtgcatttatgagctacgtacagcagcgagggattggagatgtgattgagggccgttggattccacccacaaagcctttaaacgtcgagcttcttgcgctgccatctgtctttgacaaaactatttcagggtcgattacttgcgtaagctgctgcaccacacaaatctagagaatttcaaagtattttttttatttttcctatcttacagatcgtcaactgtggcaagttcttttttcaaccccaatcttttgaagagtgcattcgaaatatgtctgaaattttcaatgctccacagcaactaagaaattacgtaactaacgcgagtgccatcgcaaagggcatgatggtgttggccaaacgcgatagttatttccagcgcgccacagtgatccggccagagaatcagagcaatcgccaaccaatgttctacgttcgcttcatcgactatggtaattgcactttgctgcccatgcagctaatgcgtttgatgccgagagagctaactgaacagtacggcgaccttccgccacgtgtttttgagtgcaggctggcaatggttcagccctcttcagtggtcagtggaaacaataggtggtccaccgcggctaatgatatgctcaagacagtggcccaatgcggtctaatcgatattgaggtgtattcgcttttcaataatgtagcagctgttctcattcatatgagagatggcataatcaacgataagctagtagagcttatgttgtgccgtcgatccgacgaagattatatgtctagaaaagatcatgatttccgtttgcgacgtcaagaatctgcccggaacttgagcacggcgcagcgtcaacagatcaatgaggaatatctgcgatcctgtcagctgccgcaagaccacgatctaccaccgcctccgctggaaaagtgcaagaccgttgtaatgttgaaaggacccaacagtcctttggaatgtactatgcgatccattactcgtgtgggcttaagtaaacgggtgaatatagaccatttgtccgttaatgcacttctcctggatgctgatcctcaagatcaccacgatcatttgatagtggcccacgaaatcgcggagagtagaaacgggcagacactgacagcccgtggaaccaccctgatgcccaatgtgcagggattcggtgctctaatggttatgctatttagtcccactatgcaacttaaatgcaataaagaaggcacatcatatgtctctgttctgggaggattgggttgtgacccggacacaaacgagccctacttcgcagagcatgacgtgttgattaatctggatgtcaacattctcgaagatgatgtgattttggtgagcacgcatagtacgaatatatacagaattgcattaattttctgatatttattttagattaatcaaattcgctactatatagatagtgtcttcttcaactttaaggaagaaaacaatccagctgttagcgtaaatgaacgtgtttctatatacactcagctgcgtagccttataaataggtaagattgctgcgcttaaagtcatgctaattaaatgatttcactaaatttgatttcgcaggctcctttgcaaggatcgtagatatatcgaaagaaatatgagcaatgcggattttgaatgggaaaccaatcccgaactaccactgccgaatgaaccttttggcaagagggccatatttccgatgcactcacttactgagctccaagaggaagacacgggtcgcttggtgcaactgagagagaactgcagcatgttgcacaaatggcgcaacttgtaagactggtgcttgtttacaagaatatattgcattacttatattttaacttatatttttagcgaaggcactttaccccatatgacttgcaaactgtgcaatcagttgttggaatcggttccccagctccgtttgcatctcctgaccatattgcatcgtgatcgtgaaaagcaaatcgactattgcaaccaataagaatggttacatcgtttaatatgaaaacagctgattttgaactttttgatttctcatttcttttcttaaaggacacacttcacttgtttggtttaaaaaaatgacgtattcatggaatgaaaacaagttttgaattgaatctaaacctacagaaatcttcattacgttaaatattttctatgttatgttgaatgatctctcttcgttcaattacgaagtgtaaaatgtgaaatataattttttgttaattacatctttaaagatatcattaaatacgaagacagctatactaaccagttcattacaagcaaaaatccataaactgcttgctgtttataaaaatcaaagccctggggcgtgcatgttctccctttttgggctcttttttttattttagattaaactcacacattatatttatgcaactacaactacatcggaggaattctgcagcggcacaggagttggagtgtttgcctccagctcgcagatcgtataattctgcatgcggtttaggggcttgctgcacagcccacacatctggtgcttatacacgccgtatatctcgaaattcaggatgttgtacagatcgaactggatggtggaggacagctgcgtacactccacaattaaaatattttgctcgttaagttccacgctgaaagggcatatggcgtttataaaattgtatataaaagctaaaaagcattcttaccggaagtcgtagtcactagtctcaattggccattgatatggctttttgcgcacgttgtgcggtgtttgatcctggttaagatatatgagcactggttcatccgtgggcaggctgctgttgtctgtgcgggcgcggaagttgaagtagttttgcccgatatggactcgtaatccatagttggtggacagtccttgaacaggcgaaggcgtaacaaacactgcaatctgtggcaatggcgaacagtcagccaccagcagcgtgagacagtcgggacgcaccgcaatctctctgagattgattaggtaatcatcgaaggtattgactatgccattgattactgagcaggagcgcttaagtcctgagtcgaaggtaagctcgtgggaagcgtcgaacttcgagtccagcttgtagaagaaggggatctgatggaaacgccacttcactccgttgacctccacagccagcctgaactggtcctgaggagtttgcattgatatatttatctcctggctcatatgcagactgtccaccttgtcggcggataaggcggacactaagtggtccagtcgattcgaccacagctcgaaccaggcgg

SEQ ID NO: 40388 - DNA, 4615 bp, DROSOPHILA
atggatcaggaggttatggatttctttgacttctcgaaggagttgaagcgcgtggccgccgccccgcaaggctacatcagcagcgatccgaggctaatggccacgaagttcaaatcatccgaagtgcccaaccgcgagttgatcggcaccgactatgtcagcaaaatcgtcgccaaggaaaagtgtctcctgaacgggacgctgctcaacgaacagcctcaaggcaaacgcattcgaacgctggacgatttggacaccgacgatgagggggaagagaccgaaattcgccgggatgacgagtactacaagaagttcagattcaatctgaatcgcgacaagaacttgtccatctacgccaagcgcgaggaaatattggcggccatcaatgctcatccggtagtcattattaagggcgaaacaggatgtggcaagaccacgcaggtgccccaatacattttggatgaggcctataaaagcggtaaatactgcaacattgtggtgacacaaccccggcgcatagctgccatctccatagcgaatagagtttgccaggagcgcgagtggcagcagaacacggtgtgcagcttccaggtgggcctgcaccgcccgaactctttggaggacactcgtctgttgtactgcaccaccggggtgctgctgaacaatttgattaacaacaagacgttgacccactacacccacattgtgctggacgaggtgcatgaaagagaccagaacatggattttcttctgatcgtggtgcgtcgcttgctggccacgaactcgcggcatgtaaagattatcctgatgtcggccaccatcgatgccaaggaactgtccgactactttaccaccactaactcaattccgccagtgatcaccaccaatcatcgacgtaagcactcgatcgagaagttctaccgtgaccagctcggcagcattatttggaatgaggaagatgtgggacaccagcaggtgccagaaatcaacaaacacggttacagggcagcggtaaagatcatagtgattattgacaacatggaacggaaggctgcaatccagtcgcggcagagctatgacgaggccctgcgctatggagctgtgctcatctttctgccaggcatctacgaaatcgacacgatggcagaaaatcttacttgtatgctggaaaacgaccccaacattaaggtctctattgttcgctgtttttcgttaatgacaccggaaaaccaacgggatgtcttcaatcccccgcctcccggtttccgcaagatcattctgaccacaaacattgctgagagctccatcacggtgccagatgtctcatacgttattgacttttgtcttgccaaagtaaaggtaaccgatacggctagcagcttctcttcgctccgcttaacctgggcgtccaaagccaattgtcgtcagcgtgccggccgcgttggtcgtcttcgtagtggacgcgtttaccgtatggttaataaacacttctatcagagggaaatgcccgagtttggaataccagaaatgttgcgcttgcccttgcaaaactcggtgctcaaggccaaagtgctgaatatgggatcaccggtggaaatcttggcattggctctatctccgccgaatctgtcggacatacacaatacaatattgcttctgaaagaggtgggtgctctgtacttaacagtagacggcatctacgacccgttggatggcgatcttacctactggggcacaatcatgtctcggctgccgttggacacacgtcagtcccggcttatcatattgggttatatttttaacatgctcgaagaagctattattatagctgctggcttatcgacgcctggcttgtttgcgcacgaaggtggtaggtctcaattaggcgattcattttggatgcactatatcttctccgatggatctggctccgacttggtggccatttggcgcgtgtatctgacatatttgaacattgtggaaaatggtcacgaccaggagtctgctatccgttgggccaaacgtttccacgtctccttgcggtcacttaaggagatacacttgttggtgcaggaactgcgtgtgcgatgcacgcatctcggtctgattccgtttcctgttaatcctaaccaaatgatggacgatcgtgaaaaagcgatcatgctcaaagtgatcattgcaggtgccttctacccaaactactttacgcgttccaaagagtcgtgtgcagacacagatcgcaatatataccagacaatatcgggccacgatccctgccgcaccgtatattttaccaattttaagcctgcctacatgggcgagttgtacactaggcgcattaaggagctatttcaggaggtcaggattccgccggaaaacatggacgttacttttcaagagggttcgcaaaaggtctttgtcactttcaaacaggatgactggattgaaggttcatctaagtatgttcctgtgtcgggcagagttcaaagtgaggtgtacaaggcagttatgatgcgacaaaatcgtgtcgaacggccaatccacataatgaatccgagtgcatttatgagctacgtacagcagcgagggattggagatgtgattgagggccgttggattccacccacaaagcctttaaacgtcgagcttcttgcgctgccatctgtctttgacaaaactatttcagggtcgattacttgcatcgtcaactgtggcaagttcttttttcaaccccaatcttttgaagagtgcattcgaaatatgtctgaaattttcaatgctccacagcaactaagaaattacgtaactaacgcgagtgccatcgcaaagggcatgatggtgttggccaaacgcgatagttatttccagcgcgccacagtgatccggccagagaatcagagcaatcgccaaccaatgttctacgttcgcttcatcgactatggtaattgcactttgctgcccatgcagctaatgcgtttgatgccgagagagctaactgaacagtacggcgaccttccgccacgtgtttttgagtgcaggctggcaatggttcagccctcttcagtggtcagtggaaacaataggtggtccaccgcggctaatgatatgctcaagacagtggcccaatgcggtctaatcgatattgaggtgtattcgcttttcaataatgtagcagctgttctcattcatatgagagatggcataatcaacgataagctagtagagcttatgttgtgccgtcgatccgacgaagattatatgtctagaaaagatcatgatttccgtttgcgacgtcaagaatctgcccggaacttgagcacggcgcagcgtcaacagatcaatgaggaatatctgcgatcctgtcagctgccgcaagaccacgatctaccaccgcctccgctggaaaagtgcaagaccgttgtaatgttgaaaggacccaacagtcctttggaatgtactatgcgatccattactcgtgtgggcttaagtaaacgggtgaatatagaccatttgtccgttaatgcacttctcctggatgctgatcctcaagatcaccacgatcatttgatagtggcccacgaaatcgcggagagtagaaacgggcagacactgacagcccgtggaaccaccctgatgcccaatgtgcagggattcggtgctctaatggttatgctatttagtcccactatgcaacttaaatgcaataaagaaggcacatcatatgtctctgttctgggaggattgggttgtgacccggacacaaacgagccctacttcgcagagcatgacgtgttgattaatctggatgtcaacattctcgaagatgatgtgattttgattaatcaaattcgctactatatagatagtgtcttcttcaactttaaggaagaaaacaatccagctgttagcgtaaatgaacgtgtttctatatacactcagctgcgtagccttataaataggctcctttgcaaggatcgtagatatatcgaaagaaatatgagcaatgcggattttgaatgggaaaccaatcccgaactaccactgccgaatgaaccttttggcaagagggccatatttccgatgcactcacttactgagctccaagaggaagacacgggtcgcttggtgcaactgagagagaactgcagcatgttgcacaaatggcgcaacttcgaaggcactttaccccatatgacttgcaaactgtgcaatcagttgttggaatcggttccccagctccgtttgcatctcctgaccatattgcatcgtgatcgtgaaaagcaaatcgactattgcaaccaataagaatggttacatcgtttaatatgaaaacagctgattttgaactttttgatttctcatttcttttcttaaaggacacacttcacttgtttggtttaaaaaaatgacgtattcatggaatgaaaacaagttttgaattgaatctaaacctacagaaatcttcattacgttaaatattttctatgttatgttgaatgatctctcttcgttcaattacgaagtgtaaaatgtgaaatataattttttgttaattacatctttaaagatatcattaaatacgaagacagctatactaaccagttcattacaagca

SEQ ID NO: 40389 - protein, 1434 aa, DROSOPHILA
MDQEVMDFFDFSKELKRVAAAPQGYISSDPRLMATKFKSSEVPNRELIGTDYVSKIVAKEKCLLNGTLLNEQPQGKRIRTLDDLDTDDEGEETEIRRDDEYYKKFRFNLNRDKNLSIYAKREEILAAINAHPVVIIKGETGCGKTTQVPQYILDEAYKSGKYCNIVVTQPRRIAAISIANRVCQEREWQQNTVCSFQVGLHRPNSLEDTRLLYCTTGVLLNNLINNKTLTHYTHIVLDEVHERDQNMDFLLIVVRRLLATNSRHVKIILMSATIDAKELSDYFTTTNSIPPVITTNHRRKHSIEKFYRDQLGSIIWNEEDVGHQQVPEINKHGYRAAVKIIVIIDNMERKAAIQSRQSYDEALRYGAVLIFLPGIYEIDTMAENLTCMLENDPNIKVSIVRCFSLMTPENQRDVFNPPPPGFRKIILTTNIAESSITVPDVSYVIDFCLAKVKVTDTASSFSSLRLTWASKANCRQRAGRVGRLRSGRVYRMVNKHFYQREMPEFGIPEMLRLPLQNSVLKAKVLNMGSPVEILALALSPPNLSDIHNTILLLKEVGALYLTVDGIYDPLDGDLTYWGTIMSRLPLDTRQSRLIILGYIFNMLEEAIIIAAGLSTPGLFAHEGGRSQLGDSFWMHYIFSDGSGSDLVAIWRVYLTYLNIVENGHDQESAIRWAKRFHVSLRSLKEIHLLVQELRVRCTHLGLIPFPVNPNQMMDDREKAIMLKVIIAGAFYPNYFTRSKESCADTDRNIYQTISGHDPCRTVYFTNFKPAYMGELYTRRIKELFQEVRIPPENMDVTFQEGSQKVFVTFKQDDWIEGSSKYVPVSGRVQSEVYKAVMMRQNRVERPIHIMNPSAFMSYVQQRGIGDVIEGRWIPPTKPLNVELLALPSVFDKTISGSITCIVNCGKFFFQPQSFEECIRNMSEIFNAPQQLRNYVTNASAIAKGMMVLAKRDSYFQRATVIRPENQSNRQPMFYVRFIDYGNCTLLPMQLMRLMPRELTEQYGDLPPRVFECRLAMVQPSSVVSGNNRWSTAANDMLKTVAQCGLIDIEVYSLFNNVAAVLIHMRDGIINDKLVELMLCRRSDEDYMSRKDHDFRLRRQESARNLSTAQRQQINEEYLRSCQLPQDHDLPPPPLEKCKTVVMLKGPNSPLECTMRSITRVGLSKRVNIDHLSVNALLLDADPQDHHDHLIVAHEIAESRNGQTLTARGTTLMPNVQGFGALMVMLFSPTMQLKCNKEGTSYVSVLGGLGCDPDTNEPYFAEHDVLINLDVNILEDDVILINQIRYYIDSVFFNFKEENNPAVSVNERVSIYTQLRSLINRLLCKDRRYIERNMSNADFEWETNPELPLPNEPFGKRAIFPMHSLTELQEEDTGRLVQLRENCSMLHKWRNFEGTLPHMTCKLCNQLLESVPQLRLHLLTILHRDREKQIDYCNQ

SEQ ID NO: 40390 - DNA, 6054 bp, DROSOPHILA
gtgcatcccaaaggacactttaaactgccgacaggcgtgcgagattaaagacgtgccaagtcgtcctacgtctagatttacattttggccaacacattgtttgctcggcctttggtttgcgtgtgtgtgtgtgtgggtgtgagccttttttcgtggttgggtaatatgggcccattagcccagttgtaagcaaggactacgcaatgtgaaccaacaacaggcggacggaatcagagaggcccagccgaaatgtatgaaattaataataaaacaacatgaaaaactcacttttcggccaattgcccgcggctgcatttccatgtcaccctattttgcatgcgaaaaggaggccagagttcaggccaaagcaaatacacacacttaatgcataaaaaatgaggcgtgaccataatttgaaatcgactccttttcttttctaccagcagctgcagcccaatttcgaatttccaccggcatgcgtgtggattttaaataaatttacattaattttttaggaaaacgacttcgacatgctctagaggcacggaatattgaacagcaaacaatggatgcaaaaagggatagcatcaatagtagtaggttaaaagtcaaggattatttgatgtaacgcccgtctaaaagggcttaaacaaatggtttgtttcataagaacacttattttttggctataagtcggttaaatctatagaaataataatgtggtggttaataagaaaactaacgcttcagttttgaccaataatgcacctctaattgtgttgtttctgattcattatgaattcattaaaatattgtatacataagcttctacttctttagttatttctttgttccatagtttagcacaaatgttgctcaacaatgttgccgctgcgctgcaattgcgctggcctcatgttgccagccgcgtcttcgttctgttctgcacttaatcgcggtttctggtcaccgcacgatcagtttgaatttggatttcaagcggaacagttggcgcactttccacctagtaattgcaaccatcgcgatcgtattctgtgtttttatatcgtctgtgctctaaatcaacactaaaaagtcaaacacttctttcactgcgtgtagctgcaatcggcgaggtaagtgtcatatgaataattggagatcgtttggatggctttttttttcgaaacaaaagctggacttatttcgaaagaaaaaagcgacgatcgccaactttctcgtctaattgccagtaaagttaagcggaacacgcagtgggaatccagctttgtaaagtcggtggtaactggcatgcaaaataatctatttaggtcagatgcctaaaatttacgttgcgttctcgttccgattttcccttgggtacctactgtatatattcgaatttcgtagcttaggcacccatatacgggaagttttttgatggaggtgtatttattacaggttaatttagagatcatttggttagcggggagcacttgccttatcggtttaagagtcattccattcagtgataagagatacggaatcacagcgtgtaaatcaccgtcggatgtaagcatttgtgtatatttaatattcaacttaattcaattaaaatgtttatttcatgtcaataaggcatgacttaattacattgagtatttgtcttagccaagcaatgaagatttcctaaagtaatggaaatgttatatccattagatgtagagcaattttgagttcattggggcaaacattaaataaaataacctcctgacgaaattagtcaattatagcactttaaaatgcctaaatgaatcgtaatatgaatttataaaaaactttccaagcagcaaacatttataaactgttgacggacaagcatcagaggataatgaatcacaaaaatgatttttaataagcataatgatgctgaaacaacatttcatagtttagcgtaatcaaaataatccacatcgggaataaaaaattaaaatagaacacaaacacacgtagcattcgtttgtcaaatcgcataaaatgaagaaagtgaagagcaaacaaatggtgccgataagaatgaattcataacagagtgtccgaatacagaaataacaattcattattattgtggaacagctgctgtggaaatgaaaaaaaaaaaaaaacaaattgtatatgaaacactactctgcgcgaagaagccagattaaataattgacttaggctgagcttgcattaattaatgagacccgaagggaatgcaacagcagaccaaacagagctccagccaagaagttcaggggcggtttgagtaaatggaattaatttcaaacaattcataagcaaaacaaacaaaagattttatcgttttgttgtcactaagcaattgagccgtgaacttcaattgaaacatttcaactgaaacgagacacgctttgcactgcgatgaactcaactgggctgatttagattgattcactaggaagcggaacggactgggtcttcagactatccggaagataaacgttggccagagaaaacagaatacttaaaggaatttgttgagttattcgagaatctattaaagaatgcacacaatacgctttctttaaatggcataaaacatttatgtatggtggcgtacataaatcatatttaatcattttgctgcgtatctttttgttactttcaattacttttacagttacaattactgtatagctttggcagcgctttttatcaggaataaaatgattacttttttgtactaacgaagctagtgtgtaagagtaatcaaagtaaatagatgtgaattattatctatatcgctttaatgataaatataatgaaatttttttcccagtatcttaattgatatattatctttcctactgcaatcctttagaatgaagttcagtgtggtggtcctggtggccctactaccgctgctaggagctgtttcagcgaatcgcacttttgtggtggactacgaaaaggatcagttcctaaaggatggagaaccattccgattcattgccggctccttccactacttccgtgctcatccagccacctggcaaaggcatcttaggaccatgagagctgcgggtctgaatgcggtgacaacgtgagtcactactatgattttaatggttcgattgtcatgtttccattaactacaagctatgtggagtggtcattgcacaatccgcgggatggcgtttatgtgtggagcggcattgccgatctggaacactttatacgcctggccgtgggcgaggatctgctggtcatcctccgtccgggtccgtatatttgtgcggagcgtgacatgggcggctttccctactggctgctgaataagtatccgggcattcagctccggacagcagatgtcagtaagtattgatactccttttgttaacttttaagattacttatgttttactgcttaattccaaaaatgtggcagattatcttagcgaaattcgcatttggtatacccaactgtttgccaaaatgaataaatatctgtatggcaatggtgggccaattataatggttcaggtggagaacgaatatggctccttctatgcctgcgatctcaactatcggaattggctacgcgatgagaccgagagtcatgtcaaaggtcaggcggtgctcttcaccaacgatggacccagtgtgctgcgctgtggaaaaatccagggcgtcctagcgaccatggactttggagcaacgaacgatctcaagcccatttgggccaagtttagaaggtaccagccaaagggtccgctggtcaatgcggaatactatcccggttggctaactcactggacggagccgatggccaatgttagcacccaatcgattacttccacttttatgtaagtttccaatttggtttgggcattgattattatgtgttatttaaagaattaatatatatttatatataatatcgtatatataaccttgccttggcttccagaaacatgctggatcatggtgccagtgtgaacttctacatgttctacggcggcaccaacttcggattcacagctggtgccaatgacattggacccggaaactacatggctgacattaccagctacgactacgatgcacccatgacggaggcgggggatcccactcccaaataccaggccctgcgacgcatcattggccgctatctcccgctgccaaatcaacccgtgcccggacccgtacccaagcgatcctacggaactgtgcgtctgaccacctgctgtagtctgctttcgtcggaggctcgatctcgtctctccactggatttgtgcagtccgccaagccgaagagcttcgaggctttgggacagtactctggtttggtgctctacgagacctggttgcccagcttccagcgggatccgagcatccttagcgttcccggactggcggatcgaggttacgtttatgtggatggtgagttcgtgggtattctggccagggaaacccccgtgttcgaattgccactcagtgcaagtgccgggcggaggttccagattatcgtagagaaccagggtcgcatcaactacggtcgacagttgaacgattttaagggcatcctgcgggatgttcgactggacaagcaggtgctgagcaactggaacatgacccaattcccactcgaatcgtacgacaacctggagcagctgattacccagtcggatgaggcagttcgtcagggcttccaggagctaaagaagttgcgcacaatgctgcgcactggtcccgccatttaccacggtcaactggacatccaaaaggaatctgatctggcggacacctatctggacatgtccggctggggcaagggcattgtctttgtgaatggcgaaaatctcggcaggtattggcccctggtgggacctcaagtcaccctgtatgttccggccgccgtgctcaaggcgggctcaaatcgactggtggtggtggagtatcagcagacacccgcctcacaggagctgcacttccgagatacccccattctgaacgcgaggaccgtttagtcgtcggcctaaggaccattgcgacttgcatccatcgctgtagccataaatcatgcatcatcatccgtatatgtagatctaaatgtaaatttatgcggtttaagttctttgcaagacattaaagcaactccgagacggacgcgtcctgtctgcctcgttatcccttttgtaaaagactcattaaagctgttgtggcatgcggggatggatttacaggcctgccatgtgtgacctttgtgcctgggccaaattaatccctaatgattgaaattgaaatccacagaaacgctctgatgatgagtcaaagtaagtcaaaggcgagtcggaaaatgagtcgcgtcttggttcgttgattttttaggttcccaaaagttttctatgacaatcccactccattcttttccgctggcattcggtgttttttaagaacatgttagattaccgctgttgtttttgaaatgtgtacatgtcgtggaattttgcgatatttttggatgaagttttccaatgaactgacccaaaatatattttgttcatagaaacttaggcgtgtcaagttgttaggatttttaaactttcttatgcacagatgttctaaatagtgctggttattttttcgcattctgtattattttccctattaatatttatgctaaattaacgaactaatagtttcattgcccttcaggtctcccaaactgtcctcgaactgtaataaaatatttacccaaattgtgtacctgtgtacctctacgttgacatttcacggagtgctcccgggccggagaatcactccctacttgaccatctcttgttgccgtaatgagtgaggcagctacagttaattagtcctgactcgcacacatacacattcacatgcagtggcttacgttttaaaggatctttcttttaggcgcagctgcagctcaagtatttgtgtttttttttgctggctacacatgctgtaattgctctgttctcgttgtccaagttgacataa

SEQ ID NO: 40391 - DNA, 2051 bp, DROSOPHILA
cggaacagttggcgcactttccacctagtaattgcaaccatcgcgatcgtattctgtgtttttatatcgtctgtgctctaaatcaacactaaaaagtcaaacacttctttcactgcgtgtagctgcaatcggcgagaatgaagttcagtgtggtggtcctggtggccctactaccgctgctaggagctgtttcagcgaatcgcacttttgtggtggactacgaaaaggatcagttcctaaaggatggagaaccattccgattcattgccggctccttccactacttccgtgctcatccagccacctggcaaaggcatcttaggaccatgagagctgcgggtctgaatgcggtgacaacctatgtggagtggtcattgcacaatccgcgggatggcgtttatgtgtggagcggcattgccgatctggaacactttatacgcctggccgtgggcgaggatctgctggtcatcctccgtccgggtccgtatatttgtgcggagcgtgacatgggcggctttccctactggctgctgaataagtatccgggcattcagctccggacagcagatgtcaattatcttagcgaaattcgcatttggtatacccaactgtttgccaaaatgaataaatatctgtatggcaatggtgggccaattataatggttcaggtggagaacgaatatggctccttctatgcctgcgatctcaactatcggaattggctacgcgatgagaccgagagtcatgtcaaaggtcaggcggtgctcttcaccaacgatggacccagtgtgctgcgctgtggaaaaatccagggcgtcctagcgaccatggactttggagcaacgaacgatctcaagcccatttgggccaagtttagaaggtaccagccaaagggtccgctggtcaatgcggaatactatcccggttggctaactcactggacggagccgatggccaatgttagcacccaatcgattacttccacttttataaacatgctggatcatggtgccagtgtgaacttctacatgttctacggcggcaccaacttcggattcacagctggtgccaatgacattggacccggaaactacatggctgacattaccagctacgactacgatgcacccatgacggaggcgggggatcccactcccaaataccaggccctgcgacgcatcattggccgctatctcccgctgccaaatcaacccgtgcccggacccgtacccaagcgatcctacggaactgtgcgtctgaccacctgctgtagtctgctttcgtcggaggctcgatctcgtctctccactggatttgtgcagtccgccaagccgaagagcttcgaggctttgggacagtactctggtttggtgctctacgagacctggttgcccagcttccagcgggatccgagcatccttagcgttcccggactggcggatcgaggttacgtttatgtggatggtgagttcgtgggtattctggccagggaaacccccgtgttcgaattgccactcagtgcaagtgccgggcggaggttccagattatcgtagagaaccagggtcgcatcaactacggtcgacagttgaacgattttaagggcatcctgcgggatgttcgactggacaagcaggtgctgagcaactggaacatgacccaattcccactcgaatcgtacgacaacctggagcagctgattacccagtcggatgaggcagttcgtcagggcttccaggagctaaagaagttgcgcacaatgctgcgcactggtcccgccatttaccacggtcaactggacatccaaaaggaatctgatctggcggacacctatctggacatgtccggctggggcaagggcattgtctttgtgaatggcgaaaatctcggcaggtattggcccctggtgggacctcaagtcaccctgtatgttccggccgccgtgctcaaggcgggctcaaatcgactggtggtggtggagtatcagcagacacccgcctcacaggagctgcacttccgagatacccccattctgaacgcgaggaccgtttag

SEQ ID NO: 40392 - protein, 637 aa, DROSOPHILA
MKFSVVVLVALLPLLGAVSANRTFVVDYEKDQFLKDGEPFRFIAGSFHYFRAHPATWQRHLRTMRAAGLNAVTTYVEWSLHNPRDGVYVWSGIADLEHFIRLAVGEDLLVILRPGPYICAERDMGGFPYWLLNKYPGIQLRTADVNYLSEIRIWYTQLFAKMNKYLYGNGGPIIMVQVENEYGSFYACDLNYRNWLRDETESHVKGQAVLFTNDGPSVLRCGKIQGVLATMDFGATNDLKPIWAKFRRYQPKGPLVNAEYYPGWLTHWTEPMANVSTQSITSTFINMLDHGASVNFYMFYGGTNFGFTAGANDIGPGNYMADITSYDYDAPMTEAGDPTPKYQALRRIIGRYLPLPNQPVPGPVPKRSYGTVRLTTCCSLLSSEARSRLSTGFVQSAKPKSFEALGQYSGLVLYETWLPSFQRDPSILSVPGLADRGYVYVDGEFVGILARETPVFELPLSASAGRRFQIIVENQGRINYGRQLNDFKGILRDVRLDKQVLSNWNMTQFPLESYDNLEQLITQSDEAVRQGFQELKKLRTMLRTGPAIYHGQLDIQKESDLADTYLDMSGWGKGIVFVNGENLGRYWPLVGPQVTLYVPAAVLKAGSNRLVVVEYQQTPASQELHFRDTPILNARTV

SEQ ID NO: 40393 - DNA, 6310 bp, DROSOPHILA
gaacggggaggtatgtcccctgatcttctcatcatcttttatcatttgtataagctacagtttattttgcagatttcagctgactgttttatgccgttggagagcgtggattcattgccccatgaaccagctctggatacgggtggtgtaaccataccagctcctccatctgaagatactcaatttcccacgtacttaaaggactaaaattataacattttaagttgatagattaggggtaagcgttgagttgattcacttcccattttttattgattactttgtttttatgtcctatgtatttatgtacaattcaatttgttgaatatggcgtgtccaatgcgctgtaaagagttttgtataaaataatgttctcatgcagtttgttttggggatttaaatgcttgtttattaagttgttcagttttccatttaaatttaatatcattttagaatctgatatgatttttttgttcaacattcgaattatttagtcatgctggtttaccgtgttccgtttaattatcagttacgctttactttaaactaatttaaaatttaaaaatctactctgccagcgataatcatccggtttcagttcggtttcaagatcagcgccgttaaatctagtttacgacagaaatgttttcatttgggcagttcactaataacttgtgtaagttgctaatatttaatttgatttaattagttcagtagttgagctttactttggtttaatatatatttcttttcgttcgcatttaatcagctacaggacttcgcagaccaagtgatctggagaatccaaaagttatgcaactcctgtccacttgtttgctatagtaatgaaaataagttactaccgagttacaaaatagatttaaacgtttattgtctgagtttgaatcgaatatcaaaacatattcactatttgagagtgcaactgagtagtacagcaaaatggaaaataaaacactcaatataaaattgttaatatcatacagcttctatttgttttatttacagttcttgaaaaggaagaagagtttaaacaaaaatataatttcgactgattcacactctgttgtgttgtattttccgagtccctgatccctgctccctcctttttggccaggccgtgctttttgctttgctttcgatccccgagccttagatcttggtttcaacgacgggttttttcttcgacacaaaagggatgttcaaagagagaatacaaaatagaaaatgattcgattaagtcagctgccattgagcccagagccaacatacgaggataaccatgcaaagtttggtgtggttttgattttgatttgatttgattttgatctgatttggtttggtttggtttagtggtgagggagcaggcgctagatggtgtggcatgaagcgaactgtgcactttggagacaacaacattaacaacaatgggcgtgagttctgaatgacttcgattcgactgggttttttgagtactttgaatacgacgagatacctataaattgttgccttgatttagctttgattatgctgatattatccatgatcactacaacgtctattaaacaactaacgaattcatctagcttgtatgtatattgacatattcgactaaccactgcgtccctctggcgactaaattacgtttacgatgcatccatcaatcttaaaatgtaaaacatgttccacttacgatctactctgggaatggtcgattaatcatctcccttccgtcagcttactcctttggatttttactatttttgttttgtttttgattttattacttgtttgttttgtgcgccgcataataaatgctgtgtgagtttcttaaacgttctccaaaaaaactaactctttcccatctaaactcgtgatgatgatcatcacttgtctgtcggtttcgattagcatagtacgatacacttaaaggctattaggaaacagttgtatctacataggtttatgagtactctgtaagaaccaaggacacgaacgtagtggaagttataactggtcagatctgtccgatttctggtcctcgtcgtcctgtgctaagcaatcgttagtatgtacagtgtgttggtttttgtgggtcgagtttgggaaatcatatcgaaaatacatacgaaaaaccctaggcctagaaaattgcttataaaattgcgcgacactaaaaaccaggggaacactttgtcatctgagtcttttgatctataaaatagagattaatacaaatagaaccaacaaaatcctgcgatctgtagcggatacgctctcatataaatgcagtttaaaaaacaggtgagcgattttgattctggttgttcggctttgatttcgaaaaagggttgcattttttcttctcatcgtttcattgttgcgtttcgcattcgcgtcagttgaaattgtggtttctgtttcttggttgacttgtggtggcgatactggtgtctgttccggggcacaattctgcacgttactggccgtcgagcatcagaccgtggtcacacgatcgatctccacgtaacgtacagaattgtcgctttgtcagcaaatcacctccttttcatccagaacggccgtgtccatcgagctcagcgatttgagtcgcgtctgcagcaccgaggagccgcgcagcttgcgtttgattttcctatttcgagtgtggtaatgtaataaattatagaattagtggacatgtactgtaatagatgacatacttgtaggcaaaggcagcgaaagcacaacacgagagcacaaagatgaggcagagcgtggccaggatctcggcgggcagtttcatcaaggctgaacactgcaggaaggtctcatcgtccccggaaggacagtggactacaccatcacaccaaacactggcatttacacaggcacccaattcggcacacttaaactggcagtcctctgcgagattggatccataagaagaccatttgaatcaagatcatctattatgcttacccgccatgctcagtgtgggcctgggaatcagttccatccagttgaaggagtactccccgttgccaggacgcaggaactcgacgctgatggctcgggatcgattgacaagcgcaaaatttggcctttcgttccatccggaactaaagatctccacaaactcgtaggcattcgagtcgggactcagtggacaagccacaatggttaggcctaaatgaagtacagattgtagagctggcacaataatggaacatcctatagcctaccctccgacgtggttagtacagctctggacttggtctcacatctccaagtatctgtctgcacataggtcgcgttcagtgtctgcgtgggattgtgtttactcaagaaaatggccttcaggcggacgtacaaaaacttgttgccattagaaggctcaatgagccagggtcttgagcggcactccacctgattacaaaaattttaaatctcatttgtgcctcctaaagcttacggatctacatacgtctccgaaggtcatgtctatagtgccacttggtccgaatttcctgcgtccatccttgcagcttgttggagccttgacgaactcaaacataccctcgaagttaaccgtatctggatcgtccaaggtggtcatgttttgggcgatgaagtgcacctccacatcgcgacttgtagacgtgtattccaccggtaggtgggattggttagaggagttgcacatgcagcctcgatgaagtaaaatggaatcatggtagggtcgctcaaagatctaaagtaaaacgtaatattaagtaaaattggaaagcttaaaggtggttatacctacctcaattctgacattggtatcgccatagcaaaaggagcgattgatatcctcatccacacgtgaatagcacggtctgttggtggtcgttacttttctcatcttgattctgaccctttcgcctcgctgtgcctcgaatttatagatgcatttaaggtttctagttcctcctcttccaaataggaatatgttgcggacactgcggaagatggcaggatccttgcgatccatcatgctgctaaggaacttccgattgcaatcgtgttccccaccaccccaaggcaaaccatcctggtgcaaatcaatgaactcgtacttcagcttgaaatccagtggtctaaaaaaaacggttaccagggatttggacaagtacttcaaaagaaaccccaccttaatactgtggattccgtgttgcgtagctcgagcgtaatggcatcgctggtggacacatagctctccgagatggtgcatggtcttgcgtaggtctcgtttatgttagatctatcacaggtgcgtggtattgtgccccgacaaaatctggcaatcacactagtggagttatgggtgtagtgacccaaggtgttataactactcgtctcggtggcactataaaaatttgaaattagtgtgtcttcctttgtgtataagatgaatcacctaccagttcaagtccttgcaaacgggtgcatcccttagtgttccatcccagatgcgcagcattccactgcaatcctcctgcgtttgcagcactccaattgcgcccacggatgtctcatctatctggccaaactccggatccaagttgaacttcagaacagaaatccacaccttgaaccgggagagcggttgatgcatccccgactgactgctcgtcctgcgcgacaaactcaggtggtcaaaggtcttgaagacgcccagcccttggaggtgatacaggcacgtggaattgggagccagcgagtgcttgggactctcgaggatgccacgacctgcaccgcgaatccaaaactcgcagggtttcttgtttttcgagtacgtgggactctggatgtccacgaattgaacttcgacctgcgaaggggaaaaacaaagtcaagcattttccccagaagagtgccttgccatttggcgaccggtgacccactcacctctagctggaatccgtagagcggcagtacctgcgacgaggtgccggtgaaggtgccaaacggcgacgtgctgaactcgaccaaaagctccggaccgctggaaacggccgccggcaccgcctgaccaccgccgcagaacttcaatatgatggggtcacgtgtggtgtagccgtcgtacacggtcacgtagtcctgcgggtagcgaaaggacaacgagagacaagaggagaacgagaaagagagcagggcgaaaaagaaggagaacagagtgggtgaggagagagcgaaatgagtgagtcggcgacaaatgtgggtggtgcttgttgttttcaccatgtgggtggcactaactaactacacagtgaagaacactatctaaattatattaaacgggaaattgtttgtttaacaacggcagatcctatttaagtttatatagtttaatggtagatatcatctgaaaaggagctgttttaatattgcaaaggtgatcagtgtgacgcataagggtgatatttgtttttctaagtgtagtgattgaagttaaaggccgagtgtggctaaaaagcgggcgatatggtggggtggggtcgggtcgaactgagtgcaaagggacggtaattgctgtaaagaagtggacccaaagtgcagcatctcttgtattacttaatggctactgtacgtatacgtgatttttggttacattccgcctgccaggaacgatggcaagtaatggtgcggtatgttagtctgggaaaattccgggaaatgtaagaaggacttggagctggcctaagtagttgagcacaatggctttgatgtgtccgacacttgatgcgcactaaatgtcaagcattttgagaccatttaaagtttgctttaaatgaaagtaacatgtttatgcggttaagttcggaggttcaagttcagagagctctttttaaccttttactaaaattgacagattgttgttaaaaagttacttgaaatcaacatttaaaacaacatgaatcaacattttaacatttaaaaatacaattaaattgaactgagcttagatttactgaagatggtctgcggaaaggatttgttttatggagtagtcatttcttagagctgcactttcttcagtaaactatatagtagttacttcattaaggttttgaatctgtaggtagcagcgtaatacccgatttcacatctaacatgaacgaatcacgttcatttttgtgcggtttctgcttgctttggtatttggcgcataattgtgcgaattttaatttagttggccttgccaatggggactctgagtgggtgtataatggcattcggaccg

SEQ ID NO: 40394 - DNA, 2474 bp, DROSOPHILA
atggtgaaaacaacaagcaccacccacatttgtcgccgactcactcatttcgctctctcctcacccactctgttctccttctttttcgccctgctctctttctcgttctcctcttgtctctcgttgtcctttcgctacccgcaggactacgtgaccgtgtacgacggctacaccacacgtgaccccatcatattgaagttctgcggcggtggtcaggcggtgccggcggccgtttccagcggtccggagcttttggtcgagttcagcacgtcgccgtttggcaccttcaccggcacctcgtcgcaggtactgccgctctacggattccagctagaggtcgaagttcaattcgtggacatccagagtcccacgtactcgaaaaacaagaaaccctgcgagttttggattcgcggtgcaggtcgtggcatcctcgagagtcccaagcactcgctggctcccaattccacgtgcctgtatcacctccaagggctgggcgtcttcaagacctttgaccacctgagtttgtcgcgcaggacgagcagtcagtcggggatgcatcaaccgctctcccggttcaaggtgtggatttctgttctgaagttcaacttggatccggagtttggccagatagatgagacatccgtgggcgcaattggagtgctgcaaacgcaggaggattgcagtggaatgctgcgcatctgggatggaacactaagggatgcacccgtttgcaaggacttgaactgtgccaccgagacgagtagttataacaccttgggtcactacacccataactccactagtgtgattgccagattttgtcggggcacaataccacgcacctgtgatagatctaacataaacgagacctacgcaagaccatgcaccatctcggagagctatgtgtccaccagcgatgccattacgctcgagctacgcaacacggaatccacagtattaagaccactggatttcaagctgaagtacgagttcattgatttgcaccaggatggtttgccttggggtggtggggaacacgattgcaatcggaagttccttagcagcatgatggatcgcaaggatcctgccatcttccgcagtgtccgcaacatattcctatttggaagaggaggaactagaaaccttaaatgcatctataaattcgaggcacagcgaggcgaaagggtcagaatcaagatgagaaaagtaacgaccaccaacagaccgtgctattcacgtgtggatgaggatatcaatcgctccttttgctatggcgataccaatgtcagaattgagatctttgagcgaccctaccatgattccattttacttcatcgaggctgcatgtgcaactcctctaaccaatcccacctaccggtggaatacacgtctacaagtcgcgatgtggaggtgcacttcatcgcccaaaacatgaccaccttggacgatccagatacggttaacttcgagggtatgtttgagttcgtcaaggctccaacaagctgcaaggatggacgcaggaaattcggaccaagtggcactatagacatgaccttcggagacgtatgtagatccgtggagtgccgctcaagaccctggctcattgagccttctaatggcaacaagtttttgtacgtccgcctgaaggccattttcttgagtaaacacaatcccacgcagacactgaacgcgacctatgtgcagacagatacttggagatgtgagaccaagtccagagctgtactaaccacgtcggagggcctaaccattgtggcttgtccactgagtcccgactcgaatgcctacgagtttgtggagatctttagttccggatggaacgaaaggccaaattttgcgcttgtcaatcgatcccgagccatcagcgtcgagttcctgcgtcctggcaacggggagtactccttcaactggatggaactgattcccaggcccacactgagcatggcggaggactgccagtttaagtgtgccgaattgggtgcctgtgtaaatgccagtgtttggtgtgatggtgtagtccactgtccttccggggacgatgagaccttcctgcagtgttcagccttgatgaaactgcccgccgagatcctggccacgctctgcctcatctttgtgctctcgtgttgtgctttcgctgcctttgcctacaagaaaatcaaacgcaagctgcgcggctcctcggtgctgcagacgcgactcaaatcgctgagctcgatggacacggccgttctggatgaaaaggaggtgatttgctgaaaaaaacccgtcgttgaaaccaagatctaaggctcggggatcgaaagcaaagcaaaaagcacggcctggccaaaaaggagggagcagggatcagggactcggaaaatacaacacaacagagtgtgaatcagtcgaaattatatttttgtttaaactcttcttccttttcaagaactgtaaataaaacaaatagaagctgt

SEQ ID NO: 40395 - protein, 757 aa, DROSOPHILA
MVKTTSTTHICRRLTHFALSSPTLFSFFFALLSFSFSSCLSLSFRYPQDYVTVYDGYTTRDPIILKFCGGGQAVPAAVSSGPELLVEFSTSPFGTFTGTSSQVLPLYGFQLEVEVQFVDIQSPTYSKNKKPCEFWIRGAGRGILESPKHSLAPNSTCLYHLQGLGVFKTFDHLSLSRRTSSQSGMHQPLSRFKVWISVLKFNLDPEFGQIDETSVGAIGVLQTQEDCSGMLRIWDGTLRDAPVCKDLNCATETSSYNTLGHYTHNSTSVIARFCRGTIPRTCDRSNINETYARPCTISESYVSTSDAITLELRNTESTVLRPLDFKLKYEFIDLHQDGLPWGGGEHDCNRKFLSSMMDRKDPAIFRSVRNIFLFGRGGTRNLKCIYKFEAQRGERVRIKMRKVTTTNRPCYSRVDEDINRSFCYGDTNVRIEIFERPYHDSILLHRGCMCNSSNQSHLPVEYTSTSRDVEVHFIAQNMTTLDDPDTVNFEGMFEFVKAPTSCKDGRRKFGPSGTIDMTFGDVCRSVECRSRPWLIEPSNGNKFLYVRLKAIFLSKHNPTQTLNATYVQTDTWRCETKSRAVLTTSEGLTIVACPLSPDSNAYEFVEIFSSGWNERPNFALVNRSRAISVEFLRPGNGEYSFNWMELIPRPTLSMAEDCQFKCAELGACVNASVWCDGVVHCPSGDDETFLQCSALMKLPAEILATLCLIFVLSCCAFAAFAYKKIKRKLRGSSVLQTRLKSLSSMDTAVLDEKEVIC

SEQ ID NO: 40396 - DNA, 7402 bp, DROSOPHILA
cattcaatgttacccattggactcaacgacactttgtgggtatattcgtactgatgtattgcgaatgattgctgctgatttggatgcttagtttggctaataaacgagtcggctgagggtaatttgagggagtgttttttttgtttttttgcctataaatcttcgtttcttctcagcggtaatgggagattgggtgtatatttagtcctagaatgtcatacgtgagtccatgtacatacaatttatttaatatatctttataactagtacaatcgtaattatagctgcgcgtcctcctctagactatatgtatacatagaagtttcaattcattgttttaattgcgaaatgcaaactctttatcctaccgctaaacgcacttaacaaacttacccgctataaatatactttcatgtagtttaattcccgaatcgcgtggtggctttcgtaaactaaaaaaaaaaaattaaggatgcaagtggttgcttacgctaatataagtatatatcattaatatatatatatatgcatatatatatatatatttatatatatgtatctatgtactatatatgtatgtagcctaatgcgattaactgtatgcctttacatgtacaattttaaaaaatttggaaaaaaagtgagtgttttattcctcttcattgcgcttgaataaactgtcgttgatttgaaagttctttatgtatacttgttcataataggatacttgttcttctagggttcatataagtttaaaattctgtgtgtgtgtgtatgtatgcgttggtgtatatatatatatatatatgtctctctatatacgaataatgcattttgtaccgaactagctatagtctacacaaaaaaaggtggttttaaaattgggttttacgtatatccgcctatacgaatttgggatttgatgctcctaaaagcgactttatcgccctatacggatttgtatgtctgtctatttgttttttttttttttttcttttttcatccaactcgccgaagattacatatttcccgtcgcattttccagaccagaagaagaactggtgtgttgcatgttcatcgatttaattactaaaacctacatcagtcgtttggcacacaagtcacgcagtggcgtgaaccacggaacagaatccttccgccggctatttttacaagccgcaacaggggatgtgttgacgttcatgttgatgttgatgttgatgttgtattctgttgtcgactggggggctgcatcccacatcccatacgcgcaataaagttatcagcatcagcttcagcccgccatggattccccattcctcatcatccaactggatccgcatctgctgctgctcgctgtcggcaacgacatcacaatgcatcccatcccatcatattctattccattccattccatcgcatgcattgcatcgctacattgcatcacatcgccagctgccggcgatggcggagatcgccgtgggtgccaaactagacctcggtgccatcctcgccctcgtcgtcgaagagctggctggtgctgccctggccgctgcgcgtcgtcgtcacggacatcttcttcttgggcttcggtggtgggcgtggtgggatcttggcggccttcggagagtcaccgctgctgctggcgtggcttggcgatacggcggcacccgagccgggtgaaaggtaggcggcgtggcccagtccggcaccgctaatgctcgagccgggcagtatcgtgatcccctgttgccgaactccgtacaggggttccgtgtccatggagcccagtcgctgctgctgctgctgttgttgttgttgcaactgctgttgctgctgaatcagctcgtgtatgggctcgtaaatcttactggcattggtcgccgaggacaccgatgtcaggctgggcgtggccggaagtggtcggtcccgcatcgagtactgctgaccagcgcccccctgtgagccggcgatcttggtcagattgagggtggagttgccgccggcagtggttcgcaatcccaagttgtcgtacactggctccgcctgcagttccgcggtggtggcggtgccagtctcgctgggattcggcgatgtggggctctggaattcacttagctgaatggatccgtggccagcggcaccggaagtactgggcgcccagctgggagcgcgcggcttgcgcggaatggtcatatatccctgtttcatgaccacacccgtggccggcgaatagacgacgggtgcgggcaggaagggcgatgtggtggccagcggatgttgctgctgctgctgctgttgttgttgctgctggtggtggtggtggtgctgctgctgctgctgcagctgatggtggtgctggtgctggcgactgctgttggtggtggcaatgagcgccaggttgcgcgacttgggatgctgcagcgtcataaagccgttatgcggagccgtcatcgtcttggtgccgtagatgccgtgcggcgtcatatgcgtgtagaccggactggttagcgacggtggcgaacggatgccgtagatcacctggtcgggtatgttcgactgcgacgattgcatcgagggcgaggtgggcggcacgcgagcgggaaaggccagcagatccggtggcaagctattggcatacgcatcatccacgtaggtgtgtcgagatcggggcgtggtcgtcgtatccgacatggccactgagacggcttcttcgtcgcgcgagtgattggccactggaatggagaagaagatgttggagcatattactaaatgtctgcatggctgactattccattaacgagagttaagatctgtattaagtcctactcgacttctattggtcaccaacttaatcccactcctctatggagctcctgttgaataaggcacatttcactatgcaattacatttcgatcgaatatacataatcccaggagctgtgttgcgtgaacagaaaaggcgggattaattctgtttgatttttctactacgctttgacgtattcgagggattttcagtagttatgtgccgcaccaaagccctctgtggcttttaatccggcatccgcgtccgttgcaaatagttttgatagccatttcttttgaaaaataatgattcttgggtaatcccctcgcccgtggaagcggagcacatgagcacacttggcacatgtcactgctcgtttggccaatccggacgagaaactttgggcataagtgacacacgagtgctgttcaccccagttcagctcattccagtcctgcccctgcccctgcccctgcccatgtccatgtccagttcggttcagttcatcaattgcgttcaattgtctttcccactgtcggtgcaatccacatttcaacagtttctttcaatattcttttaaatatataatatagaccatactatttatgtactaaatgtattcagattattactttaatatatgcaagctgctaaagggaatcgtggggaaactatagtcctttggcctacttaacgtataatactaagccaagtatttctagctacttatctcatcataaagacttcgaatcagtttcaagtcatcacatttatattgtatgatgactgatgggtagcgcgaatgacgatcgaatgaactgcgagattagctaatagattcatcacgaatccgcgtgatttacgattccaatttagtttgacagcctcgcttaatattgccatgtatgtatgtatgtatgtatgtatggtatgtaggtgcgctgctgggtgtgtttgtttgccaaacattgttggtttttctgcgtttcctgctcgccctaatagttgatgagcaaattggaaaatttcaacaaacaaacgatgggcctgcccgagccccaggagaacggggccaggataaccatttgggaacccagggcaaatgaaatttcggtgttttgccttttgcgcgaaaatacaagtgtgtttgcattgccagcagcatttggcatggtggtcattccgtcgacaaacgtcctggagtgccaaccagatggaaactctggctaaatagagatagatggacaacactccatgttgacaggagactttcgcatcatttgctgctcaacgatgctcagccatgatgatgacgtggcgatgataagccatctagcttgttattaaatcgcagaattactaatcaattcgctatgattgtcaactaatcccttcaaggagcatgagatactccactccgttgctcattttttgtttgtttttaactttgtcatgttatttattaacattacacggcaatttgcctgtttttctgctcaacgacataatggcaataatatgatttttatcgcacaaaagccaggacataatcacaattgctgattgaaacacctggcgagaagcgaatgcattaggtgtggaaaaaaaaaaaatagttggaaatggacccacactttgaatttagtggctggccacttaaatgcgctgtttttacaaataataaacattaatgacgaaataaaacatgcaatcatgacctggcatgtgtgtggttaacattttgtctggcaataaaaacttaaatccttcacattttcgcgcttaaatatattagtaaatatatagcatttgaatgtgcaaatgcatttcaatattaaaatagagtttgtttagttagccataattaaaaaaaaatagcctctcattctattttatctttcgaaatcgcactgcgttagaaaaaaaaaaaaaaacagcctgcgtttttccacccaattatgccagtttatacagtatatataacatccttggcacctctgcgactactcaccatagacggtgtcgtcgagcagcgtcttcttgatctcgagcacgtcatcgccaccatccacgctctcgatgtccgtgcgccgtggcggcttctcgactggattgacctcgttgagcaggctcttctgcatctccatgatgacggaaccctcgagcatggagccgttgtgcgtcttgtccatcttggaagagatcagcccgtcgccgctcatcatggtggtgtccttttgataggtcttgatgcgacggcagtaccagaagagcgtcagcaccgccacgagcagcaggagcagcagcgtcgtaatgattagacagatgatgagaaacatgttcgtttgcggatcaatggttggtgccccaatggcgcccatgcccatgccatcggaggcggataccgcgccggcatagtcaccgctcacgagcagctggaactcggcctccgcccgtccgccccggttatccgccacacaggtgtaggcacccttgtcggaggcccgtacgcccacgatgcgcagctccgaggtgagcacctgggagggctgctccggcatctgttccacggaggtgaggacacgcacacgcgggtcgtactgctgcaatggccgcttgttgtacacccaggtgacattgggacgcggactgccgacaatgcggcagggtagcgagatattgtcgtgattggcctcgatgaaggagcgcacggaacccaaaatgcgcggccggcaggcgaagttctccgatggcacctcgctccacagcttgccgcgcagctgtggcggctcctggcaatcggtgggcggtgtgtagagccgtttgctgatcgcaaagtcgcgaaagtcctgcagctcgcagctgcagttccatgcgttaccctgcagcgatagatgcatcagcttctgcagatccttgaatgtctccttgtgcagatgtgagaggcggttctgttccagcgaaatggcgctcagcgccattgtgccagcgaagacgtgcagctgcacctggcgcaatcgattgttccggaactcgatgcgcgacaggaagctcaggttgacgaacagatggttgggcagcacctcgatctcgttgttgttgatgatcacgttgcgcagcttctccaggccggcgaaagtgcccggatgcagttcccgtatccgattgcccgacaggtccagctcgattaggatatgcagacccttgaaggcctcgcgatgcacctcctggatggtgcagttgcgcaaaaagatcttgtgcacattgggcagaccggccagtaggaactcttcgcgccgcagctcgggtatttgattgtgggcaaagtccagcacctgcatctcgttgctcatgtcctgcggaattttggttagcgccttgttcttgcagtcggcgctcttcttgcccgaattccactgacagtggcatgtaccgcagctctgcatccaatcggtggtgcctgcggtgggcggcggtagggccattagaaccactagcacacccagcagcagaaggatcatccccagtcgtcgtccgcttcgttccgttctgttgcccatcatcgctggctgtggctctaagtctgcgtctagctagggatggggatgcggatgcggatgcggatgattttgttgttcgttctggcgcggctgtatcgggatttatcgcgctaatccgcgacgacgagccgccgaacacgtgccgccgaaacaggcagcttcgcagctatgagcagctgcgaacgaactccaaactccaagcgctgaccccgggtatgtggataacgggtcggtttggtttcgtttaatcgcctcgccgcgtccgctacgtgctccaaactcctgcccttggctgcacggtattaatccttttgacgcactgttaatttgatttttgcacccttctccggctcgctgtgccactcctcgatccgtgcgaatgacaaggccccgtgattaattaatgtcccggcggacagtggtgggctctaagctcccgaatagccgtgcttcttctgctcttgcggctgctctttccacctgaaagaaatgcgaaaaaatgcacagagtttgtcaattaataaagtgtttcgaaaagtgagtgggcttaactcgggctctctgcctgtccaaagggacaagggcgaggatatggacaaggatacggatacgaatgcggttggggatggggatggggatggagataaccggacccaggggttgctaacgaggcaaaaggtgagacattagcggcaaggccaaaaggatttgccttattggcaaaagtttgttgtgtgtcatcaatgggattgggtaattagcgaggcattcgcagctcccgcataatgcaatatatatatatttatatatatatatatacatgtggtgtggtcccgatacaagaggattatgttttccatggctcgcaggagcagcaagttttattacaaattgatcgaatggctcctatttgcatacgtgtatcaaactccgttcaaagaaacattaattaaagataccatttctgagatacatttaatttagctgtttaaattaagattatgcgttgcaagtgtaagttgtaagttaagat

SEQ ID NO: 40397 - DNA, 3317 bp, DROSOPHILA
ctagacgcagacttagagccacagccagcgatgatgggcaacagaacggaacgaagcggacgacgactggggatgatccttctgctgctgggtgtgctagtggttctaatggccctaccgccgcccaccgcaggcaccaccgattggatgcagagctgcggtacatgccactgtcagtggaattcgggcaagaagagcgccgactgcaagaacaaggcgctaaccaaaattccgcaggacatgagcaacgagatgcaggtgctggactttgcccacaatcaaatacccgagctgcggcgcgaagagttcctactggccggtctgcccaatgtgcacaagatctttttgcgcaactgcaccatccaggaggtgcatcgcgaggccttcaagggtctgcatatcctaatcgagctggacctgtcgggcaatcggatacgggaactgcatccgggcactttcgccggcctggagaagctgcgcaacgtgatcatcaacaacaacgagatcgaggtgctgcccaaccatctgttcgtcaacctgagcttcctgtcgcgcatcgagttccggaacaatcgattgcgccaggtgcagctgcacgtcttcgctggcacaatggcgctgagcgccatttcgctggaacagaaccgcctctcacatctgcacaaggagacattcaaggatctgcagaagctgatgcatctatcgctgcagggtaacgcatggaactgcagctgcgagctgcaggactttcgcgactttgcgatcagcaaacggctctacacaccgcccaccgattgccaggagccgccacagctgcgcggcaagctgtggagcgaggtgccatcggagaacttcgcctgccggccgcgcattttgggttccgtgcgctccttcatcgaggccaatcacgacaatatctcgctaccctgccgcattgtcggcagtccgcgtcccaatgtcacctgggtgtacaacaagcggccattgcagcagtacgacccgcgtgtgcgtgtcctcacctccgtggaacagatgccggagcagccctcccaggtgctcacctcggagctgcgcatcgtgggcgtacgggcctccgacaagggtgcctacacctgtgtggcggataaccggggcggacgggcggaggccgagttccagctgctcgtgagcggtgactatgccggcgcggtatccgcctccgatggcatgggcatgggcgccattggggcaccaaccattgatccgcaaacgaacatgtttctcatcatctgtctaatcattacgacgctgctgctcctgctgctcgtggcggtgctgacgctcttctggtactgccgtcgcatcaagacctatcaaaaggacaccaccatgatgagcggcgacgggctgatctcttccaagatggacaagacgcacaacggctccatgctcgagggttccgtcatcatggagatgcagaagagcctgctcaacgaggtcaatccagtcgagaagccgccacggcgcacggacatcgagagcgtggatggtggcgatgacgtgctcgagatcaagaagacgctgctcgacgacaccgtctatgtggccaatcactcgcgcgacgaagaagccgtctcagtggccatgtcggatacgacgaccacgccccgatctcgacacacctacgtggatgatgcgtatgccaatagcttgccaccggatctgctggcctttcccgctcgcgtgccgcccacctcgccctcgatgcaatcgtcgcagtcgaacatacccgaccaggtgatctacggcatccgttcgccaccgtcgctaaccagtccggtctacacgcatatgacgccgcacggcatctacggcaccaagacgatgacggctccgcataacggctttatgacgctgcagcatcccaagtcgcgcaacctggcgctcattgccaccaccaacagcagtcgccagcaccagcaccaccatcagctgcagcagcagcagcagcaccaccaccaccaccagcagcaacaacaacagcagcagcagcagcaacatccgctggccaccacatcgcccttcctgcccgcacccgtcgtctattcgccggccacgggtgtggtcatgaaacagggatatatgaccattccgcgcaagccgcgcgctcccagctgggcgcccagtacttccggtgccgctggccacggatccattcagctaagtgaattccagagccccacatcgccgaatcccagcgagactggcaccgccaccaccgcggaactgcaggcggagccagtgtacgacaacttgggattgcgaaccactgccggcggcaactccaccctcaatctgaccaagatcgccggctcacaggggggcgctggtcagcagtactcgatgcgggaccgaccacttccggccacgcccagcctgacatcggtgtcctcggcgaccaatgccagtaagatttacgagcccatacacgagctgattcagcagcaacagcagttgcaacaacaacaacagcagcagcagcagcgactgggctccatggacacggaacccctgtacggagttcggcaacaggggatcacgatactgcccggctcgagcattagcggtgccggactgggccacgccgcctacctttcacccggctcgggtgccgccgtatcgccaagccacgccagcagcagcggtgactctccgaaggccgccaagatcccaccacgcccaccaccgaagcccaagaagaagatgtccgtgacgacgacgcgcagcggccagggcagcaccagccagctcttcgacgacgagggcgaggatggcaccgaggtctagtttggcacccacggcgatctccgccatcgccggcagctggcgatgtgatgcaatgtagcgatgcaatgcatgcgatggaatggaatggaatagaatatgatgggatgggatgcattgtgatgtcgttgccgacagcgagcagcagcagatgcggatccagttggatgatgaggaatggggaatccatggcgggctgaagctgatgctgataactttattgcgcgtatgggatgtgggatgcagccccccagtcgacaacagaatacaacatcaacatcaacatcaacatgaacgtcaacacatcccctgttgcggcttgtaaaaatagccggcggaaggattctgttccgtggttcacgccactgcgtgacttgtgtgccaaacgactgatgtaggttttagtaattaaatcgatgaacatgcaacacaccagttcttcttctggtctggaaaatgcgacgggaaatatgtaatcttcggcgagttggatg

SEQ ID NO: 40398 - protein, 892 aa, DROSOPHILA
MQSCGTCHCQWNSGKKSADCKNKALTKIPQDMSNEMQVLDFAHNQIPELRREEFLLAGLPNVHKIFLRNCTIQEVHREAFKGLHILIELDLSGNRIRELHPGTFAGLEKLRNVIINNNEIEVLPNHLFVNLSFLSRIEFRNNRLRQVQLHVFAGTMALSAISLEQNRLSHLHKETFKDLQKLMHLSLQGNAWNCSCELQDFRDFAISKRLYTPPTDCQEPPQLRGKLWSEVPSENFACRPRILGSVRSFIEANHDNISLPCRIVGSPRPNVTWVYNKRPLQQYDPRVRVLTSVEQMPEQPSQVLTSELRIVGVRASDKGAYTCVADNRGGRAEAEFQLLVSGDYAGAVSASDGMGMGAIGAPTIDPQTNMFLIICLIITTLLLLLLVAVLTLFWYCRRIKTYQKDTTMMSGDGLISSKMDKTHNGSMLEGSVIMEMQKSLLNEVNPVEKPPRRTDIESVDGGDDVLEIKKTLLDDTVYVANHSRDEEAVSVAMSDTTTTPRSRHTYVDDAYANSLPPDLLAFPARVPPTSPSMQSSQSNIPDQVIYGIRSPPSLTSPVYTHMTPHGIYGTKTMTAPHNGFMTLQHPKSRNLALIATTNSSRQHQHHHQLQQQQQHHHHHQQQQQQQQQQQHPLATTSPFLPAPVVYSPATGVVMKQGYMTIPRKPRAPSWAPSTSGAAGHGSIQLSEFQSPTSPNPSETGTATTAELQAEPVYDNLGLRTTAGGNSTLNLTKIAGSQGGAGQQYSMRDRPLPATPSLTSVSSATNASKIYEPIHELIQQQQQLQQQQQQQQQRLGSMDTEPLYGVRQQGITILPGSSISGAGLGHAAYLSPGSGAAVSPSHASSSGDSPKAAKIPPRPPPKPKKKMSVTTTRSGQGSTSQLFDDEGEDGTEV

SEQ ID NO: 40399 - DNA, 3344 bp, DROSOPHILA
tgtcccgctcccgtatccaagcattgtcgcttgatagttcccccaggagcatgttgccccctgtgtgctggaggagccttcaggataatctactccagaaagcaattcgatcgcgccatgtacggactaagggcacagagcagcactcttttgacattgcaaggagtgctgcagcagctggatggactggtgcaggttagcgaatgtcaactgactggatttctcaccatggaagtgggcatttttgtggccatagtaccgtccagcagtatcaagagaccgactcaccttcaattggaggcctgcgcccgggaggcggagaagatatcctccctaatcaatgcccaatcacccagaattacaaccaatctagctctatcctgtttgacagtatcgcatctactagaacccacgccaaatggagctacatcttatggtccccacgccatttggatactccccttacttttgttagtttctagagtaatcatagcttaagatagtcctagaaggagtgtgtatgatctgactcaatcaagtgaattcttggtgccaattaacccgttattctaaggagatggaaagtgccttcaactgtaaggaattgaccctctgtaccatgtgatattagctaaattaattcttaagctttaatgttcttttatagttattatttaatttatgccagggtccgtaaatcaccaaaaccccctttttgttttacctaatttaaatgtatttaataattcaaatcattgctccatggtaatatttaaatttaaaataattatttaaaatctggatcgtaaaagtacaaagagattgatggaccaaaactcgacactgtgccctaaccatgtggaaacattcttaaatttggaaaacattgtaatataattattttttggtccctggctaggagttcgttaatgaccaaagcattgtccgcctaggagtatcgctagtctaataaaaaccccagaaaaaaacacagcaacttaagatgaagcatggcttcctttattgaaccactccatatagatcctgccgaagctttattataataaatgtacgaaaagggtagaaaggggaatcgctttaagaaatctccatgggcaccgcctggacgcgttcggtgacgagtaggtccttaatgttggtgtgcagcacggttgaggttccggtcttgaagcggtagtccaactggcgcttgcccttcttgttagccagctcatagttgcgcagatactcaacactgcccttgcggataacacacagatcgatgttggatcccgaacccagatcgttaaacactccggaggcgatggcatcgcgcaccagtttcttgccctcctcttcggacaagtcaggtttccagcgactttcgaaaacggtcatggcggccagggaacccgatcccatggtggcgtacggcagcttatccgaacttccatgtgggtgaatggaatagatgtggggtccagtcttatccactccaccaagcaccagagcggcactgatatgaccctggtagcggaaaagcatctgcttcaacatcgtattggcggccacaacgcgcacctcacgatctgtctgcaagcgatgcagctccagctgggaggagatgagatccgtagtcatctcagtgtccgcagcggttccagctccacagcagctgaaggtaaatattttcgttaggtattgggagatacttgcatgttagaaagtacacatatttttaagttagagcaacataagctacaccctaagatcctcaacttaaaacacgggccccttaaaattggagacaaattgatctaagccggcgaggacaaggaaataggcccacatttgaaatgcaggaaaaaataccgtaatccctcttatagtattattaggttccctgtgcacttaaaggcgcataccgtcggtggacttactatatgtttttggccaggtaatggatcttggcgcagttcttgtccgagacaatgggtccctcggtggctcgcgtatcggcgcccagaataacaccatccttgtagatgatgccaacgattgtggttcccgtcttggtggtggtcggtggcttgaagcctcgattcaaaagagttgcattgctgaaagcaaataaaacaccaattaataaaagccgatggggtattgctgaacaacttggacgattcttaccgcttgcagttgtcgaaattgaaaccagcgcggggcagatcgcgtgcgttatccaaatccattatatatattcttcaattcaactatattagcaaggaaaactaaggttttaattctgccgagcgcgatgacaaacaaaattgttaaatgcttgctagagctggaagtacaatcgatattgtatcgatatatattcatggactcaactagagcgatagtattgaagaaataaattattaataatttgacgttattaataatttgacttatgtaacttaaattattcaatgttgtattattttaatattttaatgttgcattgtataattttaaaactttttaatgtttggaaatattccccgcagtatacatgcaataagtgcttaggaaggccccttatcttttgtaagcgaatagtcatgtttgaaaaatatcgatatactgtttccacctgaccatcttggcatagtaccatcacttttgtgaactgcatccctgaagagtattttggtaatttaccatgtctgcggccaccaaattacataaaacaagctggtgcgccctgcggcagcttcaacaatacagaactaagggtaagtaacactaattaggagtccttttattgaccaaagatggaggaagtggtttacataatgccggcagtcattcacgttccgcggagctcttcggctagtgatggcagttcgttgatgtcttggcggaaaaatcgctagaatttctatagatcccagttattattttagatagtcaaccataatttaaattcaatttgttgaaactgtactataaaatatgtcttttaacttattaattatccctacagccaactttagtggcagttctgcatcgttagccaagcggaatgacctgttcaaccaggagcagcgccgtcaacgggatgcagtgggtcgaatcgataagatcgaggtgcggtatctgggacttcccgaggatgtcactctggtgatgaacggcaacatctcaacgcccttcaattgcgcccagcatctgagtgaggggcactgtaagcgatcggcactggccttgatcgacggcagtgttccctgggatatgcacagacccttgcaggaatcctgtactctgcagctgcttaacttccatgtttccgagcc

SEQ ID NO: 40400 - DNA, 1009 bp, DROSOPHILA
caagcatttaacaattttgtttgtcatcgcgctcggcagaattaaaaccttagttttccttgctaatatagttgaattgaagaatatatataatggatttggataacgcacgcgatctgccccgcgctggtttcaatttcgacaactgcaagcgcaatgcaactcttttgaatcgaggcttcaagccaccgaccaccaccaagacgggaaccacaatcgttggcatcatctacaaggatggtgttattctgggcgccgatacgcgagccaccgagggacccattgtctcggacaagaactgcgccaagatccattacctggccaaaaacatatactgctgtggagctggaaccgctgcggacactgagatgactacggatctcatctcctcccagctggagctgcatcgcttgcagacagatcgtgaggtgcgcgttgtggccgccaatacgatgttgaagcagatgcttttccgctaccagggtcatatcagtgccgctctggtgcttggtggagtggataagactggaccccacatctattccattcacccacatggaagttcggataagctgccgtacgccaccatgggatcgggttccctggccgccatgaccgttttcgaaagtcgctggaaacctgacttgtccgaagaggagggcaagaaactggtgcgcgatgccatcgcctccggagtgtttaacgatctgggttcgggatccaacatcgatctgtgtgttatccgcaagggcagtgttgagtatctgcgcaactatgagctggctaacaagaagggcaagcgccagttggactaccgcttcaagaccggaacctcaaccgtgctgcacaccaacattaaggacctactcgtcaccgaacgcgtccaggcggtgcccatggagatttcttaaagcgattcccctttctacccttttcgtacatttattataataaagcttcggcaggatctatatggagtggttcaataaaggaagccatgcttcatctt

SEQ ID NO: 40401 - protein, 272 aa, DROSOPHILA
MDLDNARDLPRAGFNFDNCKRNATLLNRGFKPPTTTKTGTTIVGIIYKDGVILGADTRATEGPIVSDKNCAKIHYLAKNIYCCGAGTAADTEMTTDLISSQLELHRLQTDREVRVVAANTMLKQMLFRYQGHISAALVLGGVDKTGPHIYSIHPHGSSDKLPYATMGSGSLAAMTVFESRWKPDLSEEEGKKLVRDAIASGVFNDLGSGSNIDLCVIRKGSVEYLRNYELANKKGKRQLDYRFKTGTSTVLHTNIKDLLVTERVQAVPMEIS

SEQ ID NO: 40402 - DNA, 4457 bp, DROSOPHILA
catccatttaacgctctcggctcgtttcagttctcgggcaggtgtcaagcgacgtacacacgaaacgccgacgcggtcacaattccagaatatcatatacatgctatatatgtgtatgctcaagtggctaatttacatacgcgttgcgacccgtctatttacctgaacctgagctgtctggactacactctttaacatttccttacggaaagcgagtgtacaaagtcacaacaaattttcaagacatattctcggtatatatatatttctgtattcaaacatatcgccatgctggaccccatttcggacgcaccgctggtcttggcctacgtctttatgtcgctgctggtgctcattgtgtgcttcatactggtcaatgtggtccacaagctgtatcgcagtctcaacggcgaggtatcaacggggctggtttctccggcacagcagctgaagacctccatcatggagctagacgccatgaagaccggttaggatgggtgcagcgcagctggctatgagaggcgcgagaatctcaagtctcagtctccgatgtcagagctccggttttaattcgggcgattggagcgatgtacgacgaacgacagctgctgaccacccacacgcacgaaccacacaacctagacgcctgttgatatgttaagctatgcaactagactagacgtaaataaatacacgaaactaggcttacgagtagaaattaactacattaaacgcgctggtcctctagtcacttaattgtttgtttttgccctaaggttaggttacatgtacattgatattgtaaataaaataacgtgaacgataactgaactgcaattaaggtagattgggggcaagtacaaagcacttaaccgatccgtccagacagtaaaacgtcgcctgatcgaacgatgcgtagaaaaggcacaacagccttatcgttgcagtatcgagacgtataatttgtgagtcaatcaaatgcgtgataaggatccctgacttagtcatagatttatacatagtttatttaaaatagcatgttcatctttaaatttgcaataagagcgcagtttgttgttgtggtagctgaatgagtacggactgcaagagacgtcagctttcgggcccagggcctcgcggcttcgacaagttctggtaaacggtgttggggattggatgagcgtagaaatgatagcagcaggctgctggtggttctgtggcagtggtatcatcaatctgtgggatcactgtaacaaaggaaacattactaacaattctcggttcgtttttattccaaatctcaccccgagaaagtctttgggtgctgcgacgttaggtcatcatcctggctgccaagagcctttttcacatactgccaaatggaatttaaacaaataacatataaccaataacctcacaatagaacctaccattggatttaaaatgatctcctcctccattttgttgatctgcctaacttgatccagaacgtgtgttatattattttgcacgttgaggaacatctccggtgagttgtatttctctgggtcgtctttgaacaacaccataccgtccttttgattgatgctggcatatatttcacccgattttatctgcaattaggtattatctcggtataaataaaaaacgaaaaaagaagacaacttcttaccatgttgagaatgtaacgctctgcttcgactgcgctggcaagttggacacgactggccacatcgctcagggaaagggtcaagaaggttttagtgagccgctggatgtttcgcttgtacaaggaggtagccacctaaggggatacccaatattaaagtttcatagttagatggttctgccagttatcttattaaaaaactgtgttgtttagaatacagaaaaatctaaatttaatttccaccggaaataattttatgtttatattatgtttatacttccgcataaatttaattattttttttttatttgaaacggtgagtaattaaaagttcaatttgtagcactgttcaaccttgaaaagaattgggtgtttttaatttttttttcgaataccgtcttactttttacatacggaagccacagattagaaaagaaccaggaatgacccttaaatacttgcctgcttggccagtcccatattgttatcacgcgtaaatgcttcactgtacttgagtatgataatgcgcagctcttcgctagacgaattcgcgtacacattgaccaggtcgtggtagtgattggccatcggcttcataaaacgaccaatgacctgtgtgttttttggtatatacgctatctgcaaccgacacaagattttccgattgagagactgatatataaacggaactaaattgttgtccagcttaccttgccttcgacgatgagtgaaaccatgagaaattttttgtaggcctccagcatgatgtgcgacatggccattgccggagtggtgatgcagacttcgaagaagtacaacgcacgctcgtagttcttcaccgccgtgtagatcatgccgccgtagtagaagtacagcaagaagtacttggcatcgttgttggcatcctaaaaaattaatctatgagttctagtagcccagaagttcattttcaaccgtgaataccgcgtgctgggactgctgctgctgttgcgtcttgcactcggctgccacggtggagatgtccgtgatgtccgcgtccagatacggcagcaccacactgaagtttttcgccttcaggctgagcaggcagagatcggcgtgtatgggagttaactgggtttccaactgtcgaatctggtcgatggcgcgcgaaatgatgcgtatgcccaggatgctgaggttcttttgcaccacaaactcggtaaacagatggcatgtttcgtaaactgaatgggatatgtgattacttttagggtacttttggaacagaagattcatgtctcacaggcgcacaccgcatagcgcagctgctcgttattgttgcgctgcacaaagtcccgcatcagctggataagttgtaccggctccggattcgcggtggacgcactgtgcagtttggccaggagcacatagagcacgcccagcgagtgctgctgcatgtctagcgtctccagcacgttgtccagaatgctccagttgcgggctagcagcgacagcgactccggcagctcctcggccagctcccgatagcttcctgtgatgaaaagccagccagcaaagttagttgcgaatcgctttaatatcaaaacaaaggcggcaacgagcccggtttcttgaggatcgttcttcgccggtcggccaacttaccggacgcactcagtgtgcgcacttgattcacatagttttccagcgcgctgcccattttaggtaactccgagactactttttggcctattaacttgcaaaactgcgaaaaataatttcgcgaaataacaaatgactgccgacggattagagctgggaataaaacgatgaatattcggtgctgtcgatttcttatcgattagtggcctaaagacagcgttgttctacactggctctgtaataacgcgccatctataacttataacactatcactcagctggaaaaatttagaacaggcacacaaaaattaaaggattaagacacttgatgctcttctttgtactctatactatataaatttaattcgcgcacttaccattagaatcagcgttatgccatgtttataatttaatttatgaaattttaagaaaattattctaaaacaactagttcaaatttcgattagaatcagcgttatgccatgtttataatttagtttatgaaattttaagaaaattattctaaaacaactatttcaaatttcgatagtgcagccgcgatagtgctcactattttcgataacactttgttgctgttattgaattgctgttaatatcccaatacgaaatgtaactaatataaaatggaaaattctgcgcgaatcgtatatgtgtgcagtctctgccttcgtcaatatgatctccaggaggatcttcgaggacatctcgtctactttcacggctatgagcccatctcaacgcccagtgtcaaaaacaaaactgcgaagacttcaactaaggaacaaactgcagccggcagcaacagccaggataagcaaaccgttgtggagcgatcggagaactcggaacccccggcaagtgaactgcagcccatgcctttcaaggactttcggctggtgctaagggccaacatgttagagccgtatgtatgtccatattattaccataagcttctgacaaactcgtttgttaaaggtgctcctttggaaaggaatgccccttcaagttccaagatgctaccaaaatggagctccactgtagttgccataagggtggcagtttttcctgctgcgaatgtggcatggaactgcccaactggcggcggtgctcggctcacctgtgg

SEQ ID NO: 40403 - DNA, 1655 bp, DROSOPHILA
gtcggcagtcatttgttatttcgcgaaattatttttcgcagttttgcaagttaataggccaaaaagtagtctcggagttacctaaaatgggcagcgcgctggaaaactatgtgaatcaagtgcgcacactgagtgcgtccggaagctatcgggagctggccgaggagctgccggagtcgctgtcgctgctagcccgcaactggagcattctggacaacgtgctggagacgctagacatgcagcagcactcgctgggcgtgctctatgtgctcctggccaaactgcacagtgcgtccaccgcgaatccggagccggtacaacttatccagctgatgcgggactttgtgcagcgcaacaataacgagcagctgcgctatgcggtgtgcgccttttacgaaacatgccatctgtttaccgagtttgtggtgcaaaagaacctcagcatcctgggcatacgcatcatttcgcgcgccatcgaccagattcgacagttggaaacccagttaactcccatacacgccgatctctgcctgctcagcctgaaggcgaaaaacttcagtgtggtgctgccgtatctggacgcggacatcacggacatctccaccgtggcagccgagtgcaagacgcaacagcagcagcagtcccagcacgcggatgccaacaacgatgccaagtacttcttgctgtacttctactacggcggcatgatctacacggcggtgaagaactacgagcgtgcgttgtacttcttcgaagtctgcatcaccactccggcaatggccatgtcgcacatcatgctggaggcctacaaaaaatttctcatggtttcactcatcgtcgaaggcaagatagcgtatataccaaaaaacacacaggtcattggtcgttttatgaagccgatggccaatcactaccacgacctggtcaatgtgtacgcgaattcgtctagcgaagagctgcgcattatcatactcaagtacagtgaagcatttacgcgtgataacaatatgggactggccaagcaggtggctacctccttgtacaagcgaaacatccagcggctcactaaaaccttcttgaccctttccctgagcgatgtggccagtcgtgtccaacttgccagcgcagtcgaagcagagcgttacattctcaacatgataaaatcgggtgaaatatatgccagcatcaatcaaaaggacggtatggtgttgttcaaagacgacccagagaaatacaactcaccggagatgttcctcaacgtgcaaaataatataacacacgttctggatcaagttaggcagatcaacaaaatggaggaggagatcattttaaatccaatgtatgtgaaaaaggctcttggcagccaggatgatgacctaacgtcgcagcacccaaagactttctcgggtgatcccacagattgatgataccactgccacagaaccaccagcagcctgctgctatcatttctacgctcatccaatccccaacaccgtttaccagaacttgtcgaagccgcgaggccctgggcccgaaagctgacgtctcttgcagtccgtactcattcagctaccacaacaacaaactgcgctcttattgcaaatttaaagatgaacatgctattttaaataaactatgtataaatctatgactaa

SEQ ID NO: 40404 - protein, 445 aa, DROSOPHILA
MGSALENYVNQVRTLSASGSYRELAEELPESLSLLARNWSILDNVLETLDMQQHSLGVLYVLLAKLHSASTANPEPVQLIQLMRDFVQRNNNEQLRYAVCAFYETCHLFTEFVVQKNLSILGIRIISRAIDQIRQLETQLTPIHADLCLLSLKAKNFSVVLPYLDADITDISTVAAECKTQQQQQSQHADANNDAKYFLLYFYYGGMIYTAVKNYERALYFFEVCITTPAMAMSHIMLEAYKKFLMVSLIVEGKIAYIPKNTQVIGRFMKPMANHYHDLVNVYANSSSEELRIIILKYSEAFTRDNNMGLAKQVATSLYKRNIQRLTKTFLTLSLSDVASRVQLASAVEAERYILNMIKSGEIYASINQKDGMVLFKDDPEKYNSPEMFLNVQNNITHVLDQVRQINKMEEEIILNPMYVKKALGSQDDDLTSQHPKTFSGDPTD

SEQ ID NO: 40405 - DNA, 3155 bp, DROSOPHILA
tcgatggcatgcaggccaccctggacctcaggatggtttgcccggctatttgagagcgttgggatggcgtccacccggcgcatgttcacatcgtagacgagcagtttattgcacttggtcccgaaaaccacttgtcgactgctcagccacttggagcagaagaccttgttgatgtagcccagactaatctgcgtctcgcgcagcatgtcgtgggttagcacatagcggctggtgtactccacattgacactgcgacgctgcagaggatggtgggacaaagttcacgttagcaatgcaagtggtgcgacttcacaacatatacccacatctcggagtccactctcccggctgcgcaggtagtcgcacaggttgtaggatgtgttcaggacctcctcctgctgttggggcgtctcctcgtcgctgccggaatcctcgtaagtaacaaagtcgtctggtttgtccggttttcgtctacgctcctgtcgcatcgcccgctgcttggccctgcgctcctccagccgcgaggatacgtggcaggacggataggtgcccacgacgctgtcgcggatggttctcaccatcccgttgaacatcttaaggtaattgtttaatccgatttgttgtcttttgctttacgggttatcatccgcaaacaaaaatggtggtgcgtagactacagtggaactactggttcggaactgaagtttgctgaaccgattgttttgcatttaatgcagagatacaaattaagggaaataaaaatacaagtgttgacatttttctatttggcacaatactcggccgctctggttacctgaatatatatatatatataataatatatatataatatacagtatttatataaagtcggatgtcgcacaaatgcgttacactatcgttcatccctaacgataggccatcgctttcacaaagggttttatctattctcacgaaatcagctgttgcgattgaagtggtgactttgtttgtaaataaaatgaactacaacgccaagcgagtaatgcgacagaactcggtttgcgtgggttccaacgacatggcagcgtcgccgataatgattggacctgccccgccctcggcgcccagcacgccgcaactgcagaccaccgaggacatcaagccactgcttgtgcagcgccaagtgattctgctgcaaagtggaagcataccgacgaatccctcgccacagcagatcaacctagctggacataatgtagccggtggtgccagcgggagcaacgttgccaacgttctcattccggatgatgcacctgtctcactgctcacagagattgcggatatcatgcgaagcttcggcgacagcgatcagcccaggacgggaagtgtcaagctggtggagcagatcctgcagcagcagctgcgcggcatcttcaatgaggcttcgctggtggccatgcggcggaaacagaatccctgcccgtcgcaggcggactttgagttcctgatgcgcaaccatccggtgaagatagctcggatgcgaaagcacctcaaggatatgcgcatactcaaaaggttccttagtatccgcacgggaaggccgcaggacttcatggacgacttggagcagcaggaggaggacgaggagctggccatcgatgtgtacgagctacacgacgaggaccgaatgcgaagattattccgcgcagatcggatatcgcagatccttacgggccagcaatacctggagttcaatgaggcgcgcaagacgtcattctactgccgccatggggagaagatcaagaacaagttccgccgctttctggacctgcccgcggaccttcgcatcccaacgccgacaatgaacattttggcctatctggcgcatgagaccattgccgccattgtcgactattcgatcctgacgcgcctgaactcggacaaccgtgcgaccgagccctacagccgagtgacctccgccggaggcagtccggctatgatgcacgtctgtccggaggtcacacagggtcgcggcatggaggtggtcaagccaatcagtgtaccggagatccacgaggccatgcgccgtttccggcaaatgagcagccgtaagattgggcggtatcgcaactcttgcgacatcgatttccggcgcagttttctagccatttaagttttaatgatcttaatatcctcgcctatttttatttgcgtcaattattgattttattcacaaaaaatagactgtacaattaattcatttaaagtaattcaatccccaacaattaacgcgctctacattttaattatacaaattataaaataaagcaattttggctcgttaaaaaagttttttcctgagaggtcaagaacaactaggcatattcattaattcaatttgcctgtggcacatatcctggcctttgaggctgcgactaaaagacagaaaaacgcactccaattacggacgggtgaatctgcctcgcatggagccgataaattgaagcggtaaacgaagttgaaactggcaccgacagataaataaaagcgcaataaagaaatttgccgacaggcgcactcgcacgtgtgccacacagacggagcgaaggagaaggaccagcaaggatgccgcaggattgcaggagagactgcagcataaggcattaagagaagcaactcgcgaacgcacttaataatcaacttcctgttgtgcatataaatgtgtgtgacacgcatagcaacgaagggtaaaggggttaaaattcattccgcagttatgggtggcgggtttcattctgtcttttgccgtgaattgaaaaggattaagaattattgctcaatgtcacttgaacttttaatatatgtacatatgtgcaattgtggtcatgattgtatagcaaaggcaaaatccaaatcttttccaaaaacctttttaaaataacttttaaaaaccatttatttgaaatttttcttattcctatcacccgcttgtttatctgataacatgcggtccgaaatttgacttaaaatcgatgcacctttaaaggtatcctcttgttattttcttcggtgggatatcctagtttaatcggatcttaatgttgattgctctgtgctgcagatgtaattccaacggcccattattcttaatcgattgctcatacgcctaacga

SEQ ID NO: 40406 - DNA, 1155 bp, DROSOPHILA
atgaactacaacgccaagcgagtaatgcgacagaactcggtttgcgtgggttccaacgacatggcagcgtcgccgataatgattggacctgccccgccctcggcgcccagcacgccgcaactgcagaccaccgaggacatcaagccactgcttgtgcagcgccaagtgattctgctgcaaagtggaagcataccgacgaatccctcgccacagcagatcaacctagctggacataatgtagccggtggtgccagcgggagcaacgttgccaacgttctcattccggatgatgcacctgtctcactgctcacagagattgcggatatcatgcgaagcttcggcgacagcgatcagcccaggacgggaagtgtcaagctggtggagcagatcctgcagcagcagctgcgcggcatcttcaatgaggcttcgctggtggccatgcggcggaaacagaatccctgcccgtcgcaggcggactttgagttcctgatgcgcaaccatccggtgaagatagctcggatgcgaaagcacctcaaggatatgcgcatactcaaaaggttccttagtatccgcacgggaaggccgcaggacttcatggacgacttggagcagcaggaggaggacgaggagctggccatcgatgtgtacgagctacacgacgaggaccgaatgcgaagattattccgcgcagatcggatatcgcagatccttacgggccagcaatacctggagttcaatgaggcgcgcaagacgtcattctactgccgccatggggagaagatcaagaacaagttccgccgctttctggacctgcccgcggaccttcgcatcccaacgccgacaatgaacattttggcctatctggcgcatgagaccattgccgccattgtcgactattcgatcctgacgcgcctgaactcggacaaccgtgcgaccgagccctacagccgagtgacctccgccggaggcagtccggctatgatgcacgtctgtccggaggtcacacagggtcgcggcatggaggtggtcaagccaatcagtgtaccggagatccacgaggccatgcgccgtttccggcaaatgagcagccgtaagattgggcggtatcgcaactcttgcgacatcgatttccggcgcagttttctagccatttaa

SEQ ID NO: 40407 - protein, 384 aa, DROSOPHILA
MNYNAKRVMRQNSVCVGSNDMAASPIMIGPAPPSAPSTPQLQTTEDIKPLLVQRQVILLQSGSIPTNPSPQQINLAGHNVAGGASGSNVANVLIPDDAPVSLLTEIADIMRSFGDSDQPRTGSVKLVEQILQQQLRGIFNEASLVAMRRKQNPCPSQADFEFLMRNHPVKIARMRKHLKDMRILKRFLSIRTGRPQDFMDDLEQQEEDEELAIDVYELHDEDRMRRLFRADRISQILTGQQYLEFNEARKTSFYCRHGEKIKNKFRRFLDLPADLRIPTPTMNILAYLAHETIAAIVDYSILTRLNSDNRATEPYSRVTSAGGSPAMMHVCPEVTQGRGMEVVKPISVPEIHEAMRRFRQMSSRKIGRYRNSCDIDFRRSFLAI

SEQ ID NO: 40408 - DNA, 8895 bp, DROSOPHILA
tatgcaatgttgcgtatgctcgattcgccggcgggtctagtgctcccctcttacccgctataagaagtcgcgatctggtggaaacaccgcaatcagtcgtgtgacaggtgataactcaactaatggacaactggcgggcaactccgacccaatcaccaccaactacgatcaacataaataattttgacccaagggttcggtatggccgtttctgcttacacacaacataccacatacacattgtacagtggaaacaggtgagattcatttaaatgaacatagcttaatatataacattttcgattgctataataaattcagggagagtttgtttaagtgatttaattttaagctatcaaaggtttaaagtaattctcttatcaaattgaaggtaacaaattttctggaaacggtcacgctagctttcagccctggttttcagcttggcgcccagttttcaaaccattttcttatcagaatttgcgattactttaccattcctggttttcaacacaccatcttatcagaaattgtgattatttcaatattccttgtttttaaaaccctatttcgacatactgcgggtaaaatatacagattatatagatttctttattcgtcaattctcaaaataaatattcaatgttcatctaatactttacattcaagaaattttcacaaattgtctacgcttaaccttaggtaataactaagctaagtttttgagtttgtagagaatgaatattcaaagcacaaggaacaaattgattgggagtaagtttctatttacatctagagttgccttttttgtttttatttttgtttaatttgaggtttggttaaatataaaattcgctacttatgagtaaggggatggggcgattaaaacctaggaaacattttagaagatttcccgtacgaatttcgaatttgattcggtcgactattgactaaccactaacttgttcaacttgggtttaacttattatcacaaacaagtacatttaatatgcatatgattacagtgaagagggagtcgactcccccccatacagctatgagttgatcttggccagcagtggctgggtgacggcactgcccgccaccggtgggcactgctgcttgtagctcttcaccaggaagccgtagtggctgctgtccgccggaatgttctggccactgccgctccgttgcggactggcggccaccatctgtggaatcggtggaggagcagccagcggcggcggtgtgggcagcagtggggtctcgtctccttcagcaaacttgatcctcagctgcccactgcccatgctgcccgtttcggggcctggggaggcattggcctcactcctggcgcttgtcagcagcgttgagatcgtgggcgagggcttcagccgggtgcgttggacacccagtggcggcggctgcaggataccgctcagattggagctggaattcgagtgcacatagccgtggctattgttattgaggtgatggtggctcttgagtgctccgctcagcggcagccggaagtgtgccagctcccagctatcggaggtttcctccatgtccctcagactgcggctgctgtagatgtcgcagttcctctgggcagccgccgccgtatccagatagtggttctcagtcttgtgatagtcaaagccgccgccattcagcttgggtgaactggagctgatcttgcgtttcacgcggagattgggcgaatccttggacggcgacggtggcggtggcagagcgatcgcaggtggcggtaactggggtggtggcgaggccaccactagttcggagtactgcttgtgaagattatgcgattggctgcgctgcggttgtttcagtgaggagcgacgcgtgagcatcagcttgctgggcgagatcagggagttggggcggggtacctcgccctccagccagtaggtcagcatctcacctttgcccttcatgggcacaaatccgcggcgtgtggtcacaaaggtgccgaactcgtcgagcgcctcctttgtggtctcacttatgtggatcttgagcgcttcaccattggactccattcgggaggcagtgttcacagtgtcaccaaacagacagtagcgtggcatcttcaggcccaccactccggccacacaggcaccggtgtgcaggcctatccttagcttcaaccgatcctccggacgatggtggatgcggaaattgtgcaccgcctccaagagggccagtgccaaacgggcgatctcccgggcgtgctgattgccatttcgaatgggcagtccggacacaaccatgtacgcatctccaatggtctccactttgtaaacatcaaagttctccacaatggaatcgaaacaggtgtacaggtcgttcaggaactgcaccacctgcatgggcgtgctctccgccgagatggcagtgaagcccacgatgtcactgaagtatatggtcacctggtcaaaggtctccgccaccactggctgtccgctgatgagctgggcggcgacgctttgcggcagcaattggtacagcagcttctcgcacttctttttctcctcgtggtagtcctgggtgcgctcctccaccagttcctccagattgttggcatacagttccatgcgcttcagcagattgtctacaatgtttcccgtctcgttgtctctgtaaagcagtcaaagttagtgaggaatccataactatggattcagttagtacttacttattaaatctgcgtatcatcgatttcagggtattaaagtccggacgctcggcaggatcctctgcccagcagcgacggattatgccattgatgtccgccttggtatcaccgtttggttcaagttcaggacggaatggtttctgcattctatgaggattgtatcccttcacgagttcgattatttctgatcgtacgacaaacaaaataacgttgaattagccttcaatttggaaatagttttgtgtaaacatgttatgtaaattattcgtgttaagtgcagttttatgttaacaccagactggatcctttggtggattccgaattcggacatctaaacaccgttccgcaatatgagcacgggaatggaatatctggacttggtcagcttctttgcacatgcaaagcctccgaaaccccaggaaatgaggccttgcaaccagcacgagatcctgctgcagctcatctgcaatcgccggcaatcgctgagcaaggcccaaatggctgatctcctgtggaacatgaccagtggtccgaaaaagaagctcaagagaaggcagtgcggcggcatggacaaccggaatccatcagaaccgaccgatattgaggtggtgttcgggtgcagggagaaaacaccaccttccaccatttcgcacagaggctgggaaagatcacgcatcgagtggctgcgcaagctggaggttcagcggaggcagtgctaccaggcgtggcaggaaacacccggacccgatgccagcatcaacgcaggtatgaagtccagcaagaaggagaaggaatgcggaaaatccccaataaagaacacgccatgcgagaaacacaacaaaaaccagaaccaagccggcggtagagagaaggacaagcacaagaagaagaccaggaccaagaggaagctacccggctgctgggccttcctgcccttcggatgcggcttgaacctcgccaacgattccagctgccaggacgtgccccaccgcagagagagttcgtgatttgcctttttcgaccagccagcactttgatttcgatttccagattcgctggcaccgcaattaaattcgcctacagacgtcgtctagtgccagatgccaaagttgcattctgcggcctaaggacgagtctgattcccagtcacggcctaatttgatgaaatcgtcaagtgccaagtagaaggcaaagtttttgaaatcggcgcggaactcgaagttggtctgcggttcaacagggcaatgtgtacttcaaccaggaagatagaacatcataaaggctagcaacatacatacttcaaaatacaagtactttgggtttcgtgcttgatgcaggatctttaattaaatagaattgctaagccgaaggctcctattttggtacatttttattagcagaacatttcgctgactacttaatttggtcttttaagttcgtttataaaatgatttgagtgaattaaatttcagcatccaactaattttttaatgtttaccctgtttaagattatacaaaaatattggcattggacacgggctttcactatttcgactgcgtattttgcagtgctcctccttgctcctccaaccacaaccgccttaaccaccagccgagtggccaactgacgggcgaaataaccgcaacatgtgcaaaaatctggcattaaaattccgcacagacaaaatcggccgcaacacgaaacggccaagtgaaaaggacactcgaaggacgagaggagggtatagaatgtgaaacacttgaatagcataccttgtggcgatttctcgtacgcacatctgcccaggtagaagggtccttgtcgcgtggttatctcgtgcacaatgattccaaaggcgtagacatcacccttctgtgtgccctccggcggacgattgtgctccactctcagcagttcgggggctgtccacaagagctctgtacgggaaaataagttacatatatatttaaaatatatttcgaaacttggaaaataatattaaataaaaaaatttacaaggaaattcttgctgcattcaattaactttttgttcagtgcactgcacacagtagcaaactgggactacttactgctccagtaggcgtggctattgcagttgcccccatcactttccaggtcgaatctcgtccgccgcagggtgtgcaatccaaagtcggtgatcttgagcacaaatcgggagtcgaccacgcagttcgaggacttcaggttgccgtgagaccgaatgtcggagctgtgtagaaactgcattccacgcacgatgtcgtgcatcagcgacaggcggaacatccagtccagctggaactgctcgttctcgaggatatcctgcaacgagcccttgggacagtattcggtgagcaggaaactacgcctctgatccaaacacgcgccatagaacttgaccaagtggtcgtgctgcaagtccttcatccgtttcagttccagcattaagctgcgagtcagcaggccctgaacgttgtccacctccactggcttgatggccactttgctcttgcggaacatgcccactggtatgaagatttggcgatctccgttaatggacaccatgtcctcggacatcagtgtcagctgggagctttgcttgaccagcgaatggaaggagcctctcaggccacgctccgctgcatctcggaacatcacatcctccagcgacaccttccagctcatcgagttaatctccgcctcggcgatgtagtgacgatagccgaagaagaaacacacggccattacgaccaccatggtgcccaggactattgacaggattgcatacccaggaagtgctgaaattagacacatacatcgggttaccatatctgtattcaagagttttcaacgagaatgttcaatcctgacttttgtgtcttgtatctttcaacaggccgaatttcatatcataaaccacattaattatattattattatataatttgcagtaagtatacttacaattatcggggcatagggcgccatcgtagccgcaaatgggtcgatctggcggcgcctcctcccggtcgcccgcccaatggatctccttgttggcctcgaactccaggcgattgtgcaggaaatgggccacgatctcgaatcggccggtggtgggattcatgtccagcagtgagtaggccgaaagccggtcgccgttggcatcgatggtcacattgccggtgatgccagtgaagctgcgattccacatgcgacgcaccatgtcggtgccgttgatgggccgtgtgagcatggtcggatcctcacggatgctctcgttcagggcattggcgtagagcaggaccccgtcgaagaaggaggtgacgaatgctgaaatcggctcgttgtcgctaaaggtgtagttgtatttctctgcggcaatggctttgatctgcaaatggcaacgggcaaatcgaaacgtattaatctctctgcagctgagctataagctttccctctgccctttctaatccttatggctctattctatgccgaggggcatcaattcctgtccgctttcctggcacttttcccccctttaattgctttggcccccgtgaaaattcaattacgcgttcgctcgctcggaacgagggaagaaaggacggaagacgatggctctggcccaggacgttttgtcacaatccatgtggaagttattgcacaccgcactccgatgtgccaacggcggttttcactcgccattctcctttgacaagcggcgatgctgggatttggacggagcagcgcttgcaaatgtccattgagcgtaagttttctgccaagaaagccgacaatttaagctgcaatcctttaaggatgcagacgtaaaatatagatggattgtattgtatgccaggtggttaactgagtactttcagctagctattgccaacaaattgaaatctcaattatttcgaatcaaatttttaaggaatgtgacaaaatcagactatttaaagacgttagttttgtatcaaacggcttattaagaatatgtctataaatatgcgtgtatacttaataataaaaactacatgtatacccttaatctattagctttatagattttatccttccatgggaatatttttgggaaataatgcaagcttttgccatgcaaaaagccctcccccgcttagatatataccatattagtatcttaaatgctagcaaacattgtgctaacttgtacatataagatgttgccaaaggaaaacgatgtcgtgtgcattttaccatacatcccgccccctgcactttcttggataagtagaaaacatggggtgtagagcgtcattagccagacggaccggtagtccaatgaagcctcttcagaggtggccactgccatagttggcccaggctgcttatcagcagctgtaagagcaaattcattcggttttcaggtggctgccccggctttttgagggctcttcgggtttggagttggccagcaaatgctcttaggtgctgtcggctttgtttgttgcacatttgccatgcagcaacagaaaaatgtttacaattcctagcccctcgctcgccccgttgcatgttgcctggcaaaataacttgcggttgggctgggacgtgtgctggaattgagtatgcatgaggatggcccaaaaaatgggagaaaaacacacacaagaaatctgcaaaaattttcaaattggcttccacatccatttccatgcaaatgcatgcagagcccccttagttttccggcttttcctcctacttttcccaattttacactcacctcattggagacccgggtatactcgttatcattcggctgtttgggggttacggtcagcatggccgtgtaggccttctgggcacgctcattatttaaatccgtatcgttcttatcgtaccacggctgcgacgtcagatactgaaccctgtgtagtgaaaataaagatatattaagtcagtgtctacagtggtcgctcgagagggtgaactaaagacaacaaagatagccaactatttttattgttttaagccaagttaaatatgttaattactacttttcggctattttgaatttatgtgaggttttaaatttttattttgtcttatcaatgcgcctttgtgcccgcctacgggttaggtttattaccagctattgatatgcgtcataaattgtttataaatagaattgttaagtgttcggatgcaccacacacttgcacttgctggcatattgcagtccgatttgaagtaaatgcatttggaatccattagcccctccccgaatccatttgccctgttatcatctgagtttcgaatgtgtttcatttgcttcaatgttagcggctagtgacatttaggaatattgattatgaattacactatagttgaaaactaaagccgtgcggctgtaagaaattcacaatttgttgtgaatggaaagattgactacttttgatcctaaacttataatatttaatttataacttttcgtccatgataaataagtagtaactaagtgtgacaacattttcaaaatcgatagtattttaatcatctggtggcttacagtgataaatggcagttacaaatcaaaagggattctattaataagttaattatctttctgtctgttcgctttgagcttttgcgagcaggaaattgattagctaatccatatatgtacatataccggcattcacacacgcctcgtcgcactagtatatagattagtatatatacgcagcatttttccattgattgcgagtgtcatgaaggtcgggtgattagaatgcatttaatgcacatgcaaatgatagtcgattgcactaaggctctggctcttacgaatctgaaaattgaacccatctattccgaacttttcctgggatggaactccattttttggttggtcgaacaaagagctggtatcttgagggtcgaacaaagaagctgtggcattactcagcactaatgattgtggataatcataataaatatgaagtttgtatctgtatctgagtctgagtatgagtctgagtcgaagtatgagtgtgaggggggcactttgcttgtcgtccattgttcgggcacggaggttgactggctttaatcgatcgagccatgtgccgaaatatggaatttcctcaatttataaatagttaggctc

SEQ ID NO: 40409 - DNA, 3286 bp, DROSOPHILA
atgacgcatatcaatagctgggttcagtatctgacgtcgcagccgtggtacgataagaacgatacggatttaaataatgagcgtgcccagaaggcctacacggccatgctgaccgtaacccccaaacagccgaatgataacgagtatacccgggtctccaatgagatcaaagccattgccgcagagaaatacaactacacctttagcgacaacgagccgatttcagcattcgtcacctccttcttcgacggggtcctgctctacgccaatgccctgaacgagagcatccgtgaggatccgaccatgctcacacggcccatcaacggcaccgacatggtgcgtcgcatgtggaatcgcagcttcactggcatcaccggcaatgtgaccatcgatgccaacggcgaccggctttcggcctactcactgctggacatgaatcccaccaccggccgattcgagatcgtggcccatttcctgcacaatcgcctggagttcgaggccaacaaggagatccattgggcgggcgaccgggaggaggcgccgccagatcgacccatttgcggctacgatggcgccctatgccccgataattcacttcctgggtatgcaatcctgtcaatagtcctgggcaccatggtggtcgtaatggccgtgtgtttcttcttcggctatcgtcactacatcgccgaggcggagattaactcgatgagctggaaggtgtcgctggaggatgtgatgttccgagatgcagcggagcgtggcctgagaggctccttccattcgctggtcaagcaaagctcccagctgacactgatgtccgaggacatggtgtccattaacggagatcgccaaatcttcataccagtgggcatgttccgcaagagcaaagtggccatcaagccagtggaggtggacaacgttcagggcctgctgactcgcagcttaatgctggaactgaaacggatgaaggacttgcagcacgaccacttggtcaagttctatggcgcgtgtttggatcagaggcgtagtttcctgctcaccgaatactgtcccaagggctcgttgcaggatatcctcgagaacgagcagttccagctggactggatgttccgcctgtcgctgatgcacgacatcgtgcgtggaatgcagtttctacacagctccgacattcggtctcacggcaacctgaagtcctcgaactgcgtggtcgactcccgatttgtgctcaagatcaccgactttggattgcacaccctgcggcggacgagattcgacctggaaagtgatgggggcaactgcaatagccacgcctactggagcaagctcttgtggacagcccccgaactgctgagagtggagcacaatcgtccgccggagggcacacagaagggtgatgtctacgcctttggaatcattgtgcacgagataaccacgcgacaaggacccttctacctgggcagatgtgcgtacgagaaatcgccacaagtgcagaaaccattccgtcctgaacttgaaccaaacggtgataccaaggcggacatcaatggcataatccgtcgctgctgggcagaggatcctgccgagcgtccggactttaataccctgaaatcgatgatacgcagagacaacgagacgggaaacattgtagacaatctgctgaagcgcatggaactgtatgccaacaatctggaggaactggtggaggagcgcacccaggactaccacgaggagaaaaagaagtgcgagaagctgctgtaccaattgctgccgcaaagcgtcgccgcccagctcatcagcggacagccagtggtggcggagacctttgaccaggtgaccatatacttcagtgacatcgtgggcttcactgccatctcggcggagagcacgcccatgcaggtggtgcagttcctgaacgacctgtacacctgtttcgattccattgtggagaactttgatgtttacaaagtggagaccattggagatgcgtacatggttgtgtccggactgcccattcgaaatggcaatcagcacgcccgggagatcgcccgtttggcactggccctcttggaggcggtgcacaatttccgcatccaccatcgtccggaggatcggttgaagctaaggataggcctgcacaccggtgcctgtgtggccggagtggtgggcctgaagatgccacgctactgtctgtttggtgacactgtgaacactgcctcccgaatggagtccaatggtgaagcgctcaagatccacataagtgagaccacaaaggaggcgctcgacgagttcggcacctttgtgaccacacgccgcggatttgtgcccatgaagggcaaaggtgagatgctgacctactggctggagggcgaggtaccccgccccaactccctgatctcgcccagcaagctgatgctcacgcgtcgctcctcactgaaacaaccgcagcgcagccaatcgcataatcttcacaagcagtactccgaactagtggtggcctcgccaccaccccagttaccgccacctgcgatcgctctgccaccgccaccgtcgccgtccaaggattcgcccaatctccgcgtgaaacgcaagatcagctccagttcacccaagctgaatggcggcggctttgactatcacaagactgagaaccactatctggatacggcggcggctgcccagaggaactgcgacatctacagcagccgcagtctgagggacatggaggaaacctccgatagctgggagctggcacacttccggctgccgctgagcggagcactcaagagccaccatcacctcaataacaatagccacggctatgtgcactcgaattccagctccaatctgagcggtatcctgcagccgccgccactgggtgtccaacgcacccggctgaagccctcgcccacgatctcaacgctgctgacaagcgccaggagtgaggccaatgcctccccaggccccgaaacgggcagcatgggcagtgggcagctgaggatcaagtttgctgaaggagacgagaccccactgctgcccacaccgccgccgctggctgctcctccaccgattccacagatggtggccgccagtccgcaacggagcggcagtggccagaacattccggcggacagcagccactacggcttcctggtgaagagctacaagcagcagtgcccaccggtggcgggcagtgccgtcacccagccactgctggccaagatcaactcatagctgtatgggggggagtcgactccctcttcactgtaatcatatgcatattaaatgt

SEQ ID NO: 40410 - protein, 1076 aa, DROSOPHILA
MTHINSWVQYLTSQPWYDKNDTDLNNERAQKAYTAMLTVTPKQPNDNEYTRVSNEIKAIAAEKYNYTFSDNEPISAFVTSFFDGVLLYANALNESIREDPTMLTRPINGTDMVRRMWNRSFTGITGNVTIDANGDRLSAYSLLDMNPTTGRFEIVAHFLHNRLEFEANKEIHWAGDREEAPPDRPICGYDGALCPDNSLPGYAILSIVLGTMVVVMAVCFFFGYRHYIAEAEINSMSWKVSLEDVMFRDAAERGLRGSFHSLVKQSSQLTLMSEDMVSINGDRQIFIPVGMFRKSKVAIKPVEVDNVQGLLTRSLMLELKRMKDLQHDHLVKFYGACLDQRRSFLLTEYCPKGSLQDILENEQFQLDWMFRLSLMHDIVRGMQFLHSSDIRSHGNLKSSNCVVDSRFVLKITDFGLHTLRRTRFDLESDGGNCNSHAYWSKLLWTAPELLRVEHNRPPEGTQKGDVYAFGIIVHEITTRQGPFYLGRCAYEKSPQVQKPFRPELEPNGDTKADINGIIRRCWAEDPAERPDFNTLKSMIRRDNETGNIVDNLLKRMELYANNLEELVEERTQDYHEEKKKCEKLLYQLLPQSVAAQLISGQPVVAETFDQVTIYFSDIVGFTAISAESTPMQVVQFLNDLYTCFDSIVENFDVYKVETIGDAYMVVSGLPIRNGNQHAREIARLALALLEAVHNFRIHHRPEDRLKLRIGLHTGACVAGVVGLKMPRYCLFGDTVNTASRMESNGEALKIHISETTKEALDEFGTFVTTRRGFVPMKGKGEMLTYWLEGEVPRPNSLISPSKLMLTRRSSLKQPQRSQSHNLHKQYSELVVASPPPQLPPPAIALPPPPSPSKDSPNLRVKRKISSSSPKLNGGGFDYHKTENHYLDTAAAAQRNCDIYSSRSLRDMEETSDSWELAHFRLPLSGALKSHHHLNNNSHGYVHSNSSSNLSGILQPPPLGVQRTRLKPSPTISTLLTSARSEANASPGPETGSMGSGQLRIKFAEGDETPLLPTPPPLAAPPPIPQMVAASPQRSGSGQNIPADSSHYGFLVKSYKQQCPPVAGSAVTQPLLAKINS

SEQ ID NO: 40411 - DNA, 5637 bp, DROSOPHILA
acagcaaacgataacactgctaccgataaacggtcagctgtgcaagaacccaagccgataacacaattctggaatgtggatgactactaacaaggtttatttccctagattgctaacagaagatgctaccacatggcgcgctggacgccggacagcttattgtagtcggcgaggtggcgccacacgattcgactgagcctgtacttgtggacaactccgcgcggacgtgacgtaagcgcgcagcgttccctcacccggacgagcgatgagtcccgaggaaaagcagcgatctcggcgtcggctacctcgcgtagctccggcggcaggatgtcgttcttgcgcagcgagttgactcgcagccgctccacggcgttctccttgacgcacttgcgccgctttacgtcgcgaatcatcttccaatcggcatactttgtgcgcacctgctgcagctgttaagacaatgggctggatattatgttcgcttagctaggagtacgatgttaacttaccccgcagccggctatttgcacggactggcacacaaaacccccgatcctggccagagaattcatgttgttgctttcggtggtgctcttcttctttttgcctctttactttgttcgctatagtgtcggttattaacgcgcgggactatcgataggcaacagctgatgagcccatacagtgaattgcaaatttattgcctattattttcgtatacgagaactgggtaatttaaatgaaaaatacgatggcgaagcatgcggtgtggaatctataaggttaaaacatggaaagccggctgactttcgacctctcggaataagttttaattaacaattcactcgctttacataaccgcctagcagcgcgattcaaaacgagcgcgttcacacccattcgcagtggcgtacaattgctgttaccattcgccgcgaagcgcgtgaacacgtgtgccagtgtgcgtgcgccagtgcgtgcatgtgcacagtcgagcttgccagtgtgggtgtgtgtggtcgtctcacgtcgatttagaaatttgctcgtgcccgcagtttgccgttcgccgttttcgccttgtgtgtgtggtgtgtctactccgtatagactgccaatcgagtccagctccgcttccgagcagcagcagaagaggcatcgcaactcagctcagctcgctgatccacagatcccgcagtccggtgcaattcacggccaggcgaaaacccagtcccagtcagcagctgaggaagaacaagaacgaccaagcagaagaagcagcaggccgaagagaggagcagccgcagccttgcagagatgccttctagcgatcccctgccgcccaaggagggcgcgctcttccgcaagctacttgtaagccggtctaggtgaccctactgtcccataccttccccttcccttaataccacaactgtgccgccccctccctttgttcgtgcctttggccggcttcggcatccatgtgctttttagccgaagtcaggtggagagtgcctatttttggcagaagcaatccggaggcgatgcctccgctgctcgagatgtgtggcttcagcgggcgattgcacagctctgctcaaccgccgacgtttgtggtcggcccgctggtctcataacctcaaaattcgcgctgcgcgggatgcgagaaactttgactaaaacctttcttctctgtgctttcttatcaaacagaaatgctacgaactgaagcagtacaaaaatggccttaaactggccaagcagatcctgtccaaccccaagtacatggagcacggcgagacgctggccatgaaggggcttactctgaacggactggggcgccgcgaggaggcctacaagtatgtgcgtctgggtctgcgaaacgacctgcgctcccacgtttgctggcacgtctacggactgctccagcgcagcgacaagaagtacgatgaggccatcaagtgctaccgcaacgcgctcaagtgggagaaggataacctgcagatcctgaaggacctgtcgcttctccagatccaaatgcgcgacctcgagggctacaaggagacgcgccaccacctgttcacgctgcgtccctcgcagcacgcctcctggatcggtttcgccatgagctaccatctgctgggtgactacgacatggccaacagcatcctggagacgttcagccagtcgcaaacgtcgattgtatgtatccagctgcctgccgattcaattttatattccaattcaataaaatgctcgtatttcttgttccatgtctctgctccgtgggcaggaggcgcacgattatcggcactcggagctgctgctctaccagaaccagatactcatcgagtcgaatcgtctgcagcaggccgtggaccacctgaccaaataccagggccagatcgtcgacaagctggccgttcgcgagaccatgggtgatctgtacatcaagctgcagcagcaggagaaggcagtgcccatctttgagtctctgatccgccgcaatccggagaatgtgctctactacgagcagtacattgccgcccgccaggtgaccgactcaagcgccgtggtgtcgatctatcgcgtgttccaggagcagtatccgcgcgccctgtgccctcgccgcctgcctttgaacatcgccaacggcgacgagtttcgcgtcgtgaccgacgagtacctgcgccgcggtctgcgtaagggcattccgccgctatttgtcaacgtgcgcactctgcaccagataccggagagggcggccgttatcgaggagctggcgctgcagtatttcgagaaccttacccgttccggccacttttctcgcgaagatgccgacgccggaattcccgtcgagccggcctcggcgctggtgtggacggcactgtttctggcgcagcactacgactacatgcgcgatacggaccgcgctctggagtacatcaatgtggctatcgaccatacgccaacactcattgagctgcttatcaccaagggtcgcatctttaagcatgctggcgatcccgtggaggcgtacgtctggctggaggaggcccaaagcatggacacggcagatcggtgagtgagccccatggactagcatagacctgctgaaccatgtaaccatcaatgttttcccctcagctacatcaattcgaagtgcgcgaagtacatgctgcgcgccaacatggtgcaggaggcagaggagatctgcgccaagttcactcgcgagggtgtctccgccatggacaacttgaacgagatgcagtgcatgtggttccagacggagtgtgccctggcctatcagcgcatgggtcgctggggcgagtcgttgaagaagtgccacgaggtggagcgccactttgccgaaatcgtcgaggaccagttcgatttccacacctattgcatgcgtaaaatgacgctgcgcgcctacgttggcctgttgcgattggaggacgtgctacgccagcatccattctatttcaaggcggccaagtgcgccatcgaggtgtacattcgtctgtacgacaagccgcttaagtcggagacaaccattgaagagattgacattggtatgtggacattaccccactagctcccttgctcgttctagttagctgtatgaccgcctttcttcgttacagagaacctgccgccatcagaactgaagaagctgcgcagcaaacagcgcaaggccaagaagaaagctgagctggagagtgcgcaggccgcacaggcgcaggtgaagcgcgagcagcaccagaaatcgaaacagcaggcaaaccaggagaccgaccccgatgctccgcagttggacgagctggtggccgagaagctggagcgcacggacgatccgctggacaaggccattgaattcttgaaaccgctgcagcagctggctaaggagcgcatcgagacgcatctgctggccttcgagttgtactaccgcaagaacaaactgctccttatgctgcagtgcatccggcgcgctcgcgccgtcgacgcctcgcaccccgtaatccacagctgcattattcgcttcgttaaatcgttgaccagcgccgccaaggagcagccgttcaatgagcacgtgcagcaggtgctggagaaggccaccaaagaactgataggcagcaagacgccccagcagctcaacgatgagtttattgccaaacacaacgcttccatactgcatttatacgagggcgcacgcagtctgtacgaactggacaatagtaaaaaagctgccgccatcaagctggtcactagcttcaacctggccaagctccggctggaggtaagtgactgccaaacccatttctccacccactgactggccccctgttgatccttgctctttgaattgtgttccgcaggaggccaccaaaatctacacagcgttgcgggacggcgatgtgtttggcgagtgcgaggcagaggccgcttcctaccagcaggcgtgccaccaacgcttccagtacgcccgcatctttcgcaatgtcgaggagctggaggctcaactgcaggagaaggaggccgccaagctgcgcgccgaggaagagcagcagcagctgattcacgttgattctagtgaaccggtgtctgttttggccacggcagcggcagcgtcttaggaccaaacaagactactaactaatacccgggcccgagaagttagtaacagcaacaacagatctgcggccaccacaccaacaaacacaacaaaagcaacaataacgaaaagtgaagcgaagaacctaactaacaaccaacaatatgaacaggaataagcttagctctataaacaacggcaaccacaataaaattcactattaacaacaacaaaccaagtgctctgatgaggaggacgccaagccgctctaggcatggccgagtttatctgatcggatcggatcggattggaccggtacggatcagatctgaggcggcagttggcttggcgctgtgcccttgtgcgtggcacctaccagtctgccacctgagaacacatcccgtcgtcatccgtcacacagcatcctacaaaatggtttcggacgaggacgagtcgatgaggaataggaataggaatccggtacgaaatggtgcggaggtgatatgtgggattcgcacgtcgaacgttcgtcaccgcgaaccatgtagttaaccaagttgttgtatccactgttgtgggatttcgaaaactgaatcaaacggaacgaacctttgttgacaacacccgctggctttcttaacaacaccttattttttattatttttaacgaatgcattgtatgtacatatgaagtcgtaattaattatacgcaaatcaaaaccttaattcgtacacaacgacaagtcttctaattctaaaccgcattgtattgagcagagtaggagcggcaggactgactccactggatgcgttgtgtgtccttgtgcccattctagtatatttctgagcagcttgcgctggtttagcatcgcaattgagccgcctacatttagtatatctactaacgacctatatagaaaccattgcagtttgaactaaggattaaataagtaagcgcaacgacgccatcatttattgaaaccagaccaagcaggagctctcaatcttcgggttcatcggtc

SEQ ID NO: 40412 - DNA, 2990 bp, DROSOPHILA
ccagtgtgggtgtgtgtggtcgtctcacgtcgatttagaaatttgctcgtgcccgcagtttgccgttcgccgttttcgccttgtgtgtgtggtgtgtctactccgtatagactgccaatcgagtccagctccgcttccgagcagcagcagaagaggcatcgcaactcagctcagctcgctgatccacagatcccgcagtccggtgcaattcacggccaggcgaaaacccagtcccagtcagcagctgaggaagaacaagaacgaccaagcagaagaagcagcaggccgaagagaggagcagccgcagccttgcagagatgccttctagcgatcccctgccgcccaaggagggcgcgctcttccgcaagctacttaaatgctacgaactgaagcagtacaaaaatggccttaaactggccaagcagatcctgtccaaccccaagtacatggagcacggcgagacgctggccatgaaggggcttactctgaacggactggggcgccgcgaggaggcctacaagtatgtgcgtctgggtctgcgaaacgacctgcgctcccacgtttgctggcacgtctacggactgctccagcgcagcgacaagaagtacgatgaggccatcaagtgctaccgcaacgcgctcaagtgggagaaggataacctgcagatcctgaaggacctgtcgcttctccagatccaaatgcgcgacctcgagggctacaaggagacgcgccaccacctgttcacgctgcgtccctcgcagcacgcctcctggatcggtttcgccatgagctaccatctgctgggtgactacgacatggccaacagcatcctggagacgttcagccagtcgcaaacgtcgattgaggcgcacgattatcggcactcggagctgctgctctaccagaaccagatactcatcgagtcgaatcgtctgcagcaggccgtggaccacctgaccaaataccagggccagatcgtcgacaagctggccgttcgcgagaccatgggtgatctgtacatcaagctgcagcagcaggagaaggcagtgcccatctttgagtctctgatccgccgcaatccggagaatgtgctctactacgagcagtacattgccgcccgccaggtgaccgactcaagcgccgtggtgtcgatctatcgcgtgttccaggagcagtatccgcgcgccctgtgccctcgccgcctgcctttgaacatcgccaacggcgacgagtttcgcgtcgtgaccgacgagtacctgcgccgcggtctgcgtaagggcattccgccgctatttgtcaacgtgcgcactctgcaccagataccggagagggcggccgttatcgaggagctggcgctgcagtatttcgagaaccttacccgttccggccacttttctcgcgaagatgccgacgccggaattcccgtcgagccggcctcggcgctggtgtggacggcactgtttctggcgcagcactacgactacatgcgcgatacggaccgcgctctggagtacatcaatgtggctatcgaccatacgccaacactcattgagctgcttatcaccaagggtcgcatctttaagcatgctggcgatcccgtggaggcgtacgtctggctggaggaggcccaaagcatggacacggcagatcgctacatcaattcgaagtgcgcgaagtacatgctgcgcgccaacatggtgcaggaggcagaggagatctgcgccaagttcactcgcgagggtgtctccgccatggacaacttgaacgagatgcagtgcatgtggttccagacggagtgtgccctggcctatcagcgcatgggtcgctggggcgagtcgttgaagaagtgccacgaggtggagcgccactttgccgaaatcgtcgaggaccagttcgatttccacacctattgcatgcgtaaaatgacgctgcgcgcctacgttggcctgttgcgattggaggacgtgctacgccagcatccattctatttcaaggcggccaagtgcgccatcgaggtgtacattcgtctgtacgacaagccgcttaagtcggagacaaccattgaagagattgacattgagaacctgccgccatcagaactgaagaagctgcgcagcaaacagcgcaaggccaagaagaaagctgagctggagagtgcgcaggccgcacaggcgcaggtgaagcgcgagcagcaccagaaatcgaaacagcaggcaaaccaggagaccgaccccgatgctccgcagttggacgagctggtggccgagaagctggagcgcacggacgatccgctggacaaggccattgaattcttgaaaccgctgcagcagctggctaaggagcgcatcgagacgcatctgctggccttcgagttgtactaccgcaagaacaaactgctccttatgctgcagtgcatccggcgcgctcgcgccgtcgacgcctcgcaccccgtaatccacagctgcattattcgcttcgttaaatcgttgaccagcgccgccaaggagcagccgttcaatgagcacgtgcagcaggtgctggagaaggccaccaaagaactgataggcagcaagacgccccagcagctcaacgatgagtttattgccaaacacaacgcttccatactgcatttatacgagggcgcacgcagtctgtacgaactggacaatagtaaaaaagctgccgccatcaagctggtcactagcttcaacctggccaagctccggctggaggaggccaccaaaatctacacagcgttgcgggacggcgatgtgtttggcgagtgcgaggcagaggccgcttcctaccagcaggcgtgccaccaacgcttccagtacgcccgcatctttcgcaatgtcgaggagctggaggctcaactgcaggagaaggaggccgccaagctgcgcgccgaggaagagcagcagcagctgattcacgttgattctagtgaaccggtgtctgttttggccacggcagcggcagcgtcttag

SEQ ID NO: 40413 - protein, 890 aa, DROSOPHILA
MPSSDPLPPKEGALFRKLLKCYELKQYKNGLKLAKQILSNPKYMEHGETLAMKGLTLNGLGRREEAYKYVRLGLRNDLRSHVCWHVYGLLQRSDKKYDEAIKCYRNALKWEKDNLQILKDLSLLQIQMRDLEGYKETRHHLFTLRPSQHASWIGFAMSYHLLGDYDMANSILETFSQSQTSIEAHDYRHSELLLYQNQILIESNRLQQAVDHLTKYQGQIVDKLAVRETMGDLYIKLQQQEKAVPIFESLIRRNPENVLYYEQYIAARQVTDSSAVVSIYRVFQEQYPRALCPRRLPLNIANGDEFRVVTDEYLRRGLRKGIPPLFVNVRTLHQIPERAAVIEELALQYFENLTRSGHFSREDADAGIPVEPASALVWTALFLAQHYDYMRDTDRALEYINVAIDHTPTLIELLITKGRIFKHAGDPVEAYVWLEEAQSMDTADRYINSKCAKYMLRANMVQEAEEICAKFTREGVSAMDNLNEMQCMWFQTECALAYQRMGRWGESLKKCHEVERHFAEIVEDQFDFHTYCMRKMTLRAYVGLLRLEDVLRQHPFYFKAAKCAIEVYIRLYDKPLKSETTIEEIDIENLPPSELKKLRSKQRKAKKKAELESAQAAQAQVKREQHQKSKQQANQETDPDAPQLDELVAEKLERTDDPLDKAIEFLKPLQQLAKERIETHLLAFELYYRKNKLLLMLQCIRRARAVDASHPVIHSCIIRFVKSLTSAAKEQPFNEHVQQVLEKATKELIGSKTPQQLNDEFIAKHNASILHLYEGARSLYELDNSKKAAAIKLVTSFNLAKLRLEEATKIYTALRDGDVFGECEAEAASYQQACHQRFQYARIFRNVEELEAQLQEKEAAKLRAEEEQQQLIHVDSSEPVSVLATAAAAS

SEQ ID NO: 40414 - DNA, 2822 bp, DROSOPHILA
cctcgcgcgccgtccggaatcgccggctgcgctgctggttcatcttggcccgtggagccaccccgtcaactgaaaggaagaagaggcgctgcggcttgatcaggtagaacagcttgtctacgtagttgaagatttcctggaatatctgctcctcctccaggtgaaagtgtatgttgttgtcgtccggatgcgagcagttgtggacaatgccgttcatgtccaagtacagattgtcgaactcgggtatctgcaaaggaaccgtacggtgcatggcaacatataacgtgacctagcagctttacttacgcagtgctcccgcgccaattcgctgaggcacggatatcgctcgctgatgtagcgaaagaacttgggaacgcccatgtcgctgttctggatgggactgttctgccgccgtgctgttctgcctggatcagtggcaatttagatgaactgaaaaatttgtgtctttatctgttttcaacatgtattgattgacacaaaagttgcaagtaggcgaggcgttgccacaacgtttcgctattgccatgtggtagggccggcggcattccgcagttcgatgaataactgaaagaataaggaccctgaccgattcaaatcgatattagaatcgataagcgaaacgggctcctttgccaataatcagctaatggtgaaattaagctaaaaggagctaagaacacctacatatctggcagcactgggcaaatgcaatgctcatcatttaaacagttggcttacaaatagcatagttttagttctagttacttctctagttcatcatcagtgtatttcatttcattcattttcattttaaagttcattttaccacttgaacagcatttcatagtttttgcgaagttcgaagtgaaaaagaagaaaactgtttttgaactattgtggcatcgcatccaaggcgaggggccacactgtttccaattagaataaaaacactcaccgctcgcctggtcacactggcactggcgaacagctgttttcccaatcgaaaagcgcttgtgttccaaattttacgtaattcgtattttgaagccgatttctgccgtgtagccccaaacgcctagcgaaatgtcggccctccgccaagtgatgtgcagaagcaccgcctccctgcagctgtaggtacccccgcctggccggagcaagtgcatccgacctggcaaatctgcagccctctaattatccactttcgcatcttgacaccgcaggtaccaggccaacagggcagccgctgcccgctgggcatccaccgccacggacggcggtccgctggaccccaagacggccctggcccgccccgaagagctggagcagcgcaacaagctgagtggcaagatcaccgtgccgactgccgtcaatctcagcccgatcagcggcgttccggaggagcacattcgggagcgccgtgtgcgcatccatattccgcccaagaacgcaatgcagagcggcaccgataacgtgaacacctggcaaatcgagttcgacaaccgcgagcgctgggagaatccgctcatgggctgggcctccaggtgagtagctggcacgtccaccatgccatggcaaccttggtcaacgtctcgtgttccagcggcgacccattgtccaacatgaacgtgcagttcggatccccagaggaggccatcacgttctgcgaacggaacggatggcgctggtacgtcgacggcgccgcgaagcccaagaaggagcgcgtcaagaactacggcatcaactttgcctggaacaagcgcacgcgcgtctccaccaagtagacgctccccgcagctagccaggattatagaccacaattatctgattttttttttgctttgttcattatctgagtacccaaataaacagtcggctggactcaaatgaccacagcaccatgtaatggccaccagtttcgctgccaatggaagcggcaccatcacatgccgctctaatgacgagcggtttgggagcgatgcctattgtgctgcttctcgcgtggctctcgctcctcccgacgcctatcgccatgtcgatgcctgctcggactgcggcttctcttccggctgtcatcatgatgctggtaccaatctctgcgctcgttgcgccagtcccgatgctcttgtcgctgtcctcggtccttgtgctccttaaaacgatccatttggtcgttatgccgccctctgtcctcctggtaccgctgcctgtgctgcgtttgctcgttgtgccgccattggtgctcctgaaaccgctccgctggcttatcgcgtcgtcccttgtgatcctgttgccgctccgtttgcgtcctttgctgggattgctcaacataccgtccgcggtgctcctgtcggtcgacttgcttatgatgccgcccgccgtgctcctgttcccactgcttctccagcgcctgcatctgcaggctgactagctggtgcagctcctcgttgagcgtgggcttgctcttgcggtggcgccgatgattcttttgctgacgccgggtttcgcccaccacctcggcgaaggcggtgttgtcctggaactgcgggtgcttcttggtgtgctttagaacgtgctcgtagatgagcagccgctgactcgcgtcgagtcctgcctgcagatcatcaaaggaggcagcaggaaggaggcgtcgtgctctttcggtgcccacaatgccctgaatagtcgagtcatcgagctggatgctaaagtcgggattgttgctgcatgacgccggcaatggcaatggctctaacacctccgatttagttgcgccgtttttgtcctgtggtctgtggcta

SEQ ID NO: 40415 - DNA, 668 bp, DROSOPHILA
ggcgaacagctgttttcccaatcgaaaagcgcttgtgttccaaattttacgtaattcgtattttgaagccgatttctgccgtgtagccccaaacgcctagcgaaatgtcggccctccgccaagtgatgtgcagaagcaccgcctccctgcagctgtaccaggccaacagggcagccgctgcccgctgggcatccaccgccacggacggcggtccgctggaccccaagacggccctggcccgccccgaagagctggagcagcgcaacaagctgagtggcaagatcaccgtgccgactgccgtcaatctcagcccgatcagcggcgttccggaggagcacattcgggagcgccgtgtgcgcatccatattccgcccaagaacgcaatgcagagcggcaccgataacgtgaacacctggcaaatcgagttcgacaaccgcgagcgctgggagaatccgctcatgggcttccagcggcgacccattgtccaacatgaacgtgcagttcggatccccagaggaggccatcacgttctgcgaacggaacggatggcgctggtacgtcgacggcgccgcgaagcccaagaaggagcgcgtcaagaactacggcatcaactttgcctggaacaagcgcacgcgcgtctccaccaagtagacgctccccgcagctag

SEQ ID NO: 40416 - protein, 187 aa, DROSOPHILA
MSALRQVMCRSTASLQLYQANRAAAARWASTATDGGPLDPKTALARPEELEQRNKLSGKITVPTAVNLSPISGVPEEHIRERRVRIHIPPKNAMQSGTDNVNTWQIEFDNRERWENPLMGFQRRPIVQHERAVRIPRGGHHVLRTERMALVRRRRREAQEGARQELRHQLCLEQAHARLHQVDAPRS

SEQ ID NO: 40417 - DNA, 6241 bp, DROSOPHILA
attacgctcttgtgtgtgtttacaaggctagttcgatggtttattggttattacctcaaagttgattgtcccgccgttgccgtatttttgaaatatctgcgccacgtatttgttgtattccgtggaagctggcactgttttgaaaaatagtgagcccaggcaaaataggtttaagactagcacctgcttttgggccatcgtaatggactgaacactcaggtggtggtagatagtatttctcttttcgttttattctattcgttttattgaacccggttatctactggtcactcgtcatttcactgggggcttcaccgggattttttcgagtttttacagacgcgtgcgatccgtaacactgcagccaactaccgatcccgttcaacggtcttttgaaatgacagtttcgcccacgcaacgttttatacgactttcggttcgacgagcgtcggcgcgttctcctttctccctctctccttcgcccactgggcgggcaactcatcgctctgcgcactcgctacaaacttaactgtcatttggattgagctttggaaaagctttcgccggaccatcaaatttgagcgccaaaaattaataaagtcgattaacctgttcatcggctaaactcacattaaatagtgtactcagcctttaaattgaaaatactaaagttttacactttcctttcataatcttaagaatctggctaaatgttattattaagcaacaatactttatactaaaaactatccggtagattgtaactatgaagaaaaagattgcatacctaaaggcgttgtaaaggcgctttcatcaagtagtgagttttagaactcgctggagtaggaaaaataactagaaaatgaaaatatttaaaaaaattaataaatattgtggtagataattatgatactttaaatagataccatgcgaaatgatataagttacttttttacctttaaaatgccaatttccgcccacttcacaaaaagtaataagattaaagtttaatgtgtttattattaactttcttatacaaaacaaattcgattttttacatttcgcaaaaagttgcatcaataataattattacttactgaataagctcctaattacttgtataatatgtaaaaattggttcgcattttgtataacaggcgtacttctgctttcgacgaggaactcattttttttgggtttgaaatatacattaaaagtacgactaacaaataatattaattgaagcagggacttccctaccagaatgcatttgagttatttacaataacacttttgtaatgttgtgcgtaggttttcaaaatttcgcgttgctaacctatcttaggggtaaattgagacttatcctaactacaagatattcccttctatagttgcgttgatcgatacatccacaaaaggccctctcttcccaaagtcgtagagtcctgcagtcctagtcgaacttctcctggttgggcatacagatgaagaatttggagcaccacaggttgatcgcctgcgaagtgtccgccagccatttgaccggtttgtggatggtcaggtagtagaccggaattccagacagtataatgatcgtcccgattcctaccacatatggcgtctgcgtgcaagagaagatgaccaggaacaggcagacgatcagatagatgatgggcagcgccaagttgaccttgatgggtcgctccgtcttgggttgcttgtagcgcatccacagcagtccggataccgagatcagcgtgaacaacgcctccacgtagctgacgtagttgattagtacgtagacgtcctcgatgaacagcagcagcaaggtgagcacgccctgggaaattaaaaaaagaaaagaacatgataatttgataaaaacaaatatttatagattctttacttaggttaagcctctaacttaccaggaatatcagcgagggcacaggtgtcaggcaattaacgttaatcagcgaaatggcggccggcaggtgaccattccttgcaccgacgaagaaaagtcgcgaggacgcgaagatcgctccattcagcgaaccaaaagtggagcaggccacagcgaagggcataatccaggacatataccccagcatcttgtcgccaaacgtgactgccactgcatctgacgaaaggatctcgtctggcgagagaaccgaaaagtatgcaatattcgtgatcatatagatgaccgtgaccaccggcattgagatgcaaatggccttgggcaggtttcggtacggatccttgagctcctctgttacaaagttcaaatagttccagccggagtacgagaagaggccgctatagaaggccagggctatatatccaggatcttgaaggcctcccgagaagggattatcccagtgctctgtgtttccatcgaacaaccaccagactccggcgccaacgatcaccaggagggcaaccaccttggtgcccgtaaagatgtccgtcacacgcgtaacccacttaacattatagcaattgataagcgtcagcacacctagggtggaagatcaagcaattagtcaatatagtctatgcctagtctcaccaccgattagctatcagcgaatcttacatatcatggcagccgccagcagctgaacagcttcaatgggcgcgtcgcaggaaggccaaaaaggtttcagcagatatatggcaaaagtcagagccgtaatcgcattgcccgtgggcaccaggatcagcagggccacccacagataaaggaacgcaggcagaggaccaaatgcagtgcctatataggcataatctccgcctgatttgggtatcatcgtgcctggaaaagttaaaatattagttatagaagaaaatttgctcattacggcgtagttcacggggaacatcccaagagaataatgtttaaaaagtgattaggctaatagagagcaaacgttgacaatctgataagcatgacacagttctgaaaatgctttgaggtatgcatttgcctatctaaggagggttgttccagcaattggagaaattttggaaacgcttaaaaagcgtgtactaactattccattttttacgaccatcctagtaattggtgataattttattttatttgctctgtccattcacttcattaagatttatggaactttatttagtacttaaatagtttgacatgaaaagttagaaaaaggtagcataaatatttgattttcaaaaatatgttcaaacattctgatcagatcagattgaacttccattgatatttcgaaaagcaaactttaaaaattatgctaatttgtgtctgccgaaaatgtatggtaatgagtgtctgcctggctgattgttaaaaaaaaacgtgttttaataatgattacaaagccataagcaaagatgacgtaaaaggagagaaaaagcgataagacttttttctttgattctcttaagttttgttgtggatcaaagatattaagagagttccattcaagtttctatttgttttcagatcttgaaaaggtaaatttataccttcggttatatatgtatgtgaatttcaatagagagggttgaacatttgaatttaccccaggaaacaaagaacactcgctgtatttccgataatatgaatatacttattccaagttttgaagcatcctgtacttttctgaagaggctcaagtgctaattagttgataattgaatgtttcgtcggtcccactatcaattctaattcatcattttgctggggagctggaactgattttaatttttgtgtgtgccacttgaagaggcatttttaatgggaccgagctaattccatgccttaaatgtgtctccatggtaattggttggagtagttaatctcaaaagattgtcagttcgaaccaaaggtcatagagattttccgcttctgggtcttggatctggaccgattttaattggaaataagctgaattttcctgtttctttctacagtacaaaaactgtgtgctgtttatttgtagcactttaagtaccacatgttgcttaaacttattttaaaatactcaaatcgtaatcttgaactgatttttttggtgcttgatatatatagcttatctctggccttaacctctttagcccattagtactgacttaagcattctgggcgaccagagctcttgttccatttttttctcaaatttgtgctgtgtttgctacaggtgcttgtcttacacctatgtaaacaactctcccactacatccacgcacacataccatatgttgacccaccgattgctgtcatcagcgggaagcaataactgccagctccgcagaacattgtttgaataggcgtgggctcattatcggaaaaacaaaaacaaaaactataaaaaaaaccgaaaaattcctaaagctaccccttacatgtagcattactcacccaattcggcgtagcatagggcgcccaccatgctgagcactccgctgaggacccaaacgatgagggattgtcctatggagccggagaacttgagcactcccttgggactcacgaagatgccggatccgacaattacaccaacgatgatggccactccatcgagcaggccgatctgcttctttagctttaccccggaaccctgactgccgctgtccgccgtggaattattgggttccgccggaggaacctcgaacacctggcggggaatcaacgagtcgctggcctgaactcgcgccattttttgctcgggagatgtgcggcgttttttatgggtggttcttggaatacggaatattttttgaatttttatgatttttatagggtaactcttccgatttacagtgactggccgtcgttatgtacacaagtccattgcttttatcgggggtttctcgtacttttctcggtttcgttttctttttttttatcagcacaggctagacatgtgccagcgtggagcttccaatacagttcagttcgtttgagtccacatggttttattcatttgtttctgttgttttccgatttcagttctgttttgttcaccacttcacttattccaatgtgcgcttcagtacacaaacgcacacatttgtcaagggctcgctctatatatttaaagacgataaggtattagaatccacgtggttctatcatgttcatctcttcgaatcaagatgagattgggtattatgaaatttgggaaaccgaaaaaccggaagatccgacagaatatcggatggaacgcactgctcgcgacgcgctctgagttcaaactaagtttggaatacgaatttacccccctttatgagcaaaacggctgtcgctcgctcaacttgggctttgcatttgactggtttttttttttattccatttaggtaaggcggcgcggaaagcagctgctgctctctcgcgctcttttgggccataaacatcttacctgttacctgccaaaccaactttccaccgaaacatgcggcaaatcgcatgatgcaagacgcctcaaacatttcgctagccaaagaagtttgagaagtttacgattgtgtgccaaaaataaagcacgtgcggtcgcctaagagagagtcgccggcaatctcttaagttagtttctctttcgccttagtcattgaccttttgtttgggtcctaaatatgtgcgcattttgtcgaaatctttagccactttgttgtcactggctatcccatgtgccaaaagacattagctcaatgatttgtttaagcctttaattgcacctgatttaacggctttgtgggacaaatactgcaagtgaaacttgccacaaactatttgtgtgcacaataattgtaacaaggttaaatgtcacattgtgttaacacggaataaaagctttcgataggagagatgaccgtaaactaaatacaatacaattaatatcgttcgattgcaaatcaggctaatatatgatcattttaagacagtttagaatatttgtttgaaatatgtatatatgaaatattgtatatgtatcccttaggcaatgtctactgtatgcgcggcgatttccggtaaaattgtaacttcaaaaatgaggaagtcgttgataagaagccgcaatcccagttaatctaatactttttttcttttactgtaactgtaaatcaaatatcaattaattttacagccgtttgtgtatggagatttatggggctaaccgcagctgaagagagttacggattagttagttagattacccaacggagaccccatttaatata

SEQ ID NO: 40418 - DNA, 2476 bp, DROSOPHILA
cgtcgcgagcagtgcgttccatccgatattctgtcggatcttccggtttttcggtttcccaaatttcataatacccaatctcatcttgattcgaagagatgaacatgatagaaccacgtggattctaataccttatcgtctttaaatatatagagcgagcccttgacaaatgtgtgcgtttgtgtactgaagcgcacattggaataagtgaagtggtgaacaaaacagaactgaaatcggaaaacaacagaaacaaatgaataaaaccatgtggactcaaacgaactgaactgtattggaagctccacgctggcacatgtctagcctgtgctgataaaaaaaaagaaaacgaaaccgagaaaagtacgagaaacccccgataaaagcaatggacttgtgtacataacgacggccagtcactgtaaatcggaagagttaccctataaaaatcataaaaattcaaaaaatattccgtattccaagaaccacccataaaaaacgccgcacatctcccgagcaaaaaatggcgcgagttcaggccagcgactcgttgattccccgccaggtgttcgaggttcctccggcggaacccaataattccacggcggacagcggcagtcagggttccggggtaaagctaaagaagcagatcggcctgctcgatggagtggccatcatcgttggtgtaattgtcggatccggcatcttcgtgagtcccaagggagtgctcaagttctccggctccataggacaatccctcatcgtttgggtcctcagcggagtgctcagcatggtgggcgccctatgctacgccgaattgggcacgatgatacccaaatcaggcggagattatgcctatataggcactgcatttggtcctctgcctgcgttcctttatctgtgggtggccctgctgatcctggtgcccacgggcaatgcgattacggctctgacttttgccatatatctgctgaaacctttttggccttcctgcgacgcgcccattgaagctgttcagctgctggcggctgccatgatatgtgtgctgacgcttatcaattgctataatgttaagtgggttacgcgtgtgacggacatctttacgggcaccaaggtggttgccctcctggtgatcgttggcgccggagtctggtggttgttcgatggaaacacagagcactgggataatcccttctcgggaggccttcaagatcctggatatatagccctggccttctatagcggcctcttctcgtactccggctggaactatttgaactttgtaacagaggagctcaaggatccgtaccgaaacctgcccaaggccatttgcatctcaatgccggtggtcacggtcatctatatgatcacgaatattgcatacttttcggttctctcgccagacgagatcctttcgtcagatgcagtggcagtcacgtttggcgacaagatgctggggtatatgtcctggattatgcccttcgctgtggcctgctccacttttggttcgctgaatggagcgatcttcgcgtcctcgcgacttttcttcgtcggtgcaaggaatggtcacctgccggccgccatttcgctgattaacgttaattgcctgacacctgtgccctcgctgatattcctgggcgtgctcaccttgctgctgctgttcatcgaggacgtctacgtactaatcaactacgtcagctacgtggaggcgttgttcacgctgatctcggtatccggactgctgtggatgcgctacaagcaacccaagacggagcgacccatcaaggtcaacttggcgctgcccatcatctatctgatcgtctgcctgttcctggtcatcttctcttgcacgcagacgccatatgtggtaggaatcgggacgatcattatactgtctggaattccggtctactacctgaccatccacaaaccggtcaaatggctggcggacacttcgcaggcgatcaacctgtggtgctccaaattcttcatctgtatgcccaaccaggagaagttcgactaggactgcaggactctacgactttgggaagagagggccttttgtggatgtatcgatcaacgcaactatagaagggaatatcttgtagttaggataagtctcaatttacccctaagataggttagcaacgcgaaattttgaaaacctacgcacaacattacaaaagtgttattgtaaataactcaaatgcattctggtagggaagtccctgcttcaattaatattatttgttagtcgtacttttaatgtatatttcaaacccaaaaaaaatgagttcctcgtcgaaagcagaagtacgcctgttatacaaaatgcgaaccaatttttacatattatacaagtaattaggagcttattcagtaagtaataattattattgatgcaactttttgcgaaatgtaaaaaatcgaatttgttttgtataagaaagttaataataaacacattaaactttaa

SEQ ID NO: 40419 - protein, 499 aa, DROSOPHILA
MARVQASDSLIPRQVFEVPPAEPNNSTADSGSQGSGVKLKKQIGLLDGVAIIVGVIVGSGIFVSPKGVLKFSGSIGQSLIVWVLSGVLSMVGALCYAELGTMIPKSGGDYAYIGTAFGPLPAFLYLWVALLILVPTGNAITALTFAIYLLKPFWPSCDAPIEAVQLLAAAMICVLTLINCYNVKWVTRVTDIFTGTKVVALLVIVGAGVWWLFDGNTEHWDNPFSGGLQDPGYIALAFYSGLFSYSGWNYLNFVTEELKDPYRNLPKAICISMPVVTVIYMITNIAYFSVLSPDEILSSDAVAVTFGDKMLGYMSWIMPFAVACSTFGSLNGAIFASSRLFFVGARNGHLPAAISLINVNCLTPVPSLIFLGVLTLLLLFIEDVYVLINYVSYVEALFTLISVSGLLWMRYKQPKTERPIKVNLALPIIYLIVCLFLVIFSCTQTPYVVGIGTIIILSGIPVYYLTIHKPVKWLADTSQAINLWCSKFFICMPNQEKFD

SEQ ID NO: 40420 - DNA, 5383 bp, DROSOPHILA
agatatatactaaatgtgcatgtgtatatataatatatataaacatatttgaatgatcgcaaaacgctttaatcaatgttgcttctaggtttctttttgatgcgcgcctcgtcaatgaataattacgtcatattcttttattagtttctgatacagttgggattatcaactaggttactctcacgtacacacaaacacggaacacttgagtagcctcatggcctgctacttgctactagctacttccttccgaggtcgtggcactcgcttttccacagatcttccgacgcttttcacttcgcgcacagatttctcaatgtagtatcagtgaatatatgtatatatattatatataatatatatatcaacgcgactgtatattatcagatttttcaaagaagccgacgcttttcctcctttatcgccaacgcgtctaattcccggatcacagctcgacacgtccgctctgttcgcgatccaagctcaaactgagcggacataacagccggatggttggccttgctggaggtttcgttgataagaatcatgctgcgaagagcagcttggcagctgggctctcttacgatctcttgggaaatgtcctataaatagatttttgccgcgtccactggaacaacgtcttacggaccagaaaacggattctcaaatctgatacattctgtttagaggattttaagatatcttgcataacattatcttacaatattcccaaggacaatttcgtatcccttcaagacttaataatttaataaggactagaaatacacaatattgcgctatttatttggtaccagacacatttaaattatattaaatctcgcggattgtctataaaaatctacgttatttattagtataagagtagcatataaggttacttatagacgaactaagactttgacgagctgctctcatacgtataacaatacaccacaaatcacatggaatcaggaatatcagaaactactctgtatgtcacttaaggctagcgtgctcccccatgagcatgtcctgccctgaagtgggcaccacccgttccagtaccacttggtcctcctgctcctcctgccctgcgtttctccgatcccgattctgcactagcgtctccgttatcagaaccaccactctgttctgcatctagattcttgagttgctgttgccacatgtccgcgtagatgccatcttcgcgcagcacaagctcttcgtgtcgcccacgctccgctatgcttccctgctgcaggaccagaatctcgtccgcatggatgatggtggaaagacgatgggcaacaatgatggtggtacgatttgcgcacaccctggccaaagcagcctgaatattgcgttctgtgtgggtgtccaaagctgaggtggcttcatccaggagcacaataatgggcgccttaagaagcgttctggcgatggctacgcgttgcttttcacctccactgagccgcagacctcgttcgcccacctttgtctcatatttctccggaaagccgagaatcctttcgtgaatgtcggcggcgcgagcagcctcatagacagcttcgtccgaagcgcccaacttggcatattcaatgttgtagaagatggtgttgttaaagagaaccgtatcctggggcaccactccaatggcctttcgcagactctgctgctgcacaagcttgatgttttgtccgtcaatcaggatagcaccagtctgcacatcgtaaaagcggaaaagcagccgcatgatggtgctcttaccggctccagagggtccaacaatcgctaccgtcttaccggccggaactgtgaagctcacattgcgcagcactatcttctccggtgaatagccaaaggtcacgtttgagaactcaatgccaccgccggcagttagaaggggcgaacagcctggggcatccacaatctcttcctcctctttcagcagatcgaacatgttctccatgtccacgaagttcttctgtatggctcggtaataggtgccgaaccaattcagtggcatgtacaattccatcagataggtggagaagagcacaaaatcgcccacggtgagggtttgatggtgaactaccaagtatacacagagcagcgatccggccagtaggcccaagcacaaaataatattctgggctgtgttcagcatgttgagtgtcagcattgagaggaactcttccttttggtacttgagaatggcctccctgtagcaatccacctcgtagtgctccgctccgtagtacttgactgtttcgaaattgagaagggagtccacgctgcgagctcgctgctcattgtccgccaggttcattctcctctggtacttggttctccattcagtgattgcaatggtagaggctgtaaaacggaaggatattttgaaatacgaatggaattaatcgaataatttttatcacttacctatatacaggaacatggtgaggaagacgattaggccaaaccaccaattgaaggcgtaaacaaagtatgccacggcaacgagtagatcgagaatggttggtgcgatcgagaagacaatatagttgaggaggttgttgatcgagtccgtgccgcgatccatgacacgcaacacctctcccgttttgcgttgcaagtgccatctaagcgaaagctggtgcagatgccggaacagctcaatctcgatctcccgggtcgtgtactgttgaacccgtatccagaggaaggtgcgaaggttattaaataatcccatgctaccagtgccgccaccctggaggaaggacaatgccacatagatcagcacaaagtcccagcgaaagacgatcggtgcaatggtaagactgtcaactgtcgaaacaggagattagcaatgaattacttaacgaattacgttcataattcttgacctacccaacttcttgcgataaatcggcaaaaacagctttatgactcgaccggcaagcagcagtataatgcaaacgatgacggctatctgcagagcaatattctttttaggccagaggtacggaaagacggtgcgcagcttgcgccatccgttcctgaaagcagatcctgtctgcacgtttccctgcgattcgttggcggtatcattgtccagccgctgatgtggattgtacggggccatgatgccaggagctttcagacccaaaacgaagatgagcagggagcacaggaaccgggtgacaaacaagcccatctcaatttgatccttgttcctgcgagtagtaaaggcggtactatagattatccgttttacagccgtttgcattacttacgtttttaggtggaaccaccagtcctcgtggcgcaaatttatgaaggccagcgactcgttaatgaaagccaacgtccagaatagcaatagaacaagtccatgtcctcgggtgggcattgagggcagctggtagtagcgctccttgagtatcaaacagatgctgaacgggtaggagaagcacacaacgcaagtggagaagatctgcagaaaagatttcgatcagtaattgtttcttcttgatcattttcatacttaccatatagccgtacaccgcactatctggataaatacgtgcattcatcagaaaccgcaatagagccaaaaccgggagcaggagcaacagaaagagttgcatcgcgaacagtcgtgacttggagatttgcgtgggatccgtaatcctggtggcatacttccggtacatcagcaactgaatgctgccgaagagcagaaggaatccaccgtataccgccggtcccacggtgtccatgaagcaatgcgagatgccatgctgcgtccacacctcgctgagggtcacgttgggcgggcagtacagcatggtgaagtcggtgtacctgcgcggcgacgaggaaaggcaattgcggaacgataagctctgatagaaacgtgccagataaagtggagctgtcactgggaaacagctcggtgaacacaattgctttgttttatgggctggcggcaatttcgcaattattcacccaaattatcagacgcccccaaaggggaaatcactatttttttcctccgggtaagcggagtgcagattgtgaattgataattggtgcccttgcagcacggcaccaagagatccgaaataccctggagtccggcaaccgtggaaactgcaactcatccagcccattggatatgctaaattatgcaatgttgcgtatgctcgattcgccggcgggtctagtgctcccctcttacccgctataagaagtcgcgatctggtggaaacaccgcaatcagtcgtgtgacaggtgataactcaactaatggacaactggcgggcaactccgacccaatcaccaccaactacgatcaacataaataattttgacccaagggttcggtatggccgtttctgcttacacacaacataccacatacacattgtacagtggaaacaggtgagattcatttaaatgaacatagcttaatatataacattttcgattgctataataaattcagggagagtttgtttaagtgatttaattttaagctatcaaaggtttaaagtaattctcttatcaaattgaaggtaacaaattttctggaaacggtcacgctagctttcagccctggttttcagcttggcgcccagttttcaaaccattttcttatcagaatttgcgattactttaccattcctggttttcaacacaccatcttatcagaaattgtgattatttcaatattccttgtttttaaaaccctatttcgacatactgcgggtaaaatatacagattatatagatttctttattcgtcaattctcaaaataaatattcaatgttcatctaatactttacattcaagaaattttcacaaattgtctacgcttaaccttaggtaataactaagctaagtttttgagtttgtagagaatgaatattcaaagcacaaggaacaaattgattgggagtaagtttctatttacatctagagttgccttttttgtttttatttttgtttaatttgaggtttggttaaatataaaattcgctacttatgagtaaggggatggggcgattaaaacctaggaaacattttagaagatttcccgtacgaatttcgaatttgattcggtcgactattgactaaccactaacttgttcaacttgggtttaacttattatcacaaacaagtacatttaatatgcatatgattacagtgaagagggagtcgactcccccccatacagctatgagttgatcttggccagcagtggctgggtgacggcactgcccgccaccggtgggcactgctgcttgtagctcttcaccaggaagccgtagtggctgctgtccgccggaatgttctggccactgccgctccgttgcgga

SEQ ID NO: 40421 - DNA, 2770 bp, DROSOPHILA
aacccttgggtcaaaattatttatgttgatcgtagttggtggtgattgggtcggagttgcccgccagttgtccattagttgagttatcacctgtcacacgactgattgcggtgtttccaccagatcgcgacttcttatagcgggtaggtacaccgacttcaccatgctgtactgcccgcccaacgtgaccctcagcgaggtgtggacgcagcatggcatctcgcattgcttcatggacaccgtgggaccggcggtatacggtggattccttctgctcttcggcagcattcagttgctgatgtaccggaagtatgccaccaggattacggatcccacgcaaatctccaagtcacgactgttcgcgatgcaactctttctgttgctcctgctcccggttttggctctattgcggtttctgatgaatgcacgtatttatccagatagtgcggtgtacggctatatgatcttctccacttgcgttgtgtgcttctcctacccgttcagcatctgtttgatactcaaggagcgctactaccagctgccctcaatgcccacccgaggacatggacttgttctattgctattctggacgttggctttcattaacgagtcgctggccttcataaatttgcgccacgaggactggtggttccacctaaaaacgaacaaggatcaaattgagatgggcttgtttgtcacccggttcctgtgctccctgctcatcttcgttttgggtctgaaagctcctggcatcatggccccgtacaatccacatcagcggctggacaatgataccgccaacgaatcgcagggaaacgtgcagacaggatctgctttcaggaacggatggcgcaagctgcgcaccgtctttccgtacctctggcctaaaaagaatattgctctgcagatagccgtcatcgtttgcattatactgctgcttgccggtcgagtcataaagctgtttttgccgatttatcgcaagaagttggttgacagtcttaccattgcaccgatcgtctttcgctgggactttgtgctgatctatgtggcattgtccttcctccagggtggcggcactggtagcatgggattatttaataaccttcgcaccttcctctggatacgggttcaacagtacacgacccgggagatcgagattgagctgttccggcatctgcaccagctttcgcttagatggcacttgcaacgcaaaacgggagaggtgttgcgtgtcatggatcgcggcacggactcgatcaacaacctcctcaactatattgtcttctcgatcgcaccaaccattctcgatctactcgttgccgtggcatactttgtttacgccttcaattggtggtttggcctaatcgtcttcctcaccatgttcctgtatatagcctctaccattgcaatcactgaatggagaaccaagtaccagaggagaatgaacctggcggacaatgagcagcgagctcgcagcgtggactcccttctcaatttcgaaacagtcaagtactacggagcggagcactacgaggtggattgctacagggaggccattctcaagtaccaaaaggaagagttcctctcaatgctgacactcaacatgctgaacacagcccagaatattattttgtgcttgggcctactggccggatcgctgctctgtgtatacttggtagttcaccatcaaaccctcaccgtgggcgattttgtgctcttctccacctatctgatggaattgtacatgccactgaattggttcggcacctattaccgagccatacagaagaacttcgtggacatggagaacatgttcgatctgctgaaagaggaggaagagattgtggatgccccaggctgttcgccccttctaactgccggcggtggcattgagttctcaaacgtgacctttggctattcaccggagaagatagtgctgcgcaatgtgagcttcacagttccggccggtaagacggtagcgattgttggaccctctggagccggtaagagcaccatcatgcggctgcttttccgcttttacgatgtgcagactggtgctatcctgattgacggacaaaacatcaagcttgtgcagcagcagagtctgcgaaaggccattggagtggtgccccaggatacggttctctttaacaacaccatcttctacaacattgaatatgccaagttgggcgcttcggacgaagctgtctatgaggctgctcgcgccgccgacattcacgaaaggattctcggctttccggagaaatatgagacaaaggtgggcgaacgaggtctgcggctcagtggaggtgaaaagcaacgcgtagccatcgccagaacgcttcttaaggcgcccattattgtgctcctggatgaagccacctcagctttggacacccacacagaacgcaatattcaggctgctttggccagggtgtgcgcaaatcgtaccaccatcattgttgcccatcgtctttccaccatcatccatgcggacgagattctggtcctgcagcagggaagcatagcggagcgtgggcgacacgaagagcttgtgctgcgcgaagatggcatctacgcggacatgtggcaacagcaactcaagaatctagatgcagaacagagtggtggttctgataacggagacgctagtgcagaatcgggatcggagaaacgcagggcaggaggagcaggaggaccaagtggtactggaacgggtggtgcccacttcagggcaggacatgctcatgggggagcacgctagccttaa

SEQ ID NO: 40422 - protein, 866 aa, DROSOPHILA
MLYCPPNVTLSEVWTQHGISHCFMDTVGPAVYGGFLLLFGSIQLLMYRKYATRITDPTQISKSRLFAMQLFLLLLLPVLALLRFLMNARIYPDSAVYGYMIFSTCVVCFSYPFSICLILKERYYQLPSMPTRGHGLVLLLFWTLAFINESLAFINLRHEDWWFHLKTNKDQIEMGLFVTRFLCSLLIFVLGLKAPGIMAPYNPHQRLDNDTANESQGNVQTGSAFRNGWRKLRTVFPYLWPKKNIALQIAVIVCIILLLAGRVIKLFLPIYRKKLVDSLTIAPIVFRWDFVLIYVALSFLQGGGTGSMGLFNNLRTFLWIRVQQYTTREIEIELFRHLHQLSLRWHLQRKTGEVLRVMDRGTDSINNLLNYIVFSIAPTILDLLVAVAYFVYAFNWWFGLIVFLTMFLYIASTIAITEWRTKYQRRMNLADNEQRARSVDSLLNFETVKYYGAEHYEVDCYREAILKYQKEEFLSMLTLNMLNTAQNIILCLGLLAGSLLCVYLVVHHQTLTVGDFVLFSTYLMELYMPLNWFGTYYRAIQKNFVDMENMFDLLKEEEEIVDAPGCSPLLTAGGGIEFSNVTFGYSPEKIVLRNVSFTVPAGKTVAIVGPSGAGKSTIMRLLFRFYDVQTGAILIDGQNIKLVQQQSLRKAIGVVPQDTVLFNNTIFYNIEYAKLGASDEAVYEAARAADIHERILGFPEKYETKVGERGLRLSGGEKQRVAIARTLLKAPIIVLLDEATSALDTHTERNIQAALARVCANRTTIIVAHRLSTIIHADEILVLQQGSIAERGRHEELVLREDGIYADMWQQQLKNLDAEQSGGSDNGDASAESGSEKRRAGGAGGPSGTGTGGAHFRAGHAHGGAR

SEQ ID NO: 40423 - DNA, 8069 bp, DROSOPHILA
ccgcctacaatcttttggatttctctttgttttccacttctcggttttttgcttgtcttcttggcactggcgttcaaattgatttgttttgtacactgagagaagggtgagaaatacgttcagttctcccattttgctcaatattttggcaaatatctctcttggacacgttgcttgtagccatcattagctgctcttttgttgtttgtttttgccgagtatgatttcaatttggcgggttgttcttttcattatttctgtgggtttgtggcgacttttactttcctctacgccgcttgtgattggtagctttgtagctgcactgggagaaatgtcgtacgttttaaagatatattgaagaaaaagtataatgaattaatacaattattgttcttaaaataacatgactcgtgtgctaataggaattttcaggggacatttttgaatctccataaacaagcacgcataaatctcagtgcacattttaattcgaaatttttaagttaatttttttctgttcaatgttttattggcattgaaattgtgcaatgtcattttcggtcttaattaatcctcttattgttgctgattacacctatctctttccatttttgcttggcttagcattgttttttgggctttcctcctcttatatgtacatgtagaaagaaatgtggtttcatgaaatttgtaaaaatttgaacaatatattaaggaaatgttcggagaggcttactcgcaggagtagtaaaaatatttttgaatattttaaagttattggaatagaactctatgaagtcttaggattgtttgcttggaaaactaaaactttcaaatggagtcgaaaactttataattgagtcgaaattatataattttcatttcattcaagtgattttcatcacttattgttctctgtgtacttggtcaccaaatccactggccattgcatcgtggatctttcgactgctttgaaatctaccacaaaccgcaaaatggtcggcaattcaactgccctacacggcataacggtatcgcccacccacccagcgcacatagatacaaatacgcaccgtctcacacacacatctgaaggcaactagcgtggaaagatgaagccgctgcctcggctgacgtcgacgcaacgtcgactgcgcagcgaacgtcgattgtcgcaagttgaacgcgaatttcgaatttagttttcagtttgtgtcgcgcctccgttttgtaaatacgcgaaaaaaagacattcgccaagtcgaacagcaataatagcaagaagagctcacagcaactaaataattaaaacggaaacagcgggtagacaaacaaaaacgagaaccatatgaactagaattgaattaattaagcaattacaaatggcaagaaaaacagcaaaagcagcaaaaaaaaaaaaaaaaaacgcagtcagcacagcaagaaggaacaaagtggaaacattaatttggatactagctactagcgggaaaattaaatcaaatatttatgtgtggaacgcgggggcctagtgacgcacgatctcataaatatatttttaggatttcttttttatataattttatattttattgccatgcccgcacatttatgccaattaaattcgcggcgatttcttttaatagccccaatcgcgttgatattaatcatacgcagtggagaccaatcttaacaataattgattctttgatattcaagggctgggtttgtttcaatttttctgtgatatgaaacaacaattttttatgtttttataaattccagtagtaatcatacgcactggggaccccgattctttactcggccactttgtatcacgcatttttaagatgttacttaatatatagcgctatttgatgcttttcgtgaggatttgtaaaaaatgattattgagctgttttagtgatttacaatatttttagttcaaaacggcacacgcaatgaggaccgattatgtgctcttagctcttacattcctttaatttgtttacttatgcgaaagtcagctttttggctacccaaaagtatttttaattttaagaaaattgtttcagagctgttcggggcatttttgaatatttatttttataaaactttgacattggatttgtcattgctgctggcggctgtttttgctcgcctgtccacgccgcgtatacgtaatatctgtataattctgcccgcacttcgcgcttttgtctttcttgtcagcaaaacatcgttattacaaatccgagagtgaaaatctccaagatcttccacagaaatcccacgtcgcgacgtgcgttttccgaatactacatctactactactatttgttgtttgtttttctgtgtccatattagaagcgaagcgttttcacaatttgttgcacataagtagcacaagcaccaacacagggataactaaagaaccaaaactcacacacacgcacactctcacaccgacaccgacaccaacaccgatacacaggagtatacaagcacagaaaaatgcctaaggtttgccataaataaatgagtctgttagtggctgtcatagtttgtagaccataagtctagtttgtacttgtattcaataagcgctcattcatatacgcaagcggaaagtaacaaaaacaaaaagattaaaaaaaacacaccctcatagaggtaaaaatttagaattcggttacacaattgtatgcatattacacttttgcttttcccattttcccgtttttttctgtggactgtccccttccgaagtcggcgcctccgtcgtttattaatttatgcacacacatggatgcaataataccactatgtccacaattgcaagcggcgaccattgtactttatgcatacgtagatgatgcacgatggctatatgttctgggtcctacctcacagcatgtggacccatttgacgcctcatcagtgtttcattgtcgccgttgtaatccgacttctttttccccactcgaaggtatcttcttcggctaagagccgtttgttaaagcagaaagctttttgtgtactttattgagtatgggattaaattagaaaataaagtactgcttatcaaccccttaagcgacacaattcaactattttgcttagaaatatataaacgcgttgtaatttacaaaatctggaattatgtagaatgagctatttacataagttacagtaaacgggtagattaggtttcttaaaaagtattctacaggtaaaattgatcgttttgcatgtggctttgtatgtctgtctgtgatctcgggaacccttttctgttgatatttttaaaaaattttaagtaacgggtatgtgatagtcgaggaaatcgactaaagcatttctctcttgtttcttgtagctctgttggcagccgtacaagattgttaaacataattgatttggtaataggtgaaaatgtgtggtaattactaattagtcatcgttacccaaccttcaccgcatcttggcccacccttcacacatggccccaccctttcgccaacgattgtcgtcatctaatcaaaagcagcatttgtcatgattcctataaatgttgtttgctgttttattagcgagctggttgataaggctgactggtgacaagactccactttaaagtcagagcctatgtacgtgaaaatcagtgaacaccatccaatcaggcggggccagaccgcaaagtcaacccatccgggcggggattggattcaatttgcaatttgcgaaatcgatttccgtttaatatgtcacagggaacgacgccaaaagctgaaagctgaagcagcgcagctccgccccgggaaaatcgcgagcaatatcggagggtccaagggtggaacagtgggttgacttgtgggctgtttgttgggtgctcttcatggccacgtccccatggccatggccagggccagggctacaagtcggctgggcgccgactccgcgtctgcacaaaggtcacggtcaaatcgctggcacacgcgtcttccagttgccgggttctggtctctgggttctctgttctcggcgctgtcccttgcaaaatggccataaacaacgttgcactatggcgaatgctaaggaaggggaatgttttgatactgccacccagtaagctgactgcataataaactaaagtgagccatttgcatactgaactttggtacgttgcgaataatttattcaactattcagtcaatggactatgttatagtataatttttggttaagacaccaagtcctacatataatgagtttagaaaagagaaagctattaatagaaatagtaataattatgagtatctttattaaactattacggtataaaaacaatgctcatagaacttccgtgtagtttaaagcattcggtttagtttaagctttgctccatctaattaaaaggcatttgtatgcctaacgttgatgattctgggcggcagcactcgattatcttctgttttgacacctgacttcaggttccttcagctgactggcagccaaccaagaaatttgccattttatggaggcgacattcgattcggaggtgaattcattgagtagttcgttatcgtcacctacaatccatgatcggctgcaaattgcttagctcaccaattaattgcggttccctgcttttattttccatatttgtttacacttctcatgcgtacttcatgcgatttttggcttggtttgtttagacaataaaaattaatgagcagcgtcgttcatttgaagtttttcgcgggtcccgacgatgtttatggacggcgtaaaaccatttcgttcatgagtttgcggtcggatggagaaatcaaatcaagtgcaattacttggatgttagatgcaaatactttgatatggctaggaaaacatgttgattgttaggattgccggaacagagatttatttatcagatctggaataaaataaataagaaatgtattgcttgtaaaaatgagttgtatagcgaatcatgttataaactaagctcaaaataccatctgttcattcaatatattgtaacggaccagcctatttataggacaccgatcctaacgcatttcaaatgcagccataactgccaggggcggccacttgcagtcacaagtgagtgacaatttaatgcaacttaatcagcatctctggccagctggccattttgcttgactggtttgacgtcactatgggaaatggacagcaattggacagccaggccgtgcagctttggtgcgcactttggaaatttgtttagggacagggactcgagacaccggaatgcgcagcaagcaagagtcaggatgcaaagctcttcagctactccggttggctcttttgactgccgacgcagtgatggagcttatgagttacggatgtgggcgggtggagcttttccgggcgcgtctccggacaatatgcacaatgctgcagagaacaaccactggttgcagtttccaaacatccatcgagagtgacgcacattaatctggcaattggtcgctaacgcacttgggcagttgactcctgcagcagataattaaatttgcaccacctaagttccataaagtgagagagtttgagggaatctatagaaccttttttattctgcaattattagacctgctaagtccgttcttatactaatattaaacttaaatctagccagatactctgcaatatcgtgcaacatttccagcatggcctttatctttattcagataatgttcaacaaatatgataatgaatcgagacttatgtgcgataaagcaaacccaaaatactaacgatattgttattcatatctttggcaggaacaagtcaaactggatgccagtagacaggtaatcagccccgacgactgcgaagatctcagcccgatgccacaaacagctgctccaccggttcgcaggcgaggcggaatctccgccgaacccgtaaccgaagaggatgccaccaactatgttaagaaggtggtgcccaaggactacaagacgatgaatgccctgtccaaggcgattgccaagaacgtcctgttcgctcacttggacgagagcgagagatccgacatatttgatgccatgttccctgtgaatcacatcgccggcgagaatatcatccagcagggcgatgaaggcgacaacttctacgtgattgatgtgggagaggtcgatgtaagtatatttatttttcttgctatgacctttgaattgggtttgcatcattatgaatatgttcacatcttcgccaggttttcgtcaactccgaactagtgaccaccatcagcgagggcggcagctttggtgaactggccctcatctatggcactcctcgcgccgccaccgtgcgcgccaaaaccgatgtgaagctgtggggaatcgaccgcgactcctaccgccgcattctgatgggctcgaccatccgcaagcgcaagatgtacgaggagttcttatcgcgcgtgtccattctggagagcttggacaaatgggagcgcctcacagtggccgattccctggagacgtgctccttcgatgacggtgagacgattgtcaagcagggagcagctggcgatgacttctacatcatcctcgagggctgtgcggtggtgctgcagcagcgttctgaggtgagtgaccgcgatcagacaccatgggacacctaaaaagagacactctaatcaactcgtttatctaatcagcagggcgaggatcccgccgaggtgggccgtctgggtagcagcgattactttggcgagattgctctgcttttggaccgaccacgtgcagcgactgttgtagctcgtgggccgctcaaatgcgtcaaactggaccgggcgaggtaagtgcagtggcttgagtgctaagacaaataggcaggtgtatgttaatgaccttaagcaattataaaatcaattgtctccagtaacttctccagtagctaacctgtaaattttttttggctttgttgcagatttgaacgcgtgttgggaccctgcgccgacatactcaaacgcaacatcacgcaatacaacagtttcgtatcgttgtccgtttaagaccgcaacaacgacaacaaccactacagcagataaacaacaaagagcagcagcagcaaagaaagcaactacaaccgacaaaacaaacagaaacaacaacgcagcgaacgtgagaaaccaacaggaagacgatgggaactagttggatagatatatagataagaaaaacaaacgctcagcagcataaacatgaagtcgtaacttatataagtgtgtaaaattaattgtcacagccatttgattctcgattctgtcggagattcagattcagattcagagagcacgcgggctgagggctaaacaaatattaattatccgattctgtatgttgtgctgaagttatataattgtgtatgtgtgtgtctctgtgcaaaggttgcgtcggcatgttccacaccccgcgacccccgatatcggagatagctttccccggatacatctatatacttctctcaacttcttttaaattctccgggtctttcgaaaaagagagcccatttgtataatctatgggacatgctgcctcctcaaaaacgtttcattaaatatccaacagacatctgaatgtttttaaaaaaagaaataaacaagatgaatatatgtgtaataacttaaatcataaaaggctacacacacaggcacaaaacacagacacaccaactcacacactctcatacgaggcatgaagtcatggaaatgataggacttgaatgaaacaatggtattttgcttgtatgattcgttgttttttgtctagaacaaaagcacaacggcagcaattaattaaccattttaattttaattttagtaaattattcttacaagtaaacgcgtaccacgtgaagtcagcgagcgtaaacttttcaattaaacattaaaatcagtgaaaacttcatgattttttaacatgtttcttgtttcttcatcgaaaggtgttttgtaatcttaacatagttttatgattttttattaactaatttaagcttgagcacagcgaatg

SEQ ID NO: 40424 - DNA, 1283 bp, DROSOPHILA
cggcaattcaactgccctacacggcataacggtatcgcccacccacccagcgcacatagatacaaatacgcaccgtctcacacacacatctgaaggcaactagcgtggaaagatgaagccgctgcctcggctgacgtcgacgcaacgtcgactgcgcagcgaacgtcgattgtcgcaagttgaacgcgaatttcgaatttagttttcagtttgtgtcgcgcctccgttttgtaaatacgcgaaaaaaagacattcgccaagtcgaacagcaataatagcaagaagagctcacagcaactaaataattaaaacggaaacagcgggaacaagtcaaactggatgccagtagacaggtaatcagccccgacgactgcgaagatctcagcccgatgccacaaacagctgctccaccggttcgcaggcgaggcggaatctccgccgaacccgtaaccgaagaggatgccaccaactatgttaagaaggtggtgcccaaggactacaagacgatgaatgccctgtccaaggcgattgccaagaacgtcctgttcgctcacttggacgagagcgagagatccgacatatttgatgccatgttccctgtgaatcacatcgccggcgagaatatcatccagcagggcgatgaaggcgacaacttctacgtgattgatgtgggagaggtcgatgttttcgtcaactccgaactagtgaccaccatcagcgagggcggcagctttggtgaactggccctcatctatggcactcctcgcgccgccaccgtgcgcgccaaaaccgatgtgaagctgtggggaatcgaccgcgactcctaccgccgcattctgatgggctcgaccatccgcaagcgcaagatgtacgaggagttcttatcgcgcgtgtccattctggagagcttggacaaatgggagcgcctcacagtggccgattccctggagacgtgctccttcgatgacggtgagacgattgtcaagcagggagcagctggcgatgacttctacatcatcctcgagggctgtgcggtggtgctgcagcagcgttctgagcagggcgaggatcccgccgaggtgggccgtctgggtagcagcgattactttggcgagattgctctgcttttggaccgaccacgtgcagcgactgttgtagctcgtgggccgctcaaatgcgtcaaactggaccgggcgagatttgaacgcgtgttgggaccctgcgccgacatactcaaacgcaacatcacgcaatacaacagtttcgtatcgttgtccgtttaa

SEQ ID NO: 40425 - protein, 297 aa, DROSOPHILA
MPQTAAPPVRRRGGISAEPVTEEDATNYVKKVVPKDYKTMNALSKAIAKNVLFAHLDESERSDIFDAMFPVNHIAGENIIQQGDEGDNFYVIDVGEVDVFVNSELVTTISEGGSFGELALIYGTPRAATVRAKTDVKLWGIDRDSYRRILMGSTIRKRKMYEEFLSRVSILESLDKWERLTVADSLETCSFDDGETIVKQGAAGDDFYIILEGCAVVLQQRSEQGEDPAEVGRLGSSDYFGEIALLLDRPRAATVVARGPLKCVKLDRARFERVLGPCADILKRNITQYNSFVSLSV

SEQ ID NO: 40426 - DNA, 3219 bp, DROSOPHILA
gctcacccgccactgctcccccatcatgaccaagatgcatcagcagggtgcgggagctggagctggtggtccgggagcaaactgcggccagcaggcgggaggatttggaggctactctggacccacggtcgaggaggtcgactaaggccaaagagtctaatttttgttcatcaatgggttataacatatgggttatattataagtttgttttaagtttttgagactgataagaatgtttcgatcgaatattccatagaacaacaatagtattacctaattaccaagtcttaatttagcaaaaatgttattgcttatagaaaaaataaattatttatttgaaatttaaagtcaacttgtcatttaatgttttgtagacttttgaaagtcttacgatacaattagtatctaatatacatgggttcattctacattctatattagtgatgatttctttagctagtaatacattttaattatattcggctttgatgattttctgattttttccgaacggattttcgtagaccctttcgatctcataatggctcattttattgcgatggacggtcaggagagctccacttttgaatttctgttcgcagacaccgcatttgtagcacatagccgggacatccggtttggggagattttccagtctctgttgcaattggttttcgggaatgcgttgcaggcgcatacgctctatatcctccgaacggcgctggttgaccctagcatttacataaggatcagcagcaaaatttgcctctacttcattgcccggaatcacagcaatcagatgtccctttcggttacgatggatattcaggtgcgaaccgcacacaaagctctcgccgcacactccacactgatatggtcgctcgcccgtgtggcgccgcatatggatcttaaggtcgttggactgcacaaagctcttgctgcacattttgcaggagtacggcctttgacccgtgtgcaatcgcatgtgtcgcgccagcttgttctgcgaaataaacttcttggagcagatcttgcactcactgggacgctcgccggtgtgctgacgcatgtgaagactaagatcttggctgcgcggaaaggccttctcgcattgatcgcacttgtacggattatcgcccgtatgtcgccgaatgtggatggtaaggctagatacgggaaagctcaggccacagtgcggacagtctcgccgcttagctatgcgttttcgggcggaattgtccgtcgtttcttcgggttccaatgcgattgcgtcgggatggaatgcctgcatgtgtcgccggagtgtgtcctgacgcttgaatgtccgcggacagtgctcacaggttagcagaccggtgccgcagctctcgttggccagcttcatggcggccacgtccgctgtcagtttgtgggcttgggaaaaatgacgagtcagagattcacttttggcaaagacacgcggacagacggcgcacttgtagatgaagttcgccgaatggttcaaacgactgcccagctgggaaggtcgcgacaattctctgttttctatttcatctggccgaggcttcagctgaaaggagtcttcaggctcatcatcacgatcctcgctcgcatagagtggctcttcgcccacatctgaagtaaaagctgaacagtcttggtctccatacttctcctccatttccacgtgctgttcggcaaaagacgtggacaggtattgtgccatactgaccacatcgtcttggtctataagctccacgacatccacatgaacttcatccggcttggcagcaacttcctgttgctcgaagagattctgtaaagtttcatgggcgttttccacttcgacgatgaactcataggcgccgatcagccggcgggcgcaattttgacacagatgcataggcagatttgggtccgtccatgtccactggaaataattgaacttatttttcgaagtttcttgaaattgtagctctttaccttcaatttggaaactgcctccaacaactgccagagctccaacttaaggtcgttgtatttgatttcatcgtggacatacagattggtctcgtgcgtctccaggcagacgcggcaagtctgcgagcttatatttacgtggatctccggtgtgtccatgattcggcatcatatcataaacgacgaattccaataaaaactttgcttgttaataacacctgatgttcagagatgcccgataaaatcacagctgttctggttcacagtcaccagaaataaaaaatattggaattgagatgtacacaattaacgatatttataaatatcttccgatagtctatcgtccggttaatcaaaataaagtgcgacgaattaacatattttcaaaattaagacgctttgatagatgtatttgtatagagatagaaattaaggttaaaataacataaatgccaaagtttagagcactattcaataattctcttgatttcaaattgaaataatacacaatataacattttctaacactacaaagtcacgatattcttcaaccaaccgatagtatcgcacacttgccattcgcctcatcacgcacacgcccgcttcacaattcaaacgaacggcattttattttcacaggatcccgggagtcgtgaatgttttacccaatatcggctttcattgttaactgaccaaaattgtaatctgttctgttagttgtcgagtgcctgtgccgtcatgtcccatccgtctgaccatgtgctgcgtcccaaggaaaatgctccgcacagaatgccagaaaaatcagctgcagtgcacaatatgcaaaagaacttgctattgggaaagaaggtacgttaagtggtaaatctctggagtgcagctgaaactcttatttggtaccattgtgatacagcccaacagcgagaatatggctccagctagcaaacccttgccaggatcctctggcgctttgatcaggaagccaggcctaggaggctccaattccatagcttcctccgaaggaaacaacttccaaaaacccatggtgccgtccgtgaagaagaccacatcagagtttgctgctccggctccagtagcacctatcaagaagcctgagtcactttccaagcagaaacccactgctgcgagctctgaatcctccaaggaactgggtgcggccagcagctccgctgaaaaagagaaaaccaagactggtgggttaatggttcagctgt

SEQ ID NO: 40427 - DNA, 1856 bp, DROSOPHILA
cgggcatctctgaacatcaggtgttattaacaagcaaagtttttattggaattcgtcgtttatgatatgatgccgaatcatggacacaccggagatccacgtaaatataagctcgcagacttgccgcgtctgcctggagacgcacgagaccaatctgtatgtccacgatgaaatcaaatacaacgaccttaagttggagctctggcagttgttggaggcagtttccaaattgaagtggacatggacggacccaaatctgcctatgcatctgtgtcaaaattgcgcccgccggctgatcggcgcctatgagttcatcgtcgaagtggaaaacgcccatgaaactttacagaatctcttcgagcaacaggaagttgctgccaagccggatgaagttcatgtggatgtcgtggagcttatagaccaagacgatgtggtcagtatggcacaatacctgtccacgtcttttgccgaacagcacgtggaaatggaggagaagtatggagaccaagactgttcagcttttacttcagatgtgggcgaagagccactctatgcgagcgaggatcgtgatgatgagcctgaagactcctttcagctgaagcctcggccagatgaaatagaaaacagagaattgtcgcgaccttcccagctgggcagtcgtttgaaccattcggcgaacttcatctacaagtgcgccgtctgtccgcgtgtctttgccaaaagtgaatctctgactcgtcatttttcccaagcccacaaactgacagcggacgtggccgccatgaagctggccaacgagagctgcggcaccggtctgctaacctgtgagcactgtccgcggacattcaagcgtcaggacacactccggcgacacatgcaggcattccatcccgacgcaatcgcattggaacccgaagaaacgacggacaattccgcccgaaaacgcatagctaagcggcgagactgtccgcactgtggcctgagctttcccgtatctagccttaccatccacattcggcgacatacgggcgataatccgtacaagtgcgatcaatgcgagaaggcctttccgcgcagccaagatcttagtcttcacatgcgtcagcacaccggcgagcgtcccagtgagtgcaagatctgctccaagaagtttatttcgcagaacaagctggcgcgacacatgcgattgcacacgggtcaaaggccgtactcctgcaaaatgtgcagcaagagctttgtgcagtccaacgaccttaagatccatatgcggcgccacacgggcgagcgaccatatcagtgtggagtgtgcggcgagagctttgtgtgcggttcgcacctgaatatccatcgtaaccgaaagggacatctgattgctgtgattccgggcaatgaagtagaggcaaattttgctgctgatccttatgtaaatgctagggtcaaccagcgccgttcggaggatatagagcgtatgcgcctgcaacgcattcccgaaaaccaattgcaacagagactggaaaatctccccaaaccggatgtcccggctatgtgctacaaatgcggtgtctgcgaacagaaattcaaaagtggagctctcctgaccgtccatcgcaataaaatgagccattatgagatcgaaagggtctacgaaaatccgttcggaaaaaatcagaaaatcatcaaagccgaatataattaaaatgtattactagctaaagaaatcatcactaatatagaatgtagaatgaacccatgtatattagatactaattgtatcgtaagactttcaaaagtctacaaaacattaaatgacaagttgactttaaatttcaaataaataatttattttttctataagc

SEQ ID NO: 40428 - protein, 538 aa, DROSOPHILA
MDTPEIHVNISSQTCRVCLETHETNLYVHDEIKYNDLKLELWQLLEAVSKLKWTWTDPNLPMHLCQNCARRLIGAYEFIVEVENAHETLQNLFEQQEVAAKPDEVHVDVVELIDQDDVVSMAQYLSTSFAEQHVEMEEKYGDQDCSAFTSDVGEEPLYASEDRDDEPEDSFQLKPRPDEIENRELSRPSQLGSRLNHSANFIYKCAVCPRVFAKSESLTRHFSQAHKLTADVAAMKLANESCGTGLLTCEHCPRTFKRQDTLRRHMQAFHPDAIALEPEETTDNSARKRIAKRRDCPHCGLSFPVSSLTIHIRRHTGDNPYKCDQCEKAFPRSQDLSLHMRQHTGERPSECKICSKKFISQNKLARHMRLHTGQRPYSCKMCSKSFVQSNDLKIHMRRHTGERPYQCGVCGESFVCGSHLNIHRNRKGHLIAVIPGNEVEANFAADPYVNARVNQRRSEDIERMRLQRIPENQLQQRLENLPKPDVPAMCYKCGVCEQKFKSGALLTVHRNKMSHYEIERVYENPFGKNQKIIKAEYN

SEQ ID NO: 40429 - DNA, 2948 bp, DROSOPHILA
cacgtgatggtcatattgaatccttatgctacttgctacttgaattcacaaactatgttttaccattttcagtccgacgtggatcgcgtgctcatctatgtgacgctctacataacagagtgcctcaagaagctcaatcgctccacgagcaaggcccagggacagcaggacatgtacagcctggccatctccaagttcgacattcccggcgatgctggcttcccattgaacgccgtctatgccaagccgcaaacggcccaggatgcggatctgatgcgccagtacctgctgcagctgcgccacgaaaccggcaaccgggtactggagaaggtcttcaacaccgaggatggcaagcccaataaatggtggacctgcttcgcgaagaaaaagttcatggagaagagtctggctggacctggacaataaacagctatccacaatatctggtatcttgttttgcttctacgacgggtaaaaatacccttcaattaagttttactcgcagcgtggtcctaatttgcagtatcactgccaacgtgtcacaattaattaaattcattaaccactaaataaattatttgaatttgtaagcctttctgttttaattaatttatgtaaattctttttacaaaattaacgtggataaaactgcaagtaactttcataaataatatctgtttctaataactgaccagcaaatggaagttattgcctataatttgtgtaatcaaaatcggaatagtaaagtattaactaagtttcatttatttgtagtcgctccgtcattggaaaaaatgctttctattggcctgttaattaaataaactttgtcatctgtcgaatacaacgtggaactctttgaatataaataatttatatttattaggccagttgagtaattaaaaaaaatacaactgactttcgcttaagacgaagccacagcaacgatctttaattggaaaatcgttctaaacaaggaattctaggggtacaagcaactttaacgatagagatggtcggcctgcaagttagaggcaatctcggactcccacttgtcgccgttgcagagaagcttctccttgttgtacagcagctcctcgtgcgtctccgtggagaactcgaagttgggtccctcgacgatggcgtccacgggacaggcttcctacgcggggggacaaaaagatgcaattagtttctagtaaattgtggcgccactttgctcctcctcacctgacagaatccgcagtagatgcacttggtcatgtcgatatcgtagcgtgtggtacgtctgctgccatccgcgcgctcctccgcttcgatggtgatcgcctgtgcggggcaaatagcctcgcatagcttgcaagcgatgcagcgctcctctccactgggataacgacgaagggcatgttctccgcggaatcgcgggctcagtggtcccttttcaaagggatagttgatagtggccggttccttgaagatgtgcgccagggtgacggcaaatccacgtaagagttcaccgaagaacatggtggatgcagcacggtccgtgatgtcggcaaactccatgctcagttccttgttgtttacatacacatagcccttgggaacctcgacgatatctttgggttctgctcgctgggcggccagcagccgggctccatggctgccaaacaggcgctgtcctgtggggagaacattttaccattaaataacatgcttaagtcgaaaagttatactgaattaagcgagtttagacttttgttttggtatgacataagcttacataacctcactcgccgcgatttccacgaaaatgggaaatttcccggaaaacaacggatgtgaggggatgggtcgccacctaccgttgcgcgatgcggtgaaaattcgcatagttagcgacatttttgcgaccaaattaaactaaaattgccaaagaagttgttttgctattgaatttgcccgaacaaattagagctgggtttctttcgattacccacataaattcaatgctcaaatatcgtattcaaatatatcgtagtttcttaatgacataaaccaaaaataaaatatgagatataaaatataaataatgtaacaaagaattaaatattcgtgtaaaaataataaataatattaacaaataatccagaaagactgtgagaaaaaaaagaaaacattttttttatacgaatacccctaataaaaaccttaaagcttcgataatggcactatcgatataaattcgcacttttacacttttcaacattgactttgaaaatccccaccactacaatttacagtttaacttttcccgctacgcggaattgtgaaatttttcattgtttatgtcggaaaatggatcaggaggttatggatttctttgacttctcgaaggagttgaagcgcgtggccgccgccccgcaaggctacatcagcagcgatccgaggctaatggccacgaagttcaaatcatccgaagtgcccaaccgcgagttgatcggcaccgactatgtcagcaaaatcgtcgccaaggaaaagtgtctcctgaacggggtgagaactggaagcttgcgtcagcacttctgtttgtttatgtgtaattcgatccagacgctgctcaacgaacagcctcaaggcaaacgcattcgaacgctggacgatttggacaccgacgatgagggggaagagaccgaaattcgccgggatgacgagtactacaagaagttcagattcaatctgaatcgcgacaagaacttgtccatctacgccaagcgcgaggaaatattggcggccatcaatgctcatccggtagtcattattaagggcgaaacaggatgtggcaagaccacgcaggtgagcaaaacttaaataaaatcctaacttttttattaagtctatattttaataaagccaacgcaagcgaattataattaaaccttttatcc

SEQ ID NO: 40430 - DNA, 697 bp, DROSOPHILA
aaaacaacttctttggcaattttagtttaatttggtcgcaaaaatgtcgctaactatgcgaattttcaccgcatcgcgcaacggacagcgcctgtttggcagccatggagcccggctgctggccgcccagcgagcagaacccaaagatatcgtcgaggttcccaagggctatgtgtatgtaaacaacaaggaactgagcatggagtttgccgacatcacggaccgtgctgcatccaccatgttcttcggtgaactcttacgtggatttgccgtcaccctggcgcacatcttcaaggaaccggccactatcaactatccctttgaaaagggaccactgagcccgcgattccgcggagaacatgcccttcgtcgttatcccagtggagaggagcgctgcatcgcttgcaagctatgcgaggctatttgccccgcacaggcgatcaccatcgaagcggaggagcgcgcggatggcagcagacgtaccacacgctacgatatcgacatgaccaagtgcatctactgcggattctgtcaggaagcctgtcccgtggacgccatcgtcgagggacccaacttcgagttctccacggagacgcacgaggagctgctgtacaacaaggagaagcttctctgcaacggcgacaagtgggagtccgagattgcctctaacttgcaggccgaccatctctatcgttaa

SEQ ID NO: 40431 - protein, 217 aa, DROSOPHILA
MSLTMRIFTASRNGQRLFGSHGARLLAAQRAEPKDIVEVPKGYVYVNNKELSMEFADITDRAASTMFFGELLRGFAVTLAHIFKEPATINYPFEKGPLSPRFRGEHALRRYPSGEERCIACKLCEAICPAQAITIEAEERADGSRRTTRYDIDMTKCIYCGFCQEACPVDAIVEGPNFEFSTETHEELLYNKEKLLCNGDKWESEIASNLQADHLYR

SEQ ID NO: 40432 - DNA, 6287 bp, DROSOPHILA
ctcacctatcacccaaactggaagatcgcccaactccttttgcaaagtgcctgcgaactctgtgtagaaacctggcaaaccgggattgccagttatgcagatgacgatctccttctcggttatggtctcctcaatccacctgccccatgtgaatatgtgggtgggaatggagttgatgttgacgtaggcctcctgcatattttccgctgctgttggcgtggcaaactgcgctgaaaatcaatcggcacctgtgttgatcccactcttttcacacgcgatgagttgtctaatccccgtggcaaccggttttcctttgtccaaccacctcggctgcagcctttcacgagtttcaaatcttgaggattggcgcggtttatccccagggttgatagctctgataaacactgctatgtgtttcggccaattgtttccagcaagaatggacaaaggtcacaagttcagcggcttaaaaacggctgatacagaaaccagggcggcaagctatgccaaaatcagatgttctatattagcggatacttaccatgataacgattgctcagacagagaaaaagtgtagataattttgtttaaaaaagaaaaaaaccaaaatgcattaactttaaaaaaaatactatggcgtaaattattatttgtcaacctattgatatctctttacagtactagaagcttttataaatttcatattaacttttacctatcatcattaaatattcgaaagtactccctaacattagttacctacgtatacattttttattaaccaaaacttatatgtaaaatcgcaaattgtttcttttttcggaaaaaattgagaaaacattttgatattcgtgttcagcataagttctagagaattatccgatcttaaggtttttcaaagcggatcttaaaagtccgcaagcgatgcagccctagcttaagcccattgtcagggctgccaacgtgggcaatgtggccctatcccaaccagttggcatcgccaccattatttattggttttttgttgctggtttttgagtttttatattttttttctagaaggcctaaaatttatagagcgttgtaggtaacaggattcaggattagacttagattctgaaggcacacccatcgaaagcttgacgaggcatgaaccgagcaattggaatcgggagcaagtggacacaaaagaatgtagctaacaattggggacattctcgaaaattcttgtagcaccaacaagtaaattattatacccagaacaaccgaaggagctattgggcggatccagagcaatggcatctggcaaagagctctattgctggggaagcacgtcacatggtcaattgggacttggcggaatcgaggacgagcaggtagatagatgactttcggatataagcccactgatattacttttgtatgccattgatttcctcacagatcctcacacctagtcagataccctggacaccggacactgctgtacagcaggtcgcctgtggacaccgacacactctctttctgaccgccactggaaaagtctacgcttgcgggagcaacgactactcccagctgggccacgatctgcccaccaaaaggccacgtatgtcgccatttcgtatgtaatcttcatttatcgtcttgtctgtccactctccactaactccacctcatctccatactcaccaactacgcgagccactgctgtgaaccgagtctaaaccccgcaatcatcttccggccgactttttgcagtgcttatccccgaactgcaggattacgtgatcatccagatctgctgcggcagccgccactcattggcgctctccgattggggccaggtcttaagctggggcgacaacgactgcggccagctgggccatgccaccgataaggagatcgtgcagctgcccaaggttgtgcggcaactggtcacaaagacggtggtgcagatcgcctgcggcaacaatcacagcttggcactgaccagttgtaagtatggagtgaaatttaatggattccattcactagatacacagatacacatcagaactacttgaaacaagataagataattgtatttcccaagtttagggcattactaaacaattcttatctaaagctaaacaacgataccttccgactaacatcatccttgacgtttctaggtggcgagctgtattcatggggttccaacatctacggtcagctgggcgtgaactcccccaatgatttgacacattgcaactatcccctccgactaaccactctgctgggaattccgctggccgcaattgcctgtggaggcaatcactcgttcctcatctccaagtccggtgcggtgttcggatggggcagaaacaactgcgggcaactgggactgaatgacgaaacgaaccgctcgtatcccacccagctgaaaacgctgcgcaccctgggcgtgcgatttgtggcctgcggcgatgagttctccgtttttctgaccaacgagggaggggtgttcacctgtggagctggcgcctatgggcagttgggtcatggctttagctcgaatgagatgctaccgcgaatggtaatggagctaatgggcagcaccatcactcaggtggcctgtggcaatcggcacactctggcgcttgttccatcgcgcggcagagtttatgcctttggcttgggtagctctgggcagctgggcacgaggagtaccaagagcctgatgctgccgcaggtggtcatcggtccttgggtgtcgcccagcggatcagccctgttgcaatccaatgattcacaggtctcgttggtcatccgacagattttctcaggtggcgatcagtcgattgtgaccacaactttgtttgtagacaaggtgccgcccgaggatttcagaaactacaagtaactatagaagcgtgttactttagtataaacatataaaactataaacatatatctactttgcagccccaaatcccagatcctaaccctaacagcagaagtcaccaagcagtgtgctcaatgcaagcagggccttcaaagcgacatggatctactgagctctattgaactaatatttagaagccaggcgtgttggaatggttcctttctgctggatcacgaccgacactttggatgctcggttcgcaaccatggactggatctgaaagcagcccaactagcattcgacaatctgcgcgctgtggaaaatgaaagcattaggcaggtggtaagttttcgccattacaagcatcattggtatctgttttaatcatttcattgttttcagatctgggacaatataaccaaggagctagttggttcgctggtttgctcaccggcagatgtggagagcatgcgattatatcttctgctcccactttaccacgagttcgtcaactccaagcactacaagtcactgcaggttccgtttgccaatgccatatttaagctagcagagaacccacggaaagtgctgaacaagtggttggcccaaacaccggctgaatacttcgagcatcttgtccagaacttcttgcatgttgtcatccatattataagtttcaaaatgggcttggctgccgctagtcccagcgccgaaagacgtcaacaggtatttagatttcaatatagggccataccagtgtcaattaattctctattcataatctagctgctgccatataacactgaactcgagatcattctaaagctgatgaaaacgctctgccaaattaacaacgagcgccatgatcgcctaaactatcaaatcttttactggcctgatctttcggattatgcagacgtgcagcaggagtacgttaaatggatcatggccgacactgccagagatttcaatatttgcaactattcattcattttcgaccagtctgctaaaacagcgttactccaagcggatcaggcgctccagatgcactccgccatggccaatgcggctaccatggtgggttaatgacgccgaacagaaatgatttatgagttaataactacttttttatccagcaggcattctcctttttcaactacgggatgcccatctcgcagttcattgtgctcaacgtgacgcgtgagaatctggtgcaggattcccttcgagagttgcagcattattcgcagagtgatcttaagaagccgctgaaaatcaagttccatggcgaggaggcggaggacgcgggtggcgtgcgcaaggagttcttcatgttgctgctcaaggatctgctcgatcccaagtacggtatgtttaaggagtacgagcagtcgcgtctgctctggtttgcagatctcaccttcgagacggaaaacatgtacttcctaattggcgttctctgcggtctggccatctataacttcaccatcatcaacttgccattcccactggctctgttcaaaaagctgctgggcaagccagtggatctcagtgatctccgtcagctttcccctccggaggccaactccatgcaatcgctgctcgactaccagggcgacgattttaaggaagtcttcgatctgacctttgagatatcgcgggatgtattcggggaggcggagacgaagtgccttaagcccaacggcaatgagatagccgtaacactggaaaacaggtgagtgtagtgaccatttctgttgcggcacctgtgctaactattatccaacttcaggcaggagtttgtggatctctatgttgacttcgtattcaacaagtccgtcgagctgcactacaatgcgtttcacaagggctttatgaaggtgtgctctggccgcgtgattcacatattccagccggaggagctgatggccgtggtggtgggaaatgaggattacgactggcaggcgcttcaagacaactgcgagtaccgggagggctacacttcggtcgatgatacagtgagttgtaaactaaagatggtcttcctagacattaaccttgtatctgccgcagatcaaatggttctgggaggttattcatgacatgtccgaggcggaaaagaagagttttctcctctttttaactggcagcgatcgcattcccatccagggcatgaaagcccttaaagtgagttcttagattatacctatattgcaaagtgtgtcctttaccgtatccgtaccgatttagctcaccattcaacccaccccggacgaacgattcctgcccgtggcgcacacgtgcttcaatctgctggatctgccgcgctacaagaccaaggagcgcctcaagtacaagctgctacaggccatccagcagacgcagggcttcagcctggtctgatcgatctgatctggacccatttttttacatcgacctcaaactacaggtattttccgaaatcttcggatttcgcgcattttggattgaagaatgaaaattggctactttcaaagacaaccccaacgtggaacactcatttatcagcgatcaaatcagcaagtacaatgtcgtgttatagctttaaactctagactagttattaatatcgcattgttatggagagaaaggaattcaaggaggtaaataaggttggtgcatcagtctgaggacaacaacaaatgtctaaatttccgtgtaacttttaccaataaagttatataatatggcttatatattgttattttcattgatcgcagtaacggttaagctttaaacccgataacgatagcttcgcttctgtccggaaacgagccgcgttggcagcaccgttggcgcacagctgagcccgaaatgtggcggcaaatcgaagtcgtcgaagtcagttcaacttcaactttggcaaggtgcgcggccgcgtgcggatttcgttcgttaatttcttcattcgccgccgagaactttttcggacgctcatttgcatgcgctgggcgtgcggtgcttgacattaaccaaccgaccgatttcgaaaactgcgcgcatatatgccgtcctagccccgcttcttcaaattatccaccaacaccaattcgcttacaacaaacgttgtccaaacgtcacctttaccgggtcaagctaacggtacccgcatcggaaaagaaattcaaacaggtagagcactgcgaccacaaaaaagtaacgacttcgggcgacagtttgtgaaattatgggtacttaggcccccagtttgcaattacatgtgtgccatcctggtcgcttgtccatctcaaacttcttaattcgctttatatgccgcgaacgaggcgagctggcctacaaaatcaattaccatcgcaacttttgcatatcctgacagctaacaaatgtccgggccacaaaatcc

SEQ ID NO: 40433 - DNA, 3403 bp, DROSOPHILA
ccaccattatttattggttttttgttgctggtttttgagtttttatattttttttctagaaggcctaaaatttatagagcgttgtaggtaacaggattcaggattagacttagattctgaaggcacacccatcgaaagcttgacgaggcatgaaccgagcaattggaatcgggagcaagtggacacaaaagaataacaaccgaaggagctattgggcggatccagagcaatggcatctggcaaagagctctattgctggggaagcacgtcacatggtcaattgggacttggcggaatcgaggacgagcagatcctcacacctagtcagataccctggacaccggacactgctgtacagcaggtcgcctgtggacaccgacacactctctttctgaccgccactggaaaagtctacgcttgcgggagcaacgactactcccagctgggccacgatctgcccaccaaaaggccactgcttatccccgaactgcaggattacgtgatcatccagatctgctgcggcagccgccactcattggcgctctccgattggggccaggtcttaagctggggcgacaacgactgcggccagctgggccatgccaccgataaggagatcgtgcagctgcccaaggttgtgcggcaactggtcacaaagacggtggtgcagatcgcctgcggcaacaatcacagcttggcactgaccagttgtggcgagctgtattcatggggttccaacatctacggtcagctgggcgtgaactcccccaatgatttgacacattgcaactatcccctccgactaaccactctgctgggaattccgctggccgcaattgcctgtggaggcaatcactcgttcctcatctccaagtccggtgcggtgttcggatggggcagaaacaactgcgggcaactgggactgaatgacgaaacgaaccgctcgtatcccacccagctgaaaacgctgcgcaccctgggcgtgcgatttgtggcctgcggcgatgagttctccgtttttctgaccaacgagggaggggtgttcacctgtggagctggcgcctatgggcagttgggtcatggctttagctcgaatgagatgctaccgcgaatggtaatggagctaatgggcagcaccatcactcaggtggcctgtggcaatcggcacactctggcgcttgttccatcgcgcggcagagtttatgcctttggcttgggtagctctgggcagctgggcacgaggagtaccaagagcctgatgctgccgcaggtggtcatcggtccttgggtgtcgcccagcggatcagccctgttgcaatccaatgattcacaggtctcgttggtcatccgacagattttctcaggtggcgatcagtcgattgtgaccacaactttgtttgtagacaaggtgccgcccgaggatttcagaaactacaaccccaaatcccagatcctaaccctaacagcagaagtcaccaagcagtgtgctcaatgcaagcagggccttcaaagcgacatggatctactgagctctattgaactaatatttagaagccaggcgtgttggaatggttcctttctgctggatcacgaccgacactttggatgctcggttcgcaaccatggactggatctgaaagcagcccaactagcattcgacaatctgcgcgctgtggaaaatgaaagcattaggcaggtgatctgggacaatataaccaaggagctagttggttcgctggtttgctcaccggcagatgtggagagcatgcgattatatcttctgctcccactttaccacgagttcgtcaactccaagcactacaagtcactgcaggttccgtttgccaatgccatatttaagctagcagagaacccacggaaagtgctgaacaagtggttggcccaaacaccggctgaatacttcgagcatcttgtccagaacttcttgcatgttgtcatccatattataagtttcaaaatgggcttggctgccgctagtcccagcgccgaaagacgtcaacagctgctgccatataacactgaactcgagatcattctaaagctgatgaaaacgctctgccaaattaacaacgagcgccatgatcgcctaaactatcaaatcttttactggcctgatctttcggattatgcagacgtgcagcaggagtacgttaaatggatcatggccgacactgccagagatttcaatatttgcaactattcattcattttcgaccagtctgctaaaacagcgttactccaagcggatcaggcgctccagatgcactccgccatggccaatgcggctaccatggcattctcctttttcaactacgggatgcccatctcgcagttcattgtgctcaacgtgacgcgtgagaatctggtgcaggattcccttcgagagttgcagcattattcgcagagtgatcttaagaagccgctgaaaatcaagttccatggcgaggaggcggaggacgcgggtggcgtgcgcaaggagttcttcatgttgctgctcaaggatctgctcgatcccaagtacggtatgtttaaggagtacgagcagtcgcgtctgctctggtttgcagatctcaccttcgagacggaaaacatgtacttcctaattggcgttctctgcggtctggccatctataacttcaccatcatcaacttgccattcccactggctctgttcaaaaagctgctgggcaagccagtggatctcagtgatctccgtcagctttcccctccggaggccaactccatgcaatcgctgctcgactaccagggcgacgattttaaggaagtcttcgatctgacctttgagatatcgcgggatgtattcggggaggcggagacgaagtgccttaagcccaacggcaatgagatagccgtaacactggaaaacaggcaggagtttgtggatctctatgttgacttcgtattcaacaagtccgtcgagctgcactacaatgcgtttcacaagggctttatgaaggtgtgctctggccgcgtgattcacatattccagccggaggagctgatggccgtggtggtgggaaatgaggattacgactggcaggcgcttcaagacaactgcgagtaccgggagggctacacttcggtcgatgatacaatcaaatggttctgggaggttattcatgacatgtccgaggcggaaaagaagagttttctcctctttttaactggcagcgatcgcattcccatccagggcatgaaagcccttaaactcaccattcaacccaccccggacgaacgattcctgcccgtggcgcacacgtgcttcaatctgctggatctgccgcgctacaagaccaaggagcgcctcaagtacaagctgctacaggccatccagcagacgcagggcttcagcctggtctga

SEQ ID NO: 40434 - protein, 1057 aa, DROSOPHILA; identical to SEQ ID NO: 27099

SEQ ID NO: 40435 - DNA, 4399 bp, DROSOPHILA
cagcaagttgatgagctggacgccgggcaccagttgcaattaacgcaggtgcaggagcaactggaggaagcgcaaaagatgcaagcaaacgtctctcagcataccactgcatccgccgcgagcgtggacaccagtccagagcaggcaaagatcgattacttgcttatggaccacgaaacaggcttggatggccacgctggagacgtctctctggcccaactggctgctcagcgaaagatatctactgcctcgagacgttcccacgacttcatgccgcttgacgagctgctcaacacatcaatgaaccaaataaccagcgataccgtgactaccatctctaatttcggacgcagcgtttcgcagcaggaggacgaggaagcggaaatggccgcacggggagacttttccgtccaaagtgcccagcttcaggccacaaaagaacgcctaagcatccaggaaagtcgtgtcaagcacttgactgccctgttggccgaaaacgaacaggatttggctaaactgacccaaatgaacgacatgctcaaggaagaattgcgccgccaagagcgctccgaggaacgtgaacaacacatgcacaactccgagtacttgaagaacgtcttcttaaaggtgagatcaggaacgcaataactatatccacgggcttaatctatttactttataaacttgcagttccttacgttaaacaatgtcgatgagcggcagcgcttggttcccgtgctaaataccattctccgcctgagtcgcaacgaaatggaaatgctgaactgtgtggccaagggacagaaaggtaactactagcagaaaaatttaaattttagtatggtttcttgtattaagatattgcttttagtttctgcagatggtagcagtcgcagctggacgggattcctcactgcgtggagtggaggaggcagtcccaataataacaactagcgaacatcataggatatataatatataaatattcgtcttgttggatgcggatagtcgtcagtcgttgggcagttgcatagcattcattctgtaaatcttgtacaatttcccttttatatataatgtattttaaaattgctcgttgctgtttggcacatcgtactttgtacactcttgtaatttgtccacacccgttgtgttgagtgccctatacagcaccaccggcaatatgcgcgttgtagattgaagaaagcctttgcatatatttaaaaacaatgtttttcaatggtttgtttaatttgaaattctattaccatatagatcagactataaatcagatgcattgtctataaattagtattccattatttgtattgtatgtactatatataaataggatcggtatttatgcttacatttacacttttaaacggtgtatattgtttacacacaatataaaatatcattaacataaatcttacataaatttcattaaaaccaaaagtgagtaatcaagttaaataaaaattctgtcttggcggaatacatatgcaggtgaacgatttgaatcgaaatgcgccaaaagattaaagatcacaagtcgaataactacttaaatactaatcagtattgtgagcccggatcggatcctatgccaatctattgccaaacgcccgcatagttgcccaccaaagtcgccggcagtggtcctcctgcagcgaagaggcgcatcctagtgctgtcatagcagtgggtgtagatggcgggcacatacttcacctgctggaagccatccatctcatcctccggatactgaaatgtacaaaacagttaggtgaattggtgtattttgtggaactgtaacctcttcacttaccacaattcctttgctgcacttgagtgcgactgtgcgcgaggcattcacactgctctccaaatactttccggctcgaatgtcgtagaataggagcatgcccagacccgtgccaacggtgagcaggttaccttcgaacgaagtcgcccgtataccgcagccactgtatcgagatgtgatcttcttaatggtttgaagggttcgggcgtccaaaaggatggtataggaacggcatccaacggcataaaggccgtcgctgtggtaggcgatgctcacgttgtcctggcagtttggcagctttcgtgagagtgtctgcttgaaggtctccgcattgaagatgtgaatgtatccgttcagcgagagggcggcgatctccttaaactccttgttgaagcaaagagatcgaatctgtaaaagatcttattgataaaatggttctttgatttgatttgcattcataagctcaccctctgggcagtgcgaacttccttgacactaagggggtggatggttgcgaatgtgggacacgcttcctcgccgccatctggaaactccatgtgatcctcgttgatgcgccacagagccatgcgcgagtccttcgatccggacacaagaaactggtcatccagccagcacatgcccattataaggtcgcggtgcccaccctcgcccacacagacgggatccagcgtaggcagtcggtaaacagcaatatcggaggagttgcgcgcaccggtggctaggaaggatcggctgggcgacagctcgatggcatgcaggccaccctggacctcaggatggtttgcccggctatttgagagcgttgggatggcgtccacccggcgcatgttcacatcgtagacgagcagtttattgcacttggtcccgaaaaccacttgtcgactgctcagccacttggagcagaagaccttgttgatgtagcccagactaatctgcgtctcgcgcagcatgtcgtgggttagcacatagcggctggtgtactccacattgacactgcgacgctgcagaggatggtgggacaaagttcacgttagcaatgcaagtggtgcgacttcacaacatatacccacatctcggagtccactctcccggctgcgcaggtagtcgcacaggttgtaggatgtgttcaggacctcctcctgctgttggggcgtctcctcgtcgctgccggaatcctcgtaagtaacaaagtcgtctggtttgtccggttttcgtctacgctcctgtcgcatcgcccgctgcttggccctgcgctcctccagccgcgaggatacgtggcaggacggataggtgcccacgacgctgtcgcggatggttctcaccatcccgttgaacatcttaaggtaattgtttaatccgatttgttgtcttttgctttacgggttatcatccgcaaacaaaaatggtggtgcgtagactacagtggaactactggttcggaactgaagtttgctgaaccgattgttttgcatttaatgcagagatacaaattaagggaaataaaaatacaagtgttgacatttttctatttggcacaatactcggccgctctggttacctgaatatatatatatatataataatatatatataatatacagtatttatataaagtcggatgtcgcacaaatgcgttacactatcgttcatccctaacgataggccatcgctttcacaaagggttttatctattctcacgaaatcagctgttgcgattgaagtggtgactttgtttgtaaataaaatgaactacaacgccaagcgagtaatgcgacagaactcggtttgcgtgggttccaacgacatggcagcgtcgccgataatgattggacctgccccgccctcggcgcccagcacgccgcaactgcagaccaccgaggacatcaagccactgcttgtgcagcgccaagtgattctgctgcaaagtggaagcataccgacgaatccctcgccacagcagatcaacctagctggacataatgtagccggtggtgccagcgggagcaacgttgccaacgttctcattccggatgatgcacctgtctcactgctcacagagattgcggatatcatgcgaagcttcggcgacagcgatcagcccaggacgggaagtgtcaagctggtggagcagatcctgcagcagcagctgcgcggcatcttcaatgaggcttcgctggtggccatgcggcggaaacagaatccctgcccgtcgcaggcggactttgagttcctgatgcgcaaccatccggtgaagatagctcggatgcgaaagcacctcaaggatatgcgcatactcaaaaggttccttagtatccgcacgggaaggccgcaggacttcatggacgacttggagcagcaggaggaggacgaggagctggccatcgatgtgtacgagctacacgacgaggaccgaatgcgaagattattccgcgcagatcggatatcgcagatccttacgggccagcaatacctggagttcaatgaggcgcgcaagacgtcattctactgccgccatggggagaagatcaagaacaagttccgccgctttct

SEQ ID NO: 40436 - DNA, 2183 bp, DROSOPHILA
agcggccgagtattgtgccaaatagaaaaatgtcaacacttgtatttttatttcccttaatttgtatctctgcattaaatgcaaaacaatcggttcagcaaacttcagttccgaaccagtagttccactgtagtctacgcaccaccatttttgtttgcggatgataacccgtaaagcaaaagacaacaaatcggattaaacaattaccttaagatgttcaacgggatggtgagaaccatccgcgacagcgtcgtgggcacctatccgtcctgccacgtatcctcgcggctggaggagcgcagggccaagcagcgggcgatgcgacaggagcgtagacgaaaaccggacaaaccagacgactttgttacttacgaggattccggcagcgacgaggagacgccccaacagcaggaggaggtcctgaacacatcctacaacctgtgcgactacctgcgcagccgggagagtggactccgagatcgtcgcagtgtcaatgtggagtacaccagccgctatgtgctaacccacgacatgctgcgcgagacgcagattagtctgggctacatcaacaaggtcttctgctccaagtggctgagcagtcgacaagtggttttcgggaccaagtgcaataaactgctcgtctacgatgtgaacatgcgccgggtggacgccatcccaacgctctcaaatagccgggcaaaccatcctgaggtccagggtggcctgcatgccatcgagctgtcgcccagccgatccttcctagccaccggtgcgcgcaactcctccgatattgctgtttaccgactgcctacgctggatcccgtctgtgtgggcgagggtgggcaccgcgaccttataatgggcatgtgctggctggatgaccagtttcttgtgtccggatcgaaggactcgcgcatggctctgtggcgcatcaacgaggatcacatggagtttccagatggcggcgaggaagcgtgtcccacattcgcaaccatccacccccttagtgtcaaggaagttcgcactgcccagagggagtttaaggagatcgccgccctctcgctgaacggatacattcacatcttcaatgcggagaccttcaagcagacactctcacgaaagctgccaaactgccaggacaacgtgagcatcgcctaccacagcgacggcctttatgccgttggatgccgttcctataccatccttttggacgcccgaacccttcaaaccattaagaagatcacatctcgatacagtggctgcggtatacgggcgacttcgttcgaaggtaacctgctcaccgttggcacgggtctgggcatgctcctattctacgacattcgagccggaaagtatttggagagcagtgtgaatgcctcgcgcacagtcgcactcaagtgcagcaaaggaattgtgtatccggaggatgagatggatggcttccagcaggtgaagtatgtgcccgccatctacacccactgctatgacagcactaggatgcgcctcttcgctgcaggaggaccactgccggcgactttggtgggcaactatgcgggcgtttggcaatagattggcataggatccgatccgggctcacaatactgattagtatttaagtagttattcgacttgtgatctttaatcttttggcgcatttcgattcaaatcgttcacctgcatatgtattccgccaagacagaatttttatttaacttgattactcacttttggttttaatgaaatttatgtaagatttatgttaatgatattttatattgtgtgtaaacaatatacaccgtttaaaagtgtaaatgtaagcataaataccgatcctatttatatatagtacatacaatacaaataatggaatactaatttatagacaatgcatctgatttatagtctgatctatatggtaatagaatttcaaattaaacaaaccattgaaaaacattgtttttaaatatatgcaaaggctttcttcaatctacaacgcgcatattgccggtggtgctgtatagggcactcaacacaacgggtgtggacaaattacaagagtgtacaaagtacgatgtgccaaacagcaacgagcaattttaaaatacattatatataaaagggaaattgtacaagatttacagaatgaatgctatgcaactgcccaacgactgacgactatccgc

SEQ ID NO: 40437 - protein, 451 aa, DROSOPHILA
MFNGMVRTIRDSVVGTYPSCHVSSRLEERRAKQRAMRQERRRKPDKPDDFVTYEDSGSDEETPQQQEEVLNTSYNLCDYLRSRESGLRDRRSVNVEYTSRYVLTHDMLRETQISLGYINKVFCSKWLSSRQVVFGTKCNKLLVYDVNMRRVDAIPTLSNSRANHPEVQGGLHAIELSPSRSFLATGARNSSDIAVYRLPTLDPVCVGEGGHRDLIMGMCWLDDQFLVSGSKDSRMALWRINEDHMEFPDGGEEACPTFATIHPLSVKEVRTAQREFKEIAALSLNGYIHIFNAETFKQTLSRKLPNCQDNVSIAYHSDGLYAVGCRSYTILLDARTLQTIKKITSRYSGCGIRATSFEGNLLTVGTGLGMLLFYDIRAGKYLESSVNASRTVALKCSKGIVYPEDEMDGFQQVKYVPAIYTHCYDSTRMRLFAAGGPLPATLVGNYAGVWQ

SEQ ID NO: 40438 - DNA, 2745 bp, DROSOPHILA
aaagccatacaatactttttaatcacgttatgatagttgaaaatttaaaattaaaattgattgattatacacatttcttggaatacctctaaagtttcaaaactaatgtactaggcatttcccaaaactgccagctaacgagaagataactgcaacaatttatatcggatagcatgggtttgcctgtgtgttgggtgagtgtgcgtgtgtatctgtgtgaactaatgaatattgcccaaacgagaagttgcatttacaacactcagaaaaaaacgcagccaacaagaacatttgtgtgtatatatttataaagcttatatctgctcgatagatcatgaaacattatctacagctgttgctacatcacacgcgcacacactcatccacctcctctcaaacatgaagtcataactggaaaatgcgattttgaaatgcacacatactgagataaagctaaaattttgacatttttacagaccagaagcttaaatcgaaaatatctgtgctaatatttcagctatgagacactgttagaaaatgagcaaaatgcaaaatgctaaaggttgagcctatgtagaacatttgtaaggggtctgcgccgtgtgcaggccacgcccatttgggcgtagatggaacccgccggcgggtcagaaacgaaaataaaaggcaaaatcgttttgaggtcacggaaaaatcaactttaagccgacgtgcaggcagtggaggcaaggagatcgagtggaatacaattaaattacaagcataatattatcaatgtaaaatcgtatgtaaaaaacaaggcagaaatccataaaaaaattgacaacaaacaaacaacaaaaaataaacaataaaaaaatacagaaactacgaaataaatacatttacatagatgttgcaaaaaccaagagattcgaagatcctcccatggattcccgtaaccctctctgtagatttgcgtattctgtcagtgagttagcacttccggatcagcgaccccatgtttctggacgccatcttctttataccgacactgttcacttacctgcttatcggactgctcatcgtcatcctgtgcttcgtggtggtctatatcagccacaagatctatgtctccgtctacgacaacctgcctctggccgccttgcccggcaactcacggcaacagctcctgggactgcgtcactccaatcatgcgatgaccatacgggaatacctggacagctcgctccgcagcccacgttccaatcagccgagcttacggtcagtttggattcagaaccggtcacagatcctggagacctcttcgggtaagatcagtgccagtgagacagttgctcggcctactcttcctcccggactctcttcctctagtgatgcgtatagtgctctccctggagccctgctacctggtcagcgccgagttcgatgttagttccagccggaaggccatcagtttcttgtgcaactgccgggatcagcccgtgtgtgctgcctctgaaccgaggccttctgggtccttgcatatagtgcggttctatgaccacctctccaagatcccgcgcctcaaagtcatgctcaagtgtaaccaaaggcggccggacccgaggccggacagtcgtatccagttgaccctcgacgacgtgatccaggaggccagagataaccaggatgccaggtgtacggataacgccgccgcctgccgacctggttcctcaaggcggaactcccggataccggattaaaggataggggggtatacgtcgtctgttctgggctgcttggtcgcggtataactagttttattaaattgtatacaaagatcaatgagctggaggctccagggtcgacggctggttcagtgggtcgggcactgagctcacgctagtttacgataatcgcgtgacaacgaaggtgaaagccagcggaacagaggcgcacacatgtgtgttcttatagggggtgttaattaagcttccttttttgggtaaatatatttaccagctactcgatctaggaaatttaaattttcagccctattttcccattaataaattccataacaatttcgattttccattccctatgtataaactgaattccgcatttaatgacctatttaagaaaacaaaacatactttgaattctttcaacgctgaacaaatcaaaagtttacagctcgttaggtaattttccacatacagaagtttgtcacgttacattaatatgtttggtgtttgatttaaaaaaggctgagtggggagtcttcaaaaatatatttataggactataaggtgatactttaatataagctccaagtttaatttctaacaattggattttcctactcccatggcacgcaaccttaacttgtggggttcgcgggtctttgggtcttatcattgtgactgtgaaattcgttatcagtagataaaaagcttttcaggccgagtcgatagcctggctatcatgcctaattgccgaaatcactacccccaaccagatctcgccacctccacgagacgagggaccccaagcatttgtttgacgccatttcattctttattgacgcggccaattaagaaggcagcgttgttgatttgattgcgaggcgaatatgaatgcgactggaattcctccatgagttctaaataaagctggagtccgaaaagttgccagatgtaaagagcggcggctctcagtcgctgggaactccaagaagtggaggcgattttctaatcttgg

SEQ ID NO: 40439 - DNA, 681 bp, DROSOPHILA
atgtttctggacgccatcttctttataccgacactgttcacttacctgcttatcggactgctcatcgtcatcctgtgcttcgtggtggtctatatcagccacaagatctatgtctccgtctacgacaacctgcctctggccgccttgcccggcaactcacggcaacagctcctgggactgcgtcactccaatcatgcgatgaccatacgggaatacctggacagctcgctccgcagcccacgttccaatcagccgagcttacggtcagtttggattcagaaccggtcacagatcctggagacctcttcggtgatgcgtatagtgctctccctggagccctgctacctggtcagcgccgagttcgatgttagttccagccggaaggccatcagtttcttgtgcaactgccgggatcagcccgtgtgtgctgcctctgaaccgaggccttctgggtccttgcatatagtgcggttctatgaccacctctccaagatcccgcgcctcaaagtcatgctcaagtgtaaccaaaggcggccggacccgaggccggacagtcgtatccagttgaccctcgacgacgtgatccaggaggccagagataaccaggatgccaggtgtacggataacgccgccgcctgccgacctggttcctcaaggcggaactcccggataccggattaa

SEQ ID NO: 40440 - protein, 226 aa, DROSOPHILA
MFLDAIFFIPTLFTYLLIGLLIVILCFVVVYISHKIYVSVYDNLPLAALPGNSRQQLLGLRHSNHAMTIREYLDSSLRSPRSNQPSLRSVWIQNRSQILETSSVMRIVLSLEPCYLVSAEFDVSSSRKAISFLCNCRDQPVCAASEPRPSGSLHIVRFYDHLSKIPRLKVMLKCNQRRPDPRPDSRIQLTLDDVIQEARDNQDARCTDNAAACRPGSSRRNSRIPD

SEQ ID NO: 40441 - DNA, 2354 bp, DROSOPHILA
ggccgaccacaatcgcgcccgggcagtggagctgtggggtcagcagctgcggctggagcagtcgccggcggaaaatccgctgtgccacaacagcctgccgcgtcagccgccggcaaaaagtagctggagtcccgactgcgaggatcgcctgacgctggagtgctccatcagtagtcccagcctgatgcgctcgtccaacgatgaaacctgctcggaattggccgatctcagcgagacctttgtggtcctggctgaaaatggttcgggggaggagagcttgtccccggcccagaccaccatcatcacagccagaaggtcgagtgcaccggccgtggtccagcaggcggacattgccaacgagaccgtcaccatcgagcgccatctagatgcccatgaataggggtcagcaccgagttctccagcaacagtttcttcaatcaacgtacttctactcatgtgttccataattaaacgaagaagggaaattcatgttttataactaataaatccattttaaataagttgattttgttattttattttcaactagctagttcaagagattcaaaggtataaaaattatagtgggtagaatccatttcgagggtgagcttaatgactgcataatactaaaacgtcacactcacttttcctcctttcgctccttcaaaataaacgcttttgcctcttgcataatttccgccagtaataactattaatgttagaactaataaacaacttcgtgatgtaagtgctctgcgccacgcaatcctgtcaaaacaaccaaaatgataggcagatgggcattgttcatgtcctgactgacatcctcgtcaattgccagcgacaactgggccaagcactcataaagtggcaaaataaaatgaacttgactttgagcttggaggttagccttttgctgatttcgatgaggtaacagtgcgaccgaatcgaatgtcagtaatttgactgaggttgcgagatgggtggttggagtgatctaggagctgtccggatagacggttcctatcaggcgcataccgttccatttccattcgtgggagacaatcgtggcggaggcatgacccaactggatgtggcagggttcctccttcgccgtggccaggaagcaggcggtgtacagggccatgtccagttcgggcgagatgcccacaaagaagccgttgactggcttattgatgttgtgaaacgtgtagcgaacgctgagaaccatttggttgtgctgaggaaatatagcaatccccttttgtaaggatcatctgttacatttgtctttaagccttacctttcccatttccttgtggttcagccagcccttgtagtccacattgccacgttgctcctgatctgcaaagtacagccagttatgcaagcccaggaccttctggtcccgaatctccgccatgaagacgtgctcgaaactggaactgcccacaatgccacgacctctggagtagggagtgaaccacagctcctgcagcagacgcagctgatcgtcatattctacgctcacaatatctagatggtattggataggtatactagtctgatttatttcatttaaaggttactcacccttgtgtaccaaaaaacgcatggtcagcttcatcacacgcgtacccatcacggccctaaggaaatcatattgctcctggacgtgctccggcgttggatgctcctgcacagccacgtccaactcgtagttgtcaaagagcctcattagcagagcggtggtggagttagcatccctggccagcagatcctggtgcaattcaaagaggctggaagatttcaagaaatatgaaataatgtttattagacagctttagtatttaatgaattaataattattttaattaaattgccttatcatcaaattaaatattttaatgataaaattcattaggcggcgcaactaggtacttactttctaggggcgcgatcgtcatgagcacctgaagtggtcttcccctggagattcaccttgtagaggtatggactgacctcggtctcctccgcgtacagattcttcgagagggtcaagacgtcatccggcgttttgggcagcggcttgctgtggaagtactctaagagaaaaaaccgttgtccgttcgcttacggaagagagcttaaagagacaactcaccgtagaagtgccagctcaaaatgccaatggtgatcagcaagcctacgatcacaaatctctttagcttctggcatttggcgctgtcgatgttgctagtgctggttgtttgctgctgcactgcgtccattgggatataattatccaattaagattagtcaaacatttggttttgcgcctctgtttactt

SEQ ID NO: 40442 - DNA, 1029 bp, DROSOPHILA
aagtaaacagaggcgcaaaaccaaatgtttgactaatcttaattggataattatatcccaatggacgcagtgcagcagcaaacaaccagcactagcaacatcgacagcgccaaatgccagaagctaaagagatttgtgatcgtaggcttgctgatcaccattggcattttgagctggcacttctacgagtacttccacagcaagccgctgcccaaaacgccggatgacgtcttgaccctctcgaagaatctgtacgcggaggagaccgaggtcagtccatacctctacaaggtgaatctccaggggaagaccacttcaggtgctcatgacgatcgcgcccctagaaacctctttgaattgcaccaggatctgctggccagggatgctaactccaccaccgctctgctaatgaggctctttgacaactacgagttggacgtggctgtgcaggagcatccaacgccggagcacgtccaggagcaatatgatttccttagggccgtgatgggtacgcgtgtgatgaagctgaccatgcgttttttggtacacaaggatattgtgagcgtagaatatgacgatcagctgcgtctgctgcaggagctgtggttcactccctactccagaggtcgtggcattgtgggcagttccagtttcgagcacgtcttcatggcggagattcgggaccagaaggtcctgggcttgcataactggctgtactttgcagatcaggagcaacgtggcaatgtggactacaagggctggctgaaccacaaggaaatgggaaagcacaaccaaatggttctcagcgttcgctacacgtttcacaacatcaataagccagtcaacggcttctttgtgggcatctcgcccgaactggacatggccctgtacaccgcctgcttcctggccacggcgaaggaggaaccctgccacatccagttgggtcatgcctccgccacgattgtctcccacgaatggaaatggaacggtatgcgcctgataggaaccgtctatccggacagctcctag

SEQ ID NO: 40443 - protein, 322 aa, DROSOPHILA
MDAVQQQTTSTSNIDSAKCQKLKRFVIVGLLITIGILSWHFYEYFHSKPLPKTPDDVLTLSKNLYAEETEVSPYLYKVNLQGKTTSGAHDDRAPRNLFELHQDLLARDANSTTALLMRLFDNYELDVAVQEHPTPEHVQEQYDFLRAVMGTRVMKLTMRFLVHKDIVSVEYDDQLRLLQELWFTPYSRGRGIVGSSSFEHVFMAEIRDQKVLGLHNWLYFADQEQRGNVDYKGWLNHKEMGKHNQMVLSVRYTFHNINKPVNGFFVGISPELDMALYTACFLATAKEEPCHIQLGHASATIVSHEWKWNGMRLIGTVYPDSS

SEQ ID NO: 40444 - DNA, 23935 bp, DROSOPHILA
agtttccatcgattttgtgtggtgagttggtcccagagaaagcgatccccgattcgtattatcattgtgcagtataagaaagcaaattggattcgtaagaagcgcccaatttgtataaaaaggtttcttttttttttgccacccatcccctgagttatcaacgcacgcacttcaatgtaaactataatggaaacacgctaaactaaaaacaaagctttgtcgactaagactactaattaatttacgcacacatactaaaaacatacacaacgagtacatagacacagacaggagcgtagtgggaaatgattgaaattgcaactactttgaattgttggatattatctacatacaatattgctgaacagaaacattatgcaattgaaaaccaacatgtaaccgaaaattgtcacaactaaaacgtgttgcaatttgtatatatttcactttaatgttttttgctttaattcagccaacaatttctaacttaccacacaaaattttgtttcggtttttgtctttttagtaacatttttttgcttttctgtcttcggtttatataaataatggcgttactgggttcaactcaaattttcattgttgtcaagtgaatatctttataagtatttatataattttgttgttgtagtacttttttttttgtttcgcttaacaatttcttttctttcttgtgggcaattttgtagtattttttttttataattttgttcttgtttattttgttagttggttttttttgcattttgaaatttagatttagcattttgttttgtcttttggttttaatccattcaatcttctgcaagatgattcgtaaataaatcaagaaatacatgaagaaaaataaatgttttgttaaaatgttttcccatacaaattcatcatcagatattcaaggtaagatacttttggaaaattttgtgtattgctagaaaggaggttcttttcgtgtcgcggctagtttagaatacagtttttttttttttttttttgtttaaaacatgtggagaaatgtgtcaaaggaagaggcaaaattataattggatcgaaggaaggaagacaacgaaaattacatctagctaaatttttgtaaatgaaattgaattgcaaattgaataaaaaggagcacgaaattgcaaagagagagcgaaagttgtatcaataggatatagttgtatataagaatttcttgatcagtttggtcatactcaacttgttcgaaatttggtttgtggctttaactctttcttaaactgttattggataattgaaatcaaattatatgtcatatgatacatatatatatatatatttgatattattttgcagttcgctaaatggcaaatgagagtttttgtcgagttcgattttattcaggatatatatttatatgtgtttatataatttataatactcttgttatccattagttgcattacttctatatttatttattgtgtgatttcgttattggtttaatattactttcaattgatagattcgctttagtaattaaatgccagagcttgagttgttgtcatataataagtaaaaacgattttcatacaaaatgtaatttatataaaagaaagaaacagagcagaggagaagaaagagaattgttcggttttacacttgatttgtacacacattttggtttgttttagattgtttgttctgtttgtttggcacaaagaaattatatattttcatatgtggctttggttgcaaaatagataatgggatgttaggaaaaccaaattcgcgactcagacaagagacattattgtgctcagatggcaatggagtgtgcctggatagatctctaaagtctagatgaaattagagctgaagcttgctgcctaagcaatataactagatactctaaatgttttctcatgttgtatgtattgacatgtgtatgaatgaatgtttcgtgtgtctcagaacaccaatgacattcgtttgatcaatttaatgtatgtacaaaaaatgttagtccttaaattaaacaacaagaaataacaatgaaacaatagtaacaaactgattggggaaataaaataaaacataaactcttaccatcagtcgcagctaatgcctgctgggtcatgctgtcgatgcccaatttgcgcatgccgtcttggatctcagccaagtccgattcgctcgaggcctggaagtcatccgaaacgaattccgattcggagatcttctggcccagctctttgccggcttgagcctttgcctttgcctttgacttggctgcctggacatcgcactcctgcgcctccggctcaatcacggccttcggctgctcggcaatggctttcacactcgaatcgcccttggctggttcggcagtcttggatttcttttctttagtggccacttcgttggctgatcgttcagcccatggttgagtttttgaattgattttgatagacaagttcgttttcacagtgtaatttcgtggtggaattcataaaaataataatagaacgaaaaataaaatgattaacaaactgaaaagaggaaacacagtaagtaaatcgatttgaggtgagacgctgggcggctgacgactggcgaagttcgtggaacgattatcaattgagcttcgagacgcgattgagatgaacgttaggggggagtgaggaagaaccgaaaaccaggattcgagtcctcgacgatacaagccagtgcgggtggagggacggatacaaatcaaggggttttaattcaacaaaagacttgagcatactcttaggcggtgtagtacagacgctagccaagttagttagatcgaggctcgagagatagtaggcatgttttaagagtaaggtagaaagagcgagagaacggaaaacgttggatagctagcgtgtgtgaaaaggactaaggaaatcataagttaaacaggcgcgtgtggctaaagtgaaccaaaaatgaaagacttagacttagagaaagatagacagagttcataggcaggtcgtttatagatacagatacacgttatagttatagatagatagatagatagataggtagagagcgcgcgagtaacgagtgtgagtgtttggtgagcgaggcagtctgtttgtcctgcatctctttgcgttatatgtatatattttccagagttgtctacgacgatcagcagaagctataaccaacttaccatcttcgccgcttgaggcctgacccacgccatcggcgcccagagtgcccaactcggcggcctggatgatcagtgagacgcggtagaagtaattccgccagaaattctcttcagtgatgctacggaaaacaaggctcatattggatcatgtgcttgttactggcaacactagcattgtacttacatcttgggcaccagctcgaatcgcatcgtctcgagcgccttgtcttcggccataatggctatggccgtaggataggcggtgtcgtagctaaactcaaagtccacgccggcgggcggggcgcgcacgaagttgcggcgatcctgcgacaggccaaggatttcctccttgatcttggcctcgttggcgtgtccgatccagggggctgctccattgcccacgcctccctggcccttgatgaaagcttcctgttccttgttgaacgagtcgagaatggtctgggaatcggcaggaataaatagaggttggccccattgtagcagtgtcatcgttgtactcacattatccttgacagtttccttgattttgctgccagccttgctgatggccgatgacaagaaggatccaaagtgtttggcctgctgtgttacttttgtggtaactgtcggatacattcaaatcagtatgcgataagtttcactccactgacgacaatcagcccaaatgggacttgctaccaacagaactaaactaaactaaactagactacaaagcaagcgtttcactaggggattgagagtgagtgcgacgggagcgggagttctgggttatttcaaactacttgtaactgggggttagtaacctgtcaccgctttctatctcaatctttttgaattggcaattcgagttgacattgattcgacatttagcacaatgtgtttgaagttgtctcttgtaatttggttaccaatcaaagtgtgacacgtacttttgacttcatcgcccttaccctgtccgatttgaccctcgtcgccggtgggcgtgccaccgcccgatgcaggatgcgagtcggcgccctccgtggcgctgcagttgcggaattcgttgtaaagcggaataaaaaaaagaaagggagcagaaagatagagtgtgaatagttttgcaatttccatatcgtttgtgtattcatatagttattggggaaaagctccaagaacaaatcatgcagcaggcagcaagccaaatgaacttaacacataagtaggtacaggattatagtaaaattgtaaccaaaaaaggaaataattaatataccattcaattaaccatgcatcaacagccattaagcgtgccacgttttgattacaaaaatccactagactttcgtttggggttctgtctctcttatcaaaagatcttgttctcattatgcgaatattcattttaatttcctcatgttcaatgtactttgagtaaggatcttacgttgtcaggttaatttacatttaaataatcttttgaactcgcttattttaaagcgctgatgtatatttacacgtatgtttttgtatacagccatttatttatattgttttttttcagtttgatttgtgaatgcaaaatgaaatgaaggaatctcatatgaatgtcaggatgaatgatgccaaaacgaatactactacaggggcacaactaaaagtgagtacaaaaaaaagtgaattccaaatgggggtagcacactcaaaagtcatgcgaggactgattagcatcattagcatcacggattcatacttttccatttctgaaattttaagccggtccccgagaaagatagacacttagcgagctgggagatggtaacttttagctgctacaccaacaaaaaacaaggccatgaaaaacaaaaatggtacacagaaggaggctacacagcaaaacagagagatgtttttttttttttttgattcgagacaataaaatgaaaacacaatgattatgatcgaaataaggacaatgatacacatctaccaacaacaataagggttgagctttttggaggttttactgtacgtagacgaaggacttggttccaaatagttatttttatggttttcattcggtttccttgacttggttcgatgggccgctcaaaaatgatggaatctgatactttggggaattgttaatgtcgagaaaatgaagatttaacgtttttgatttcggcacgtttcggtaaattaatagaagcgaaatgtttttaaataatagaaaatatcaaatgggactgctaaattcatgttgtatggtttatgtgtttggtgttgaagaagaaatctattcagtggtttgatcaaatggtttgatcaaatggaaattgtacttgatcatgagctgaatgaaatgagttatggtaatttcagtttttgatttttatgttattgtttttttttttttttttcaaaattgtgtccattttcaaggctagaaatatgatcaacttaccgtttacagatatttatctgaagttacactaaatgatactttatattcttcctactatataataagataactttatgtattgtttagttcataggtaactgctcaacatatccaatgtcaggtaataataatattctccaactctcgtaaagggacaaaattttgtgattgttgtaagccaatttcaggtgggttttttgtttaaatatttacttttatatacaaaaacgtttgaacgatttaaaaatgttgtattgttttacagatgggaagatagataggttaagagatatagaaatttatagagagacagatcatatttgatttgtacaaaaagttattaatatgtgaaaaagtgaaacttgaaccagcacaagaaaattcgtgtatagcaaatgaataagtatataaatatattggttaagtgggaatgcggaacaatatctcaactaaataaatgaaggaaaacgagtttcctttgatgtggagtaggtaaatcgtaaatagttataatatatttcaagagaaactcgtgtgtattcgggttagtattaaagtaaatcgtgtggaaaggcttcaactttcagttaggcaaactaattgtaaataaaaccaacgaaaacttaactgactctgctcatattccttccagttgaggaaggaaaacgtttcgccagagacttcaaacaaaaggtacccaaaaaagttgaacaaaagagtgaagaacttagtgtggcttaaacggaggttaaccaaagacgcaacagggaactgaagtacaaagacgcttctcatcttctttcataattttttttttttttgttttggcattggtttgtattgaacggctgcttcgtatataattccgtcattgtcaagctggcacccatacctaatatacctcgacttgtcgtcatcctcgccaccactcacggctccactggcggcggccccgccctctccggcgacagctccctcggcgccctcggctccatcggctcctgcgcccttgcggagtcccgggatcgatggtatcgatggcatcgctggcatggccggcatcgatggcatcgacggcatggctggcatcgacggtatcgaggcgtttcccagccaacccttggcactgcccagccatccgctgtaagaaatggcaaacagaaaggagcattagtcgtgtgtccttagtccttggcgattgagtgactgactgacaaaatgacaatcaatctttgccctaatttggcaatattcaatgctcgcatgtgggtggcgttggataagggcctgataaaaatctataatgtaccatgtcaaacaataagcaggcgcctccaatcgccgagctcgtgctcaccacacatatagaataagagctcgcacatacagggtgacaaactaattgatttcttttcgatattttatttatgtatgcctggagcaaaatttttgtcaatatcttcagatttgagtagaaaatattggcatttaatttccttatgaatcgtgatcagattttaaagagagcttttagtgaaatgactgtataaagcaccctttgcaaattctgtcttgtttgatagtcctgcgcgatttcgttgaactatttttacgccgtcataaataaaatccagctaacaagcccatacaatacgggacatccatcgtacacataggcgtgtgggaggcattgtttgttttattggaaggaaagctggagaaaagttggagacggctttgccgtacacttcgcccctggtcgacactgtgtcaatcactaaaataacacaaagatcatcgaaaaactgaaagtggaaataaagtgagctgaagcgatgtatgacagctgtcccgtgtgtctgggcaggcttcgtcggcaggtgaagacgccatgcaagcacacattctgcaagaactgtctatgcaatgtctacaaactcagccccgccaaaacctgccccctgtgccgggccccattggagtactacatcgtaagtcgttaaggaatatacttgcaattatctgaattaaatcttccatttccttggagcagagcaagaggaacagcacaatcaaactggtcttcttttcatagagtccatcgttaaatttaaattgtaatgaattttgctttctttgttacttgtttaaattatttcattttgtttaattttatataaatttaaatcgaaagtcaacagcttagcttatgcaatgcaatgccattaactcgcacggtaagtttaacgataacaacttgctaaacttaaattgtcaacatctattttagtgccccaaaatcagtgaaattacgatcaaatcgcttgactgggagcttcagggtcttattcagccaagtacaacaatcgattggagactagtcctcgtcctcttccatttttccgctttccacactcaaatattccatacacatattgcaatattgaatgctctgcctgcggcactacaaggagcagggacatgacgcggaataagcagagggatacgacgtcccctttgagcctaggatatatatgatgatggtggttcagatattgcactcgcacacttgcacataaaaagcgagctgtgctatatataggagaaataaaataaaactcacaatgacaagcaaaggatttcaatcggtatgcggttcgagtaacgcggctgcacttatatatctgtagattcatgtgcattatgcttcattatgacggggcaaggccagcggaatagtggacaggcattgcgcatacgccgcgttgtatgggtgctcatcgatgcgaaatcagagcagtagtgaaaaatcgctgccgtaaatcaaataaaactgcagccaggaaccattacattttttttttatccccaactgcacttaattgaggcggcaaattaaatttgtacccaactgggtcaggagattaaagaagcatatgtcgagccgcatccagcatacgccatgttggcccgcccaattaggaaaccaactcgatgggcatatcggcaaagttatagcgcatcagtatatggaacgacaatgactatcgccatggagcttatcattagcaatgggccataccttaagtgaggcactccctccgtttttcgctctactttctcccagggcttcccttttgtgatttatgtcttcgtcattggttaaaacgatgctgaggggttgaggctggcatctacgcagttttactgacctgacagcggcggcaacagtttccggtcttatttatggctccaaggattcccagatgggcattgcataactcagcacgagcaaaccgataagtggttggacattcacttgagagatggtttcttaaagtagtccaccgacattttccttctctctgccaagtgtgaatcataaatttcgatctactttaattatgtgatacgcactcatatcgactttctgctgctgcttttaagcattctttttagctaactttttttgtcctgccgccagaattttcccgtgaaaagttttaattataaaagttcgggccaatgctgcggcaaacacatagaagaagaaatacgacatgccgcaatgccagaaatcagtagaaacaatggagtgaagtgaggctgacctcaattcttcagacatcttcatcataaatccggagggtaaacaaggccagcaaaaactaattaattggcttttcaggcgccggcaatcgattttcgagcattatcttataagaccaatccttctgctatttcaaataaatagtccatatgaaattaaatttcatttaaaattgctgatctttacacacaaaatatgttaaaaataaaatgtattctatgttggtggaaaatagtttttctcactactaattttttgcagaattttccaactagaatgttgcagaaaatacttttcactcttcaatttttttattgcaacaatgtcgcgtggagtcgtggtgtcattcccttcgaaaaagtgaatgacaaaacaacggccaacgcacatggcacttatgtaaattgcagcctgtctgggaaaagcaaattgggtggctttgggtggtgaaaaccattcgctgcgattgcaactgcaaatggagaagtgcaaatgtggcgaaaagagcaggaagggatggagtgtggtgggtggggatttgggcgttttagtagtgcttgccacccagcttgacactttcatcctcccctctgaaaaccccttgttgatccccaatcctctgatgcgaaaattgcattgtcagcacagaacggcgtcaactgttgcagttgctccatattcttgtgcacacttttcactgcttttctagcgaattggccattttaattgttgtagtcgttaattggagtactatgaagtgttgcatatcctcaccctccactttcactggaattttctaattggattgagattttgttggcgccgagcggagatttatccagtttcaaagggtctaaatcggaaccagacacgaaacggcttagctgatgggcctataactaaagaccatggcaacacaatccgttgtcatgtttgagccctccatcatgtcgtcgctcccttccatccgcttttctgctgctacacaatggcctgtatttaaagataatgcttataggaaatttattacattcgccgtggataatgcgagggaaagtaaaactaaatgcgtgtataaagcaaaaagaaatgatacccggctaaaggcacctgctgagcttccattttccccaactccaactcctccatctgccgccaaagaatatccgccatcatcattttcatctgaaacccccacacagggtaggcttatactaaggggggaggtacaacagtcttaaagagaatatgtcttagctttttgatttcagccagtgttttggacgggaaaatgtaagtcacattacatagtgactacgaaattttggtaaatcaaccataactttgtagctagaatgcggcgtctccgatacttttaaagctgccctcgccatttagcaaatgccaaactctgtcagaggcgcaacagccagcaaagtagcgccgagaaaaatccacatttgacaaattaccaacgagcaggtaaacagaaggcggctaagcccgtccatgaaaagggaggcgggaaaacacaggaaaaccgccacaagcgggaaattgggagtggctgggatgcaggtttgccagggggcaggacatctacataatcatggtcatgtgtggctattaataaaagatgaacgcaacattaaacgcctgcataaacgtgagtcatccatccatcggcacgattgcctgcctttcttacgatttcgccatttgacatttgacttttcatgcccggcagacttctattttcatatcgcgtttaaaattacttttcctttcgttgataaaaattaaaaacgtttcctgggtttctttatttactttttgggttttttatttgattttattttcaattaaagtgagctgcgcaaacataaatatctggtggaaagtggcctatcaaatattcatgtagagcactgtaagggggaaagtaagtcgaggcaaaatgccgggaataaattattcaaagcgagaattgatgaacaaactggctaacagagattgaaactctttgcgggggaattggcccaatcaacgcaatcggccagaatgggcgattggtaattcatttacaaatccgttttcccacaatggtggcaaaaataaaccaactttgagctgattataaaaaggatccttcttttctggatatagactcaagccttttttgtttaacttatgccttgtttaattacgacaattacaaatacgtcccacaggattctcggttcaaaaccaaatagcataaacaacaacaccaactaccgtttcgaaataattatactagaataattcggcgccttgctcacaatccccccggtctaaaccacttaatatgattgcttaatggctgtagcaactatcggggatccaacattaaaggaaacgacccacccacctaagccatgtacatttaaaggaacgactgcgataagctcagaaatacgaaaaagaagcataatcatcaaagtaagttggacgcaaaatatcaaaagctatttgagtagaagtcccataaaaatattgcgagtaaggacgatttaaaaaggtgagaggttgaacactttatcaatttaagtagagtaagaaattaattttataccgctctctgggataaccaacatattgcggttgagcaaggttaattagactaaaagttgccgacaaagtctaaaaatagaaaagccgagagagaaaaataacattctgcatgcaaatgacaggtggacagaaagggtgaatacccagctcttcagagtccattttgtttcacttgtcgctttttcaggatactgaaggcaattgtggcttttcttttttcgttttgatgtccgcaagaatggatatatacaattatatatacaattttcggaagtaaattgaacaaataaaccaaatttaggaattttacccttcgcgatgctaaatatgcgtaaagaccaaatacttaaagtaaattttgaaattattttatgccaaatacgatatataaaccaaatgaatatattataaacatatatcaataaaataatgaatacatttattttgtttgccagacaactatgttatgaggggatttcttttcgtcttcccttgaatagcataggttttggggtgctcaacaatagtgtttttaatactcacacactaaagcaccaataaaagaggtgtggttgattttgattgaatatgttatatatagaagtcggttcaacaatttaccttcttcacaagcaggatatcctttcggctcgtgattaactgtttcgtgcaatcattttgggttatacacaaacttatttatagcttcgaatggcacagtccccgaaatgataaacatcccagggcaaaggtttgggacaattgttgccaagggctttggctcctgaatcgcgatggttctctgccgctcaatcaaaaaactgaatggcgagtgagtgtgtatgatggccaaaagcccagggggcggcccaaaggcccgtggcggaaataaaccggtaggaaaaaggtgcaaagtgttgggaattttatgcgcattaattatacgcagcgagcacgccccgaaaatgcaaatgaattatttagcttgatatttaagctgattgagatgaattaacttgaaatgaatatcaaaggcaggggcaccaaacaaaggacacttaatgctcaacacgtgggcgagcgcttacatttgcgactcgaatttcccacggcgattggcagagtttcgccaacctgcaaggactcccggagtcctttcgaaagtgtcactacacatgtgaaagtggcatctacttcaacttttgcagccaacggacaggcaatttgtgtgagcttttgactcccctcggcgattatggttgcagccctttttgttacttttagacccctacctgtgcacctatttgatggcccaaacgggcgtggtcgcgactcagtttgagaaaaagtttctgtgctaatgattttacgattgcgaacaaaagttttcctcttactgcgttgggaaaaaggtaaatagtttattgttggtgcccaagaagtgggataatggctttcaattaggtataattacaaaagtataaacttataataatataaaaatacaaacgaaataaacttacgtggcttcggatactaatgaatcaaccagggaggcggatttgggaagtctaaaagaaattataagagtgtaaatcaaaataaataaaaaatctgatcaaacgaaatcaagaagggttcacaattaggtaaattaatccaggggattttgaattaaatgaaaacaaactacacaaataagtcaggttttgacatggaaatggtattttctgttactcgccgagtccgtttggttagcactgataaatttattaaattcctttctccgtttccagctacattttcgtccgggtttgttcggcgtttggataattacctgcaaaaagagtgaaaagtttccaaagttaataaagatgtatatcactagcgattttgaatgtattaggcaatttaattagatcattccgtgttggggctgggcaaccgttcgtcgggcacaaaggcctgcgaaacgcccaaccaaactaaaatgcttcctgacctgaccctctaattaagccaaaggatatgattacaaatgcgaaacaggaccgggcgcaacatgaaagcgaaataaaagaccaaagttcactctcaagcggacccagtggcccattcgtacatatagattcgcaagtctccagctgagcggaggaaaacaatttcttaacataaatcaactcaacgggggaattgtgggtagctgctttccagatatttatgtagcaatttgctgacaaggacagcagcgcagtattgataaacaataccaatcgaattgtatcgaatggcaggtggggcaaaaaaaaaaaaaatgcaaatcctactctaaccttgacccaatgaaaatggcatacggtttgcggctcgtgtcctgtgatacaggccctgaatagcaaaacaactgcactcgtattcgtcgggcttacaacttacaaagggcaaccaagataaaagtctaagctggcacacttcgcgtatacgtaatgtaacaaaatgcatgcaagcaaggccatccaatggtggcgggtagtgggtggtgttttgctgctgctgtcggtggagcgacaatgttggggagtggcccatgcgtaatttatgccgaccgattcagtggcaactgaaaattttattcaattaagcgaagctttgcgtttcatctagcaaccctctatttcgctggccaccaacatgtttatggcaaagtgtcagccgcaacaacagcagcagcagcagcagcaaggatcgtcaacttcctggcaccagccgttcgccttcgcgagtttccttactgcgtccttttacataacatggcattcattataaggctaattaagtatacgccatgttgtgagtttgctgcactgtttgcatttgcctgccctactcatggcaacaccaatacttgggaacatacggcaagagtgttagttttgacgaggttacgcctgaaactaatgagataataatgggttattgcgctcgatagataaagcagaacaacattcatgtccttcaagtggaatatgattaaagcccactcaagcatacgtataataaatggtcggaaaaggacgaaaacaagtgtacacacagaatagtctgttatagaaacgaaatcaataagcatatggaccaatatggatacgttcttaaaataaaccccgctaagtaggcaacagtttttattgccgacttcagtgctctcgaattggcaacgaatgttgctatgctgctcataagccgcgtaatccctactgccgcaccctgcgatgaagcatccaaggactgcgccacgatgcagcaacgtgttgacctttagcacactttccgtagcaatccttctcactgtcacttcgtgtgccccccagtcgtattatcttaattgttatgcaggcgaaagtgtgttcgtttcgcagtgtgtgacttggcatatttcattactcaattacaaagcaaactgtttgaagagccagagtcaaatggaaggactaagccgtttgcgattttcaattaacggccaacttgcacaacacacacacacgacgtgctgagtcacagacgaatgaatgagtgaatgaatgattcggtgaaagcatgaattgcagcactcaccaccaccactacacccacaacatcgagccgatttaatgaaagatgcaatatggcacgatgggttgaccctgatctaatgcaaaagggtcgctggcggaggtcgtcatttaattaagaaatgctttgactccggtatgcgaccactgctgtcaagtcggtaagtggaaataccttctctttaacgtatttccctggcaatcggtacaaccaaatcgatatttctcagatagaaaaaggctgcgagttgaaaccgtaaaaagtttcatcaaaaagtacgtggaggcaaggctttaatttcgcttggaaaactttgacagccatttctagataaagtcagaaaccttttaagacggccgttgggcacgaaaatttggtaagtaaaaggttttgcctgtcacgtacagccatggaatgtgtgaattttcacttaaaggattgcgttatcgggagcttaaaagctgcgagaagccaaaacataacattggataatgtcattagtagtaaagttgagtaattttgtttatagaaaagccgtgagggaaactttcaaggatactgtttcccgggaaactcgattacaatcgtccaaatcacaagccatgctcattaaaagttatattatttccccaaaaaaggtctccgaaattggattaaaatcgaggagcctaaccctaaaagagttgaaatgtaagttttgaaccgccgctgctggtttaccatttaaattgcaaattgcaaattgtgcgacgtcgaatagcgtggtagccaaaaaaccatggccacgagccattttcgtagacgtttagaagcctgttgttgacagaattaattgcgcacgttaacgttgcttcgcgggtggcggcatccgaaaccgaaaattgaattctaggcgacgtggctgccaaaggagtccgaccatcctgccgctgcagcttccgtggctgaaattgaattacgcgtgtttttcatacacattttttgcgccactttcagccacggaattgcgttaggccaatgggaaacaaaagccacccaaaggctgtttcgccaataaaagacctgaattgatgcccagagacaatgagttgtcctgttggctcgaccgacaaggcagatggttactccaaaactcagcattacgtatacgccccgtcaccgtgattaggcaggagcccgaaaaagccgagccataaatttcaactgcagagccaggcggaaatttatgaagcacagcacaaaacaaaatggccgctgtgaaagcttggggctatgtgttttacactcgaccaaatcatcacacaaaccccccacccccccatcaggatgggggccaagaccagacatacatatgagcaattgggtctggctattagcactggcaactgagctgccattaacgcaatgcaaatacatccctcgcagcctcgaaatttcccagcttttgggtggcttatcaaacggcgatgttttctacttttgctctgatgtattattttattttttttttctggtattttatagagcgtgccagttttatgtaaattttaaatattactcaagaggcggtttatttgctggaaccattggctttatgactgtgactgacaggacccccaacagggattacggacgagggggaatgatgtgtgatatctacagccatttgcatagttggataaacactgggaatgtgcactgaatgggctacaaaatggcacagatgagcaaggtttaaacagataatccagagaacatggatttattctaaaatattaatattcttaaaagcccaactaatatttattattgcaagatttttaatcatatatcctacttcttttgtaacattgcatcaagatatctttccaaacaggatacaacatatagtttgcaaacaagcaatttagagtactcagccagatgaaagcaagtttttaagtttagacgtgccagtcgcacactcgcgaccataaatatagggataccagcctctctgacatccagcaaagtttttggcagagcatttctcatgcagcgaggacagtgtgaaatagaaacaaagcacgtagtctggctgccgtttttacgatacgccgtaatttgctactttgacgcaagtcctgtgagacctctgcctgctggcttttatgtgtgtgcgtgctgcggcccacacaaacccacacacgaacacacagagtccctcgcttcctgttccccggatgtggctcctggctcctcccccgtctgttgcatcgtttgttgccattacccggttggcctgtcacttccgcgctccgttaatatttatgttttgccagcgcttgtcttggctcttaacgcgactttatcatcgtctgcgtctggagcaggcccagcaacttggcaacatggcaacattatcgtgaagggctcaaacggcacacaaacttttagcagtgactggccttccggctgccttgcctcgactcgctttagttgacttccggtcgtgcactttcccatcctgcggacattccatttatctttattggagcaaaagtccaactgctaacatatgtttcccacccggtttcctatatttccatatgttcctgccgtgtcctgatttcattgcgctttaaatcggaccacgccgagcatctgcgtcgtttgcaccttggccaacttagggggtcactttacgaggagcattaaattttattttattttttcggtatttcggtttcggtgctcctgcgtgcaggaccataaaaatccgtttggcaagacctttggcccacattgctttttggcataattgaccgccaattggtgtggcagaagtggcacggacagcgccaacgtgtcggggtcaaaaggtggatctataaaaatcggtgttaagctgattggacactttgatggcctctgattagcagtggagccgtactgggcagccaattatgtacatgaaaacttagcaactaggcagaaataccaagccattaaatagaattttcataaataaaataggtggcacaaaaaatggaatttagattccgagtaacatgtgtttaaatcaaaaatcactaaaaatagaaaagggttaccgaatgaattataaatctttctgggaattaaaaaacaaacaaaatgtgaaaaaactaccgtgcgacacgcattctaaatcggcccttttctttgagtgggcgtgggaaactccctggccagcaattaggcagtgaaaaactcgtgtgacaaacacttaatttgcataaaaattactatttatatgggccgaatgatttagcacgaaacaaatgcccagggcgataaatattaattcgtggtgcaaacaataagcacacaatgccgcaacagtaaagattcgagcgtcgtataaattgaattaaatgcgacagctgaaaaaatacacagaacaaatagtttcaggacaggacccaccacccacggcgcaggcggcaattaaggtcctgccgaaacgaactgaaattgcagcgagtggagaaggaggaggagtagctgctgaccacagggattgtttggctgcttttggtgccaggccagggcgttaatttggctggcaaatgtcaaatggcgagcgctcggacacagggcgtcgttagcacccacgccatgtcctggcaaatggcgatatgtccggcggtctcttgccttgacatgaaattttaataccgcctttaaatttaagtagcctgtggggtttttttttgcattcggcttggcagcatttcaattggattcccgccgaccgtctcgtttctcttatttatatttttatatccttgggaaatgtgtgtattcagttcggttcagttcggttcaggaggccaaatgtcgctcgataaatttctgtgggttttccatttcgccagtctcgcatttatttatttattttgaggccattgctttgattttattatgtttgccgtctccaggtgagcggaaaaaaaggaaaatctcggccggactttgatttccactgctcgttggaccctggctcaaatgtaatatttatattatatattttgaatagaactcgtaatacctatttgcatatagagggcatatttcaatcaggccaagaccatgcgacatgtgcaaatatttaattcttaacttttgtttgtgtgcctaatgatgacccgaatgacccaactggctagcaatcaagagttagctgttattgttggtgagtaaattgtgtcaagcggcgttaggaatgcattgcgtacttttactttgtccagcttgtttgccaagcaatttgggcgcaagatgaaatagttagttactcgtactcatacgcctcccttcgtatttgttttcattttattttggcataattttagcaacaaaggcaagggcacacgcatacagacacattcgcagagagcaagtgcaaatagtgtaaatgtccttgaaagcgccaacaactttggccctggcgaaggcagagaaaaaatcagaaaaggagcgaggaaacgcatgtacaggtggggatttgaggggcttaactaatgggtggagatgcattcgcttatttctccggcatagcctacttttttgggcagcccttaatcgaatattgaccgatttttgggctaaatcaccaaaccccattgccttcgtgagcaactcaatatgcatgacagcgaaaattgaataaattaattcattgaaaattatagagatttgacgctgattggcgagcgaggaaatgaaaaggacagtggcaggggcacaggcacaggcgtaaagacaggcaacaagccagcacacacgttttctgaatgcacaattattaaataggctgacaaaaggacaacaagggggcgggtcgggtcgtggagtagcaaatcctctagagcgggcgccatcgtcgtttctactcgttgtggcctcatcacatgtgcacatttcgcagagagaagcatagagcgtcctttcgcacggctctctcgtatcgatccgcaaaacgagcaaaagtcaactggaaactggaaagcaaccaccaaaaggaacacatcctgcctccgagccagcccccttccgaatgctccacctctacccatcggcattggtgacagtatttcgcacacagcaagatggtcaaaaaaccagagtgtacgagtggtgaaagcggacgagggcgccgccagctcgaatgactcaacattttgtggttatgcaggagccacgtgcaaattattttcattggaacgtacagaaaacaaaaagagtaaaataaagacgagatacaaagaacaacacgaaggtggtccaactcgtcaatgtcaattgatagtgaaaggacttgcggggcagaaggagaacggcggcccgttgaaaaggcgtgacacatcacggacttgggtttcaaagacaacaacgacgacgacgaccacgacgacaccagctgttggcagctggttggaaaaacgtgccccggattgacatcctggcatccagcgcacactcgcacaattaaatattaatgagctgaattaagtgaaaaacaacgttagttgactttggctgatcttccggattagccagcaacttgtggcattaacgggccatcacagcggtcttaacttgtccaaaatatcagccgaataattggaatttactttcatttatttcgaggaaatgaaggctgaaacggcagtaacactcttgtgggataaagcaaactcaacataactagggtgtggaatgcctgctagagattgatgaagtacccagaagaagcgcgaaggacgaggtcaaatgatacggcgaggtcgaaaagaaatagggcagtcctatccactcagtttgagggaagtaaaagaaaagaaaccagtcggaagttagtaagcatggagttgctcttttccgtttgctgacagttcaaggaatttcctttggtcaacaaaattagggcaaataaattcgcttggagaattacactactgacagtctaccatactaagtaatacatatatgccaagctgagagactcttttgaagactgatttatgctatattctataacgattcaaatatttcaacaattaaaaagaaatacagtcttcacaatgcgatttgccatttcaagaataatcaaacgaaatccatttaaaccacaaattggcctggcattttcaaatcgaaattgctagccagaaatgttcaggaaagtcagtcgactagcttcgcaaggaagcggagccatataggatatatatgggagtgaaattatcgggcatttggattccagtttaagcaattatgttcagtcacgtgagagcgtgcggaatgcaacgtaaaatgcaggataagcggagtgtgtcaaaacaatgatgaatgtaccgtaaaggagcgattgctggagggtaggaactccacggagcgaaatgttaaaaggtacaaatagcaaggtcacattggcacgccatgtcaggtcgactgaagtctggatttcggagtcacagtcacggaagactagaaagatgggccgaaggattacccagcgcgcattgttcgattcacacttaccttttgccagcttcctcgccctcgagtccttcgccaccggctgcggcagctgcctccgggtccacggcggaggaggccgtggcctccacggatgtggatgctgctggagcggctgcgggcgcatctcctgtgggcgcgggcacatcctcgtcgccagcgcctcctttaacggcgcccaccagcgaggtgaattgatttgttaggcccgaaaacatgttggctcctgctgtttctctcaaggattggtggtgtgtcctgaccaggaagacgtgcgcacgttcaacgctctctaggctctcttgttctcgcggttctcacggttttccactgctctcccgctcctggctctccaacttttactacactgggcagaggcagatagaatgtcctgtaatgggttttcctttctttcagtgtttcgttcgcaccacagaagtttcactttcaacgctcggcgttatgtaaattctcgcatttaacttgaaatttgaatttttcacgctgcaattgctttgtccagatggccgagatggaaggtaaaagaatggtttttattgctacttggcgaggcggtggggaaaatcaataaaacggactgggaattgcgtggctattgggcacaattacacgataaatactctgcgattcgatcgattttccacatggacacacgccacgctcgagtttcttttctttttgggtttatagctattcgctatttgcacaactaaagtaatttgagtcgcagccaattaccacttgagcttttctctgccaactggattttgcttttcttattttttttctctttggttttccgttcgctgccaggagacttttggattttcggctgcccacttcgaaggtcctctgaaaactgacggagcagcggaatgtcgatgtctcaaataccgagctggagtgtcgtcttcgctctcttggactcggggattggggattctcagattcggattctcgtatgcgtacgttcgctttctccctggaaaagtggagtccaccccctcctccgcgttgctggggcgatggtattgcgattttcgtgggtgggatatttgtgcgctggaatgcgcatgtgtgctttggcgtcgttttgctgctgctggcgcaattagacaaacaattgacacgtctatggaaacaacaactgcgcaccagtaatgattattttcggtttgttctcggccagtgctgcccatcgaacagctgactgctgtcggtcgatagctctaccgatatgttcgcgcatctctggcttctgcaacagctgattttaaaatttccaagttcctattgcgaaagtttggaagcccattgcagcattagtttatttacatcagcataattttagctatagctagatcaagacatggaactttgttgatacttaaaatatttttattttcaaaccccaagaagcgtgatcttaaaatcgatccgattctagttacctggcctgagagtaaaatatttatacctaaccgcctgagctaatccgtgttagtttacaagaattccattacatttgtgttcctggaaagtcgagctcttctcagaaagtgtttacacttgtcttcatgttcgtaaatctctatttacagcaacagactttcattttttgtacttaacacgtagtttttaaatcaattatcagctaattagttcgattgggacaacaaggatactcagcgtcgctgccgcgatctgctctgagactcctccgccgtatcttgcgctgcttccgtatttgacgacctcggctgctcatgggccttaatctcatggtccagccgctctttcgcccggaaaacctttgactggatatagaaggagccgcctttggagc

SEQ ID NO: 40445 - DNA, 1736 bp, DROSOPHILA
ttcgaagtgggcagccgaaaatccaaaagtctcctggcagcgaacggaaaaccaaagagaaaaaaaataagaaaagcaaaatccagttggcagagaaaagctcaagtgcaattgcagcgtgaaaaattcaaatttcaagttaaatgcgagaatttacataacgccgagcgttgaaagtgaaacttctgtggtgcgaacgaaacactgaaagaaaggaaaacccattacaggacattctatctgcctctgcccagtgtagtaaaagttggagagccaggagcgggagagcagtggaaaaccgtgagaaccgcgagaacaagagagcctagagagcgttgaacgtgcgcacgtcttcctggtcaggacacaccaccaatccttgagagaaacagcaggagccaacatgttttcgggcctaacaaatcaattcacctcgctggtgggcgccgttaaaggaggcgctggcgacgaggatgtgcccgcgcccacaggagatgcgcccgcagccgctccagcagcatccacatccgtggaggccacggcctcctccgccgtggacccggaggcagctgccgcagccggtggcgaaggactcgagggcgaggaagctggcaaaagcgccacggagggcgccgactcgcatcctgcatcgggcggtggcacgcccaccggcgacgagggtcaaatcggacaggttaccacaaaagtaacacagcaggccaaacactttggatccttcttgtcatcggccatcagcaaggctggcagcaaaatcaaggaaactgtcaaggataataccattctcgactcgttcaacaaggaacaggaagctttcatcaagggccagggaggcgtgggcaatggagcagccccctggatcggacacgccaacgaggccaagatcaaggaggaaatccttggcctgtcgcaggatcgccgcaacttcgtgcgcgccccgcccgccggcgtggactttgagtttagctacgacaccgcctatcctacggccatagccattatggccgaagacaaggcgctcgagacgatgcgattcgagctggtgcccaagatcatcactgaagagaatttctggcggaattacttctaccgcgtctcactgatcatccaggccgccgagttgggcactctgggcgccgatggcgtgggtcaggcctcaagcggcgaagatgctctggcatttaattactaaagcgaatctatcaattgaaagtaatattaaaccaataacgaaatcacacaataaataaatatagaagtaatgcaactaatggataacaagagtattataaattatataaacacatataaatatatatcctgaataaaatcgaactcgacaaaaactctcatttgccatttagcgaactgcaaaataatatcaaatatatatatatatatgtatcatatgacatataatttgatttcaattatccaataacagtttaagaaagagttaaagccacaaaccaaatttcgaacaagttgagtatgaccaaactgatcaagaaattcttatatacaactatatcctattgatacaactttcgctctctctttgcaatttcgtgctcctttttattcaatttgcaattcaatttcatttacaaaaatttagctagatgtaattttcgttgtcttccttccttcgatccaattataattttgcctcttcctttgacacatttctccacatgttttaaacaaaaaaaaaaaaa

SEQ ID NO: 40446 - protein, 268 aa, DROSOPHILA
MFSGLTNQFTSLVGAVKGGAGDEDVPAPTGDAPAAAPAASTSVEATASSAVDPEAAAAAGGEGLEGEEAGKSATEGADSHPASGGGTPTGDEGQIGQVTTKVTQQAKHFGSFLSSAISKAGSKIKETVKDNTILDSFNKEQEAFIKGQGGVGNGAAPWIGHANEAKIKEEILGLSQDRRNFVRAPPAGVDFEFSYDTAYPTAIAIMAEDKALETMRFELVPKIITEENFWRNYFYRVSLIIQAAELGTLGADGVGQASSGEDALAFNY

SEQ ID NO: 40447 - DNA, 4663 bp, DROSOPHILA
cagaatgaaatcgaggcggagagcaggagcatggacgtttgggtaaagatgatggagaacttgcaccgcggagtggagcgctttcagaagcaccaccacctgctcacgcccaaaaagcgcaagcagctgcgccgcataatgcgaaagctgcccttgagcagtttggatgagcaggtgcgactgatggaggtgtcggagcggttggtgcccaagccgtgcaaggagactcctgaaccaccgaagggcaacgaacgccagttcatcaagtactcagttccgcatcagaaaaagaactgtgatcctaataatcaatcccccgtggacaaacggctggccaggatatatgccaatctgaaggctctgctaaaaatccacgagcagacctcgtccgtcatcgctgatatacattccctgatcgccactattaactatttggagcgggggcactgcaccaagataaagatcactccagcggagggctccaggccgtcaataaaggctaccatcgaattggatcggctgcgcaagaccaagcacggcaaccactacacgcgggaaattatggacgtacgtcctccgtacatccttgaccatgtgccgcaattgaaaccaaacattttcgacgctctggggagaaaggcgaaaaaatcaaaatccaagcactgaaccgtttctggtggggaaaataatttattactccaagaattagtctacttagacatagtctactgaacatgctctatgctacgctagttctgtcctgcgtcagtttgatatatacaatttacaataatctcatttagctcgggcaaagtggtggctgattacagagaacaatttaaattatatccaaaccaatagattatatcggttaatcattgaactaagacttggggacttgaggacccaaaagtccgtgtatggctaaaatttgcctgccacttcatcaactattttgtttttcaagagttttctttgcccataaattccctttatatctgtgctcatatggcctgcctctgtgctttgtggtgtctaccgccggctatggaacatctcaacagaatcccggatttgtgtgttcgatgatgcagcgcttgcagtacttcttgaccgcccggtagccctcgatggaaaccggacagtcctggatattcagttgctggagaccgcgacaataatatgcgatacactgcaccccgcggtccgtgatcatgtcgcagctgcgcaggctgagcttcttcaggttcggacagctctcggccagagctcgaagccccgcgtcgctcacatcgcacttcccgatgtccaaggctcgcagacgtggacaggatctcgccaggaccgtaatggagtcatcgctcacggcctcacatcctcgagcgttcagatagcgcagcttatagcaccgcctggcaatcacctttagccccgcatccgagacccgctcgcatttggccacggaaaggtagcgcagtgcggctcccagcttggccaactcatacaatccgaaatctgtgatgttcaggcagtcggacacactgagctccttcagcgagacgcaaaaactgggcacaaacttcagacccgcatctattagtttaggataggaaaagttattcatatggtatcgtatcatgcgagtccatatccacgccaactcacctgtgacttgtatgcagcggcgcagataaaggtaaaccagctgggggcagttcttgaccacgatcttcagacccatgtcatcgatggccatgcagtccgtgaggtccagatattgaagcagcaggcgacgcggtggctccatgtggggattaggactgatgctgctcacctggctgcagcctgagagaaaataataatttaaatcatgaaatcattttgacccataaaaaatcggagatccaaaaactatgtccactcacccgtcacatccagatgctgcaggttgctgcacttggtcagcgcctcgaccagcgcctgattggtgatatccacgcaggtctgtagctgaaggtgggtcaactcggggcagcggcgcgtgaggagctgaaggcccttgtccgagatgcggcagccatcggcgagcatgacgcgctccacttccggacaagcgccattgcagctctggccgcaaagctggcggaagatcatcttcagcgtcttgtcgccattcaagtgctcgccccgcagcgagatcaccttccacaggatgggccgccaggcgaggtgctcgaatctccggcagactcgcgccacgttgcacaactcgcagctgtccagccatgagaagatccgtacaacggcctcgtcgggcagacgatcaaagagcggaccgcagcggaagggacctttgcggttccagggcggcggtccaatggcggacgctgctcctcctcccaatccattgctagaggctcctcttcgcggcgttgtagttggcgtactgcttgccatgattcccgctccactggctgtggtagaattggtcacattgcccgctccgccacttgaatggtgacccgtgggagagggtgagaccagtgtggcgtagccttgatccaagctgggcgagaagcgtcccaggttgcacagcccgtccgagaggctctggcccttggagtgcaggtggttggagttggagctgcggtttaggaggtagcgatccgatccacttgtttcgctgggactggaggtgcgcggatgatgcaggcgttctgggatgataataaaggattagtataatttcaggactttgattcaaatctacccacctggcagtcgctcgttcccgctgccgctgctgtaatcctccaggtagtagcgttcgttttggaactgactcgcttcggcgcctaagggaagggttctcagggcgttacccagatacagtgactccattttcttgtccagcaggtactgggctccattgccgccgctgccattgctgctgagtacagtgggcacactgcagcggccaccttgggcacgtctccgtcctccagctccaccactgccacttccagctccaccgccacccgcgttgttgtcactcgaatcctccgtgtccgcactgttgccgtgcatccaactgggtcgctgggttccaaattgcaggacatgttctagtgttaggaagttccgcggctgtggtacgggagccacgttcctcgacgctggagctggtagttctggggacttcttcgcatgcctacccaccgaagccgtggaatgggctccatagctggtctgctgctcggttggtcgcgagtggcggcctctcaactcaaaggtcgccgctttttgctgcaccatatggagcactgctgccgccgccgccgtcgaggatgccccagcctggtcgctgggcggcgtggagctgcgcgaggccagcgcttcggccacctccaggccgggattgggtgacttgcgggacatcattttgtaggcctgtggatccagtggactggagctcagcggatgcgggtggtggtagtggtcgcgtaccgcattgctgttgcggcccaatgaagcaagtggacactccaggtcgctgctgcgacggttgctagtcttgtgcgacatggttggttcctctccggtttggatcctttgtctatcagctagaagcctctagagtggcgcgaaggtctataatatacaaattaggaatacttttaatagcatctattattaaggaacacacctttctaagattaagcaaatttaagattattattattattatttccaattgaattataactattactatatcatttaacccaaaggctccaaacaaagcaatatgtgtgccaagctgtaaatggaattcaaatctgcgatggccatgggaacacggaatgcctggcgaagtggaagtgtgtgggtagccatttgtgggtctgcatgccattcgcaattattagaggaaaaagcagcgatggagcggcataactgggagtcataaaatgtatatacattgctgtgcaaaccactcctccgaatctttactgcatttgacctttcaaatccagcactcaactctggtgggtgaaatgagttggggattgttggaattatcggttgtcggcaaacaaatcgttctgcgcacgtatatattttcacaattaataaggggatcgcccacgctccgaacaaaaatcattgcttagctttatatgtgaacaacgggcatatcttttatttggccacacgtatgctgtcatttccattgagtcgagctccaagctccagctccattcattgttgttgctccggaaccagtttgctgtggtagctgcagaggatcggggggcatgtggaactgtgtatttgggatgaggaagaggctgcagaggcagcagaggcgtgggctggcttgtggccatccgcaatttggcctaaccttaagaccttaaattaagccgaaagtaacccaattcggcaagatgggcacaagaacaacagatttgggcagaagccataaccgttcttcggctagggggctttgcataatttactcgcccatctatgagccatctcttaatagaaaactataaatttatttcaaatttccgtggtatttctgggtggggccgcgcttttttacggggcacacctacggaaaaaatggggctggggtggcatacttttgggacga

SEQ ID NO: 40448 - DNA, 2235 bp, DROSOPHILA
tgtatattatagaccttcgcgccactctagaggcttctagctgatagacaaaggatccaaaccggagaggaaccaaccatgtcgcacaagactagcaaccgtcgcagcagcgacctggagtgtccacttgcttcattgggccgcaacagcaatgcggtacgcgaccactaccaccacccgcatccgctgagctccagtccactggatccacaggcctacaaaatgatgtcccgcaagtcacccaatcccggcctggaggtggccgaagcgctggcctcgcgcagctccacgccgcccagcgaccaggctggggcatcctcgacggcggcggcggcagcagtgctccatatggtgcagcaaaaagcggcgacctttgagttgagaggccgccactcgcgaccaaccgagcagcagaccagctatggagcccattccacggcttcggtgggtaggcatgcgaagaagtccccagaactaccagctccagcgtcgaggaacgtggctcccgtaccacagccgcggaacttcctaacactagaacatgtcctgcaatttggaacccagcgacccagttggatgcacggcaacagtgcggacacggaggattcgagtgacaacaacgcgggtggcggtggagctggaagtggcagtggtggagctggaggacggagacgtgcccaaggtggccgctgcagtgtgcccactgtactcagcagcaatggcagcggcggcaatggagcccagtacctgctggacaagaaaatggagtcactgtatctgggtaacgccctgagaacccttcccttaggcgccgaagcgagtcagttccaaaacgaacgctactacctggaggattacagcagcggcagcgggaacgagcgactgccagaacgcctgcatcatccgcgcacctccagtcccagcgaaacaagtggatcggatcgctacctcctaaaccgcagctccaactccaaccacctgcactccaagggccagagcctctcggacgggctgtgcaacctgggacgcttctcgcccagcttggatcaaggctacgccacactggtctcaccctctcccacgggtcaccattcaagtggcggagcgggcaatgtgaccaattctaccacagccagtggagcgggaatcatggcaagcagtacgccaactacaacgccgcgaagaggagcctctagcaatggattgggaggaggagcagcgtccgccattggaccgccgccctggaaccgcaaaggtcccttccgctgcggtccgctctttgatcgtctgcccgacgaggccgttgtgatctcgctgcggggcgagcacttgaatggcgacaagacgctgaagatgatcttccgccagctttgcggccagagctgcaatggcgcttgtccggaagtggagcgcgtcatgctcgccgatggctgccgcatctcggacaagggccttcagctcctcacgcgccgctgccccgagttgacccaccttcagctacagacctgcgtggatatcaccaatcaggcgctggtgagcagcatcagtcctaatccccacatggagccaccgcgtcgcctgctgcttcaatatctggacctcacggactgcatggccatcgatgacatgggtctgaagatcgtggtcaagaactgcccccagctggtttacctttatctgcgccgctgcatacaagtcacagatgcgggtctgaagtttgtgcccagtttttgcgtctcgctgaaggagctcagtgtgtccgactgcctgaacatcacagatttcggattgtatgagttggccaagctgggagccgcactgcgctacctttccgtggccaaatgcgagcgggtctcggatgcggggctaaaggtgattgccaggcggtgctataagctgcgctatctgaacgctcgaggatccttggacatcgggaagtgcgatgtgagcgacgcggggcttcgagctctggccgagagctgtccgaacctgaagaagctcagcctgcgcagctgcgacatgatcacggaccgcggggtgcagtgtatcgcatattattgtcgcggtctccagcaactgaatatccaggactgtccggtttccatcgagggctaccgggcggtcaagaagtactgcaagcgctgcatcatcgaacacacaaatccgggattctgttgagatgttccatagccggcggtagacaccacaaagcacagaggcaggccatatgagcac

SEQ ID NO: 40449 - protein, 699 aa, DROSOPHILA
MSHKTSNRRSSDLECPLASLGRNSNAVRDHYHHPHPLSSSPLDPQAYKMMSRKSPNPGLEVAEALASRSSTPPSDQAGASSTAAAAAVLHMVQQKAATFELRGRHSRPTEQQTSYGAHSTASVGRHAKKSPELPAPASRNVAPVPQPRNFLTLEHVLQFGTQRPSWMHGNSADTEDSSDNNAGGGGAGSGSGGAGGRRRAQGGRCSVPTVLSSNGSGGNGAQYLLDKKMESLYLGNALRTLPLGAEASQFQNERYYLEDYSSGSGNERLPERLHHPRTSSPSETSGSDRYLLNRSSNSNHLHSKGQSLSDGLCNLGRFSPSLDQGYATLVSPSPTGHHSSGGAGNVTNSTTASGAGIMASSTPTTTPRRGASSNGLGGGAASAIGPPPWNRKGPFRCGPLFDRLPDEAVVISLRGEHLNGDKTLKMIFRQLCGQSCNGACPEVERVMLADGCRISDKGLQLLTRRCPELTHLQLQTCVDITNQALVSSISPNPHMEPPRRLLLQYLDLTDCMAIDDMGLKIVVKNCPQLVYLYLRRCIQVTDAGLKFVPSFCVSLKELSVSDCLNITDFGLYELAKLGAALRYLSVAKCERVSDAGLKVIARRCYKLRYLNARGSLDIGKCDVSDAGLRALAESCPNLKKLSLRSCDMITDRGVQCIAYYCRGLQQLNIQDCPVSIEGYRAVKKYCKRCIIEHTNPGFC

SEQ ID NO: 40450 - DNA, 2934 bp, DROSOPHILA
ggcatttgcacttgtgtgtctgacttcacaagatattttcaattggaagttatgtgtcgcagggaattgtctgccagagtgggtggcatcttattgatgggagaatgtgtgcaacacaacaatttaatggcgggcaactgacggatgttgcttcatgaaaaattccgaaataaagacgtgccacaagaattgaattgcaaacacgatggtcaagaatgcaggatcaatcatttaattgaaagacaattgaataagctgcgtaattctaaggatttaatcgcttatggaatataatttatttaattccacgtccacactcttttttttccattcattaacttacacaatttcccgcaatcagagcccaaggtcaggggacatttaaaaatgtgttagtctgggcaaaacaaacggcacgacaaactaaaatgtcccgattacatcttgaaatgaaataaattattgtgcacatcgcaacgagctgacccaaatacacaaagcgaaatgggaggagagttgtgctggaaatgggaatgcgaatgggaaaagcgaaggaccaacggctgccattgccagctgattatcgctaattgtgcccaaggaaatagaaattaaacgagtcctttatttcctagccagcgtgtgtacatgggtaattcgccgggcagcgtttaatttaatttggaacaagtctttaaatattcactgcaatttatttgatcgataattgagcagggcaaggttgacgatttgccgacaaattggccagacctttgatggataagaaatggatgagattaattgaggcaccaagccaggtggccctgatttcaatgtcagcgtgtttgactttttagaatgaggctggtttttctgagttgctttgggtaacgtaattccctttacaaaaataaaaacgtacaaaaaatatgcctcaagtaggcgatgaaatttaaatcacttccttttgatatccaaatcgggcaatcatcggcattttacatccgtctaaccaacagaaacattcgcatcctgaaaatttttacaaaatttcggtattacgtaaaatgataggcattcaaaaaaagcgaccagccgccggagagtacgtagtgccaaacaattcggctctaaatctgcagaataagcccagtatatacgatcaaacgcccaaccaaatggagaagaccaccaagtgccgctattgtgagaacatggccaagaactttctgtacctggagagcctgatccggaacaacaaggataacgacaagaacaacaagtgcagcttgtgcaactcgtcgctaaagtacttggagtatgttaaccgcaatattcgccaggttttcggcaacttcgattcaattgtccaggcggatcgtgctctgcaatccaagccggccatgatgcccaaatactcggtgggcccggctccggaaaaagctgatctgcgctccaagggtggcgccattgtctcccagcaaaggtcggcaaaaagcctcaagtccaagagcctaaaatcccttaaatctaagtccaaggagaagagccaaaagtcattgaagacgcttaaatcgcgtaaatctaccaaatcactcaagtcctccaagtccacgaagtcgagcaaatcgcagaagtcatccctcaagaaaattccaaccaaaccgaagagcgctagtcccaagacccaaatcagccatggcaagatgatattgaagcgcaaattccgaaacaaggtggctagcaagttgggcggcaacaaagtggttcgcagcgtcagtcagtaccgcggcctgggttccgcccgctccaaactctcgaagggatctagtcacaagaagctgatcaagcagcggtccgccgctccaccgaccagcatcaactggcagctcctcaaaagaaacctgcccaagcggcccaatccagtgaagtaggggaaaagatgaccggcgatcggcagattgtcctaaaatccaatgcgtccagcccaaatctctcatttgtcaaaatttttttaagtgatctttgcatgaataaactgaagaagacatagtttaataaaaactttttatattgtaccagtgagctatttataaaaataattaatcaaatcaaattaatcaaatatgcatttggaatgtcaggatttattttgacaaaatcgcttaaagtttaaattaccattaaataatgcaacaaaaaaattattagtggcctatattaaatttaatacctaacaaaaaagaaaatctcattgctttccccttttttttgaggtcaccgcgtttgcagtttgcataattggctgatgctaccttttggagatattcagcaggttgtcccttttaaaatgtataatttaaatattttgaaaaattatgcaccatgccgcagagtcgtgtcgccggggagtccttttttgagtccttttttttttggtcctctggctttgaatcgcttaaactgttgttggcgtcggcgctcttttaattgttgcaaatattatttttatttcgagtgttgacaagcacgcaattagcgtcccttaaatgttccaacccaaagccaacaaaaaaaatatcctggctgaccccgtttgtttaaagaatttttgcgtagaggtcgcaggccaaacggtcaaatgggcgacctagcttcaattttcatttaacgaccggacgacagcacccaaatattttcacaatttaaatgcaagtggattgcggcgatggatgggttgaacaagggggttcgctaagtgggtggtgggtggatgggtggtttgcagcggctaagcagattgccaacctaactgactttggggccgcggccggcagtttgacaatttttcgccatgcccgctcaaatatgccgcatacgcagctgggtcccccgaagcacgacccttcatttgtttatgggccacccattgac

SEQ ID NO: 40451 - DNA, 934 bp, DROSOPHILA
acatccgtctaaccaacagaaacattcgcatcctgaaaatttttacaaaatttcggtattacgtaaaatgataggcattcaaaaaaagcgaccagccgccggagagtacgtagtgccaaacaattcggctctaaatctgcagaataagcccagtatatacgatcaaacgcccaaccaaatggagaagaccaccaagtgccgctattgtgagaacatggccaagaactttctgtacctggagagcctgatccggaacaacaaggataacgacaagaacaacaagtgcagcttgtgcaactcgtcgctaaagtacttggagtatgttaaccgcaatattcgccaggttttcggcaacttcgattcaattgtccaggcggatcgtgctctgcaatccaagccggccatgatgcccaaatactcggtgggcccggctccggaaaaagctgatctgcgctccaagggtggcgccattgtctcccagcaaaggtcggcaaaaagcctcaagtccaagagcctaaaatcccttaaatctaagtccaaggagaagagccaaaagtcattgaagacgcttaaatcgcgtaaatctaccaaatcactcaagtcctccaagtccacgaagtcgagcaaatcgcagaagtcatccctcaagaaaattccaaccaaaccgaagagcgctagtcccaagacccaaatcagccatggcaagatgatattgaagcgcaaattccgaaacaaggtggctagcaagttgggcggcaacaaagtggttcgcagcgtcagtcagtaccgcggcctgggttccgcccgctccaaactctcgaagggatctagtcacaagaagctgatcaagcagcggtccgccgctccaccgaccagcatcaactggcagctcctcaaaagaaacctgcccaagcggcccaatccagtgaagtag

SEQ ID NO: 40452 - protein, 288 aa, DROSOPHILA
MIGIQKKRPAAGEYVVPNNSALNLQNKPSIYDQTPNQMEKTTKCRYCENMAKNFLYLESLIRNNKDNDKNNKCSLCNSSLKYLEYVNRNIRQVFGNFDSIVQADRALQSKPAMMPKYSVGPAPEKADLRSKGGAIVSQQRSAKSLKSKSLKSLKSKSKEKSQKSLKTLKSRKSTKSLKSSKSTKSSKSQKSSLKKIPTKPKSASPKTQISHGKMILKRKFRNKVASKLGGNKVVRSVSQYRGLGSARSKLSKGSSHKKLIKQRSAAPPTSINWQLLKRNLPKRPNPVK

SEQ ID NO: 40453 - DNA, 5782 bp, DROSOPHILA
aataactgctttaaaatattatggtgaaaaatctttgaacctgaatacaccacttgcaggaaaggtgtggtgaacagattgcaaggcgagagtgttctcacccggcagagtggccagaccgctgaggtaagatccgttagccccattcggatatctaaatcacaattgtttaagaagaaaacttgcaaggcgaggaaaaaaacatatattggtcactatgtttcgagtgcattgcaacaagtgtttccgtcatcgcaaaactgatccagccgtgcccttccacttgacccagtgccggcacgtgatctgcggcccctgtttgggccaatcctcgctagaaaagaactgcccgctatgcggccaggtgctcaaagcgatccagatcaaccgggatatgccaactagcgtggccaactacttcgcggatcccctgcgattccagcagatctaccgcaagatctccaagttccaagcggaccagcgagcatcggacaacctgggtttctaccgtcagttgcagcagctggagcaaaacaagcgccagctggagggcttttgcaagatggaggcgcagctgaaccagaaggtcgtggaggaaaagaagcgaatcgctgaattgcgcacctacatcgcttaccacgagaatgcgcagaggatgacgaggcgccggcacagtgcaggtgagagattccatacgccggagttcaaggaggcctggaacacctctatcagcacttcggacaaatcgccgtcggatatgccttctgatagctcccgccggtccgcggacttggatacccagtcaacgcggagaagatcttttggcagcgacactaaaggctttcgtctttagtcactccaattacttgtataattttttataggaattctaagactataaccacttctaacgattcaattaggttttgaccttccagaagattcccaatataaagaaccagatagattattaagttgcgcttaaggtactaattatcatccgtattctattactattactattcaaatcgagacgttccactactcatgtgcgggatatgataaccataaacggaaatataacaatctactttagcttacaaaactcaaaaatccccctagtagttttaataattccaaccaatctggggagcactcaccatccagcttgtcgtaaagcagtctgctccaacgtcggcgcaactcgatggcccgtcttaaaagctccataccgctgccgggcatgggcagatccagtcccagccagccgtcgcaggcgatctgtgtgatgcccgcgttcgtgtcaatggcgaagctgaagagcaatagcgtctgggcagccggcaggcggatgcagttaatcagatagggcttggcggtctccagcagcgacctgttgtagtacgtagttttttggggattagtatggcgctgcaatttcgtacagacgcacgcactcactggtaacagagcaactggtggcgcttgctgagcggaagcttgggcgtgtagaagtctggcttgggcagcagatcgctttcggtcagcttaagcagctcgaagtgcttggcgaattgcgagtttgggtgctgcagcacgaagggcttgagccgcgtgtggaagaactgctgaccaccacccttgcagtagttgaactcgtcgctgatggccagctgtggatagaaaccgctgccgagcagcagctttagcagcacaacgacgctgtgtcggtcgagccgcgacgaacgctccagcagcgccaactgtcgaggatcgaaccgcagccggaagtccacgtccctcatatcgtcgccctgcgcctcctcctgctcctcctcgtcctccgctacccgtccagcgctctgcttgagcaacttgcgctgacggggttgctcaaatcgctggcggcgcttcatggctttcagctggcgcagctcaccatgtcgcgttgcgcgctcggcactggtcaactgggagtccgaatcgctggccaccaccatgccgcagctctcgaggatgcgctggaactgttgacgcagcttggtcacctcatagaagcgctgctcctcgatgcccaagcgacggcaccactgtcgagtgccatcgcgccgcatcttcagctgcacccacacgttgtagagtcgcaccagggtgaagaggtcgccatgatcggactccagagactcccgctcgcgcacgcagcgctggtctgtgtgggcacgattcgtcagcgggttctgcacgctcagcatggcggccagggtcagcagctgctccacctcgggaaacacgctgcccataagcagcatcttgccgatggacagctctacgggcaagttggccagcgatctgcccagcggtgtgatcttttcctccacgctgagggcgcactgcaattagagattagaagtccggttgaattggggtctacacagttgggtatcggtgaaatgctcacgtgttgctttagcgccagaatagtctgctcgatgcgctccgtttccggggcctctatgaatggaaaggcccggacgtcgggcaatcccatggacaccatctgcagcagcatcgtgtcgagcggcacgcggtaaatttccggagtgggatatgcctcgaaggcgttgtattgctccgcagtgtagagccgaaaacagacctgcgctcggaaagtgggaatgtatgagaaatggagcaaccgtgggttaggttctagcttacacctggtcccgtgcgaccagcacgacccttgcgctgatccgcagacgacttggacacccagaactctttcagacgctggcccttgcaggttgcgtcgaagttcatctccttgaccttgccagagtcgaccacgaaccgcacgccgtccacggtgagcgacgtttcggctatgttggtggacacaatgcacttgcgcatgccctcgggtgcgtagtcaaacaccttgctctggtccgcgatcgcctggccactgtgcagcggcaggacgagccaatgagtctgttcggtggcatactcgtgaacggcctccacaacagattcgatttcgtttacgccgctaacgaagataaggacgtcaccgcgctcgctggctaggtaagatgattattaggcgatccctacaagaacatgataactaaactcactcggatactgctggtcaataaggctaagcacctggacaaatggagctggatcgatgcggtttctctgagagcgtttggatgtcgcctgtcccgcctttagttccagtgcaggaggcggcagatagcgcagtttgatgggaaataaacgtcccggcacctggaccagccgtgcgccctcctcgccgaagtagccgtggaagagctccacgttgatggtggcagacatgagtatcagcttcagttgcggccgcgccctcagtaagcacttggtaacacccagtagaaagtcaccgaataagttgcgctcgtggatttcgtccaaaatcagggcatcgtactggtctaggttggcggccaccgctagttgccgcagcaacaagccctccgtaatgaaaaggatgttggtgagcttcgtccgactgcgctcgaatcggatctggaatgccacccgactgccgtagtcgtccagcagctcgtgcgcaacgcgcttgcacagggagacgcaggccaaacggcgcggctgggtgcaagctagggcaacaaaaggtcgatcattggtaaggcagcctcaatgggaagccgcatactcaccaatgctgcggtagccaaagtcatagagatactggggcacctgtgtggacttgccgcagccagtgtcaccggccacgatgaccacgcgggacgtgtccagtgcctcgcgcaagtccttccggaagcgagcaatgggtagattgcgttgtgtctgccgcagctttcggatacgctggaacttttccgtctggcggaagtctaagtacaccagcaagatatgacgaaactgggactgcatttggtcgcgcgcctcctgaagcagttcgtcagcgtccagccgcaatgccaagtgcttgctgcggtgatacggctgcatgctgctcagctccgcctccgcgagtcgaggcggcagcacgggctggcccgtggagcgcatcatagcctcgtacttgcccacgaacttccagaagtcagcctcgttctccaccagactcctgcctacctggcggctcttggcctgcagcaggcccacgagctccgccttgtgatccaagaaactgaactcgatcagattgatctgagtcctgcggcggctggaggcatgttcatctgccttcttctttatccgagacattttcaccgaagcaaaatagttcctaaaatttgtatttacttcttcccacagcaaacgataacactgctaccgataaacggtcagctgtgcaagaacccaagccgataacacaattctggaatgtggatgactactaacaaggtttatttccctagattgctaacagaagatgctaccacatggcgcgctggacgccggacagcttattgtagtcggcgaggtggcgccacacgattcgactgagcctgtacttgtggacaactccgcgcggacgtgacgtaagcgcgcagcgttccctcacccggacgagcgatgagtcccgaggaaaagcagcgatctcggcgtcggctacctcgcgtagctccggcggcaggatgtcgttcttgcgcagcgagttgactcgcagccgctccacggcgttctccttgacgcacttgcgccgctttacgtcgcgaatcatcttccaatcggcatactttgtgcgcacctgctgcagctgttaagacaatgggctggatattatgttcgcttagctaggagtacgatgttaacttaccccgcagccggctatttgcacggactggcacacaaaacccccgatcctggccagagaattcatgttgttgctttcggtggtgctcttcttctttttgcctctttactttgttcgctatagtgtcggttattaacgcgcgggactatcgataggcaacagctgatgagcccatacagtgaattgcaaatttattgcctattattttcgtatacgagaactgggtaatttaaatgaaaaatacgatggcgaagcatgcggtgtggaatctataaggttaaaacatggaaagccggctgactttcgacctctcggaataagttttaattaacaattcactcgctttacataaccgcctagcagcgcgattcaaaacgagcgcgttcacacccattcgcagtggcgtacaattgctgttaccattcgccgcgaagcgcgtgaacacgtgtgccagtgtgcgtgcgccagtgcgtgcatgtgcacagtcgagcttgccagtgtgggtgtgtgtggtcgtctcacgtcgatttagaaatttgctcgtgcccgcagtttgccgttcgccgttttcgccttgtgtgtgtggtgtgtctactccgtatagactgccaatcgagtccagctccgcttccgagcagcagcagaagaggcatcgcaactcagctcagctcgctgatccacagatcccgcagtccggtgcaattcacggccaggcgaaaacccagtcccagtcagcagctgaggaagaacaagaacgaccaagcagaagaagcagcaggccgaagagaggagcagccgcagccttgcagagatgccttctagcgatcccctgccgcccaaggagggcgcgctcttccgcaagctacttgtaagccggtctaggtgaccctactgtcccataccttccccttcccttaatac

SEQ ID NO: 40454 - DNA, 3319 bp, DROSOPHILA
atgccgattggaagatgattcgcgacgtaaagcggcgcaagtgcgtcaaggagaacgccgtggagcggctgcgagtcaactcgctgcgcaagaacgacatcctgccgccggagctacgcgaggtagccgacgccgagatcgctgcttttcctcgggactcatcgctcgtccgggtgagggaacgctgcgcgcttacgtcacgtccgcgcggagttgtccacaagtacaggctcagtcgaatcgtgtggcgccacctcgcctgttatcgtttgctgtgggaagaagtaaatacaaattttaggaactattttgcttcggtgaaaatgtctcggataaagaagaaggcagatgaacatgcctccagccgccgcaggactcagatcaatctgatcgagttcagtttcttggatcacaaggcggagctcgtgggcctgctgcaggccaagagccgccaggtaggcaggagtctggtggagaacgaggctgacttctggaagttcgtgggcaagtacgaggctatgatgcgctccacgggccagcccgtgctgccgcctcgactcgcggaggcggagctgagcagcatgcagccgtatcaccgcagcaagcacttggcattgcggctggacgctgacgaactgcttcaggaggcgcgcgaccaaatgcagtcccagtttcgtcatatcttgctggtgtacttagacttccgccagacggaaaagttccagcgtatccgaaagctgcggcagacacaacgcaatctacccattgctcgcttccggaaggacttgcgcgaggcactggacacgtcccgcgtggtcatcgtggccggtgacactggctgcggcaagtccacacaggtgccccagtatctctatgactttggctaccgcagcattgcttgcacccagccgcgccgtttggcctgcgtctccctgtgcaagcgcgttgcgcacgagctgctggacgactacggcagtcgggtggcattccagatccgattcgagcgcagtcggacgaagctcaccaacatccttttcattacggagggcttgttgctgcggcaactagcggtggccgccaacctagaccagtacgatgccctgattttggacgaaatccacgagcgcaacttattcggtgactttctactgggtgttaccaagtgcttactgagggcgcggccgcaactgaagctgatactcatgtctgccaccatcaacgtggagctcttccacggctacttcggcgaggagggcgcacggctggtccaggtgccgggacgtttatttcccatcaaactgcgctatctgccgcctcctgcactggaactaaaggcgggacaggcgacatccaaacgctctcagagaaaccgcatcgatccagctccatttgtccaggtgcttagccttattgaccagcagtatccgaccagcgagcgcggtgacgtccttatcttcgttagcggcgtaaacgaaatcgaatctgttgtggaggccgttcacgagtatgccaccgaacagactcattggctcgtcctgccgctgcacagtggccaggcgatcgcggaccagagcaaggtgtttgactacgcacccgagggcatgcgcaagtgcattgtgtccaccaacatagccgaaacgtcgctcaccgtggacggcgtgcggttcgtggtcgactctggcaaggtcaaggagatgaacttcgacgcaacctgcaagggccagcgtctgaaagagttctgggtgtccaagtcgtctgcggatcagcgcaagggtcgtgctggtcgcacgggaccaggtgtctgttttcggctctacactgcggagcaatacaacgccttcgaggcatatcccactccggaaatttaccgcgtgccgctcgacacgatgctgctgcagatggtgtccatgggattgcccgacgtccgggcctttccattcatagaggccccggaaacggagcgcatcgagcagactattctggcgctaaagcaacactgcgccctcagcgtggaggaaaagatcacaccgctgggcagatcgctggccaacttgcccgtagagctgtccatcggcaagatgctgcttatgggcagcgtgtttcccgaggtggagcagctgctgaccctggccgccatgctgagcgtgcagaacccgctgacgaatcgtgcccacacagaccagcgctgcgtgcgcgagcgggagtctctggagtccgatcatggcgacctcttcaccctggtgcgactctacaacgtgtgggtgcagctgaagatgcggcgcgatggcactcgacagtggtgccgtcgcttgggcatcgaggagcagcgcttctatgaggtgaccaagctgcgtcaacagttccagcgcatcctcgagagctgcggcatggtggtggccagcgattcggactcccagttgaccagtgccgagcgcgcaacgcgacatggtgagctgcgccagctgaaagccatgaagcgccgccagcgatttgagcaaccccgtcagcgcaagttgctcaagcagagcgctggacgggtagcggaggacgaggaggagcaggaggaggcgcagggcgacgatatgagggacgtggacttccggctgcggttcgatcctcgacagttggcgctgctggagcgttcgtcgcggctcgaccgacacagcgtcgttgtgctgctaaagctgctgctcggcagcggtttctatccacagctggccatcagcgacgagttcaactactgcaagggtggtggtcagcagttcttccacacgcggctcaagcccttcgtgctgcagcacccaaactcgcaattcgccaagcacttcgagctgcttaagctgaccgaaagcgatctgctgcccaagccagacttctacacgcccaagcttccgctcagcaagcgccaccagttgctctgttaccagtcgctgctggagaccgccaagccctatctgattaactgcatccgcctgccggctgcccagacgctattgctcttcagcttcgccattgacacgaacgcgggcatcacacagatcgcctgcgacggctggctgggactggatctgcccatgcccggcagcggtatggagcttttaagacgggccatcgagttgcgccgacgttggagcagactgctttacgacaagctggatggtgagtgctccccagattggttggaattattaaaactactagggggatttttgagttttgtaagctaaagtagattgttatatttccgtttatggttatcatatcccgcacatgagtagtggaacgtctcgatttgaatagtaatagtaatagaatacgg

SEQ ID NO: 40455 - protein, 1070 aa, DROSOPHILA
MIRDVKRRKCVKENAVERLRVNSLRKNDILPPELREVADAEIAAFPRDSSLVRVRERCALTSRPRGVVHKYRLSRIVWRHLACYRLLWEEVNTNFRNYFASVKMSRIKKKADEHASSRRRTQINLIEFSFLDHKAELVGLLQAKSRQVGRSLVENEADFWKFVGKYEAMMRSTGQPVLPPRLAEAELSSMQPYHRSKHLALRLDADELLQEARDQMQSQFRHILLVYLDFRQTEKFQRIRKLRQTQRNLPIARFRKDLREALDTSRVVIVAGDTGCGKSTQVPQYLYDFGYRSIACTQPRRLACVSLCKRVAHELLDDYGSRVAFQIRFERSRTKLTNILFITEGLLLRQLAVAANLDQYDALILDEIHERNLFGDFLLGVTKCLLRARPQLKLILMSATINVELFHGYFGEEGARLVQVPGRLFPIKLRYLPPPALELKAGQATSKRSQRNRIDPAPFVQVLSLIDQQYPTSERGDVLIFVSGVNEIESVVEAVHEYATEQTHWLVLPLHSGQAIADQSKVFDYAPEGMRKCIVSTNIAETSLTVDGVRFVVDSGKVKEMNFDATCKGQRLKEFWVSKSSADQRKGRAGRTGPGVCFRLYTAEQYNAFEAYPTPEIYRVPLDTMLLQMVSMGLPDVRAFPFIEAPETERIEQTILALKQHCALSVEEKITPLGRSLANLPVELSIGKMLLMGSVFPEVEQLLTLAAMLSVQNPLTNRAHTDQRCVRERESLESDHGDLFTLVRLYNVWVQLKMRRDGTRQWCRRLGIEEQRFYEVTKLRQQFQRILESCGMVVASDSDSQLTSAERATRHGELRQLKAMKRRQRFEQPRQRKLLKQSAGRVAEDEEEQEEAQGDDMRDVDFRLRFDPRQLALLERSSRLDRHSVVVLLKLLLGSGFYPQLAISDEFNYCKGGGQQFFHTRLKPFVLQHPNSQFAKHFELLKLTESDLLPKPDFYTPKLPLSKRHQLLCYQSLLETAKPYLINCIRLPAAQTLLLFSFAIDTNAGITQIACDGWLGLDLPMPGSGMELLRRAIELRRRWSRLLYDKLDGECSPDWLELLKLLGGFLSFVS

SEQ ID NO: 40456 - DNA, 29781 bp, DROSOPHILA
ctatattgggagcagaaaaatgaatgggattggtgaaaaggaaacccgctttactttactctactttagttgtcaatgcaacataagctacttattgcgaatgaaagtagagagcgccacttacaagttatggtaaactcttggccagaagtaaatatttttaactgcgccagggcatcccatgggtcgagtacttactaaatatatatggctaaaaagggttccctatgtgtacttgcggtaattgcagagcgttttaactatgctggctgggcctttgttgcaatggcaactgcaacagcaacaacttgctgctcttacttgacatatgtcagtcactcactcacagcgcttgactttcgaggtagtgggtgcggaaaggataaccaggatgtgctgccataaattgcactatttgtgatgcactgactgctgctgcctctgctgctgcttggtactgctgatgacttggcacttaaactgccaaggggacaagtgccaggacattcgatcagctgcgcccattaagcatacgccatgttggacgctgaaaatgagcagccccgcaacatcatttgcatgcagcgcggtcttagccaaaaccatctgatgttgacttatgagcagcccgttctgggccgagaactttcagaaaaacggaaattacatttcgctcacttcgtgtgcaattaaagtttgccaggtggaatggtcgggtggcgggctcaactttgccctcttgcatttcgcatttgaaatagctgcgcgagcacacactttaaagtgtttttcccgttaatgcgaatttgaagtttgatcgatatgtggggcgtggttggcgccgcgtccaccgcccactggccacccggcattagaggtcacacgacgcgggcccatcatcatttcaacgccagttgccgcggcgaactgtttgatttgccgcatcgcagccgcccggtatacgtatccgtcgatttccaccaacgcgttcccctgaccgatgtccgatgcggcggcaatggccagcagtgatgaggagggcctgcccgccgggagcaccagcggtcgccagcgcgtccagcgtgactacagtgatgccaggttggaacgggtggccgcctacacaacgaccacaatgcgccttaagccagataaatggaccaaaatgatggcatgcgatgacctgcgggtgagttgccattataaaacagggatgaaataccgggaatgaaggaaaaacaataccatcatcaaattaataaaattattatcttaaataatatatgaaattatgcaagtgaatcatgttgtcattgttttcacaactttgcgtgcagcgcattgttgtggagtggcagcatggccaccgtcgtgtcctggtgatgactctcagtccgggcggagatctggtgcccaggagctgcctcagcgacttgtacctaccgtattcggtgcagagtgcccgtggctccattccatccgccatgttgcccgccgaagatgaggcgatggccacagttacggccgccgtttctgccgtggtgtctgccacgcccggtgctctgctcatcccgctgccacccgcctcttccagcttcacgactctggacggcgtgccacgtggcaagtgcgcctactttgtgcgccgcaatacttcggacggacccttgacagcatccaattttgcggagagcgtgctgtacggcgacttcccggtgcacagcaaaatcgagaccatgtcgctgctgttcgacgacgttcttcagccgctcctggagcaggctcaaagtcagtggcccgccattgtgcgcaaggatctgcaggcgcgcatcaaggaagtgcggaacacactgaccgaggtgggttattctggtggtgcactcaggaaaaagtcgagcttaacattggtttcctttttattcaattgagttctaagtaggcatcttgcaatgcgattatgatttagtatttacaacttgttatttccttatttcattaagaagatacattttttcctgagtgcagctggcagctgcggtatctcatcaaattaatctaattgagtgcagtggggcggaggattcgagtaggaacggaggaggcgcgtgcccaaccgatcccatttggagcgactcccgaccattgtcttggaagtatttcgcttaattggcaaaacttttcatgtgtctacgggcgatacgtatacattctgtctgtatatactttattgttatcccaacagattaagggcaaaaccaacaatcgcacaattttatcgttattagtttcgccaacaatcgtcgaggaagtgtttgcccacgtgagtcaagggtaagttccagccatcggaggatggccattgtcttagagttccgccctggcctccagctccttggagtggaagatgtcgccccagcagctatctggtattgtttatgtggccagagagagaaaggcttattcatgataccaaattgattttcattggcataacttttcgcatgaattggtcgaaatttatttagccagaaattccggggaaaattcaagttgtttaccccttggccatacatacacaactgtttgtgtacttcgattattttcccatcatacaaatgcttttaattaaattacaactattaaaagaaatagcaatcgtgagctggccatcagcattgttaagaaaattgtccagaatttagccaaaattgccatcggtacacatgtcaagagcctttacaatatattaattttgagatttttgctccaacaactcacaatgttcgattcgattcaataaagacaaaattgaaagccaactaacagcaaaatcaaaataaaccatcaagccattttgattggtatcagttagctgttgaaaactaactacggaaggatgaaaaaaaaaaatggcaacataaaaaggggaagtcaagtgcaaattttttgcgaattaggtcaataaatgtttccgctcattataagagttttcgccatgaaccaaagttacttgtaataaaattgaaaataaaaccaatttaggaacttaaaatcattggagaacaagtagagtataacgaaacttcaaattatagtacttaaatttaaagggcagacatcgaacaaacaattatatttaattatacttttgcgatgtttaatgaagtcttgatatttacagtcacttaagaccggctctagatcctaaattccgaaacctactggaggagatgttcataaattggactacccaaatgcatgacattgtcttggagcgctcggagtgtcaaccactgggctcgaccacccagtcggccggacatcagccaaagtacataacactggtttccttgcccgcccaggagattggattctggacgaaccggaagctcaacttacagaacatctacgaacagctgcgagagtccacgcacaagactctggcccagatattggagcgaatcgagtcggtttactatgagccatatgccaccgctttccggaaactggtggcagcctggctggaggcacaggatgtgtccctttggctgcagccgttgctacgtcagactgccgcatttaattcggttcagttcagcaatggtcacgatttggtggcgccactcgtccatatcgtgcacctggtgtggagcaatgccagatactatcgaagcacccaaaggatgagtgtcctgctgcgttgcatatgcaacatgctggtgcatcgagccgccgaggatctcgagctgcagctgcttttccagggcgatgccgatgagggattactgaaaatcaatcgaaccatcgcggttctggaacttttcaagtgagattgctttacttaacgaggtgtattaacttaaatattcattcgtggcatcatttgacaccattttcacagttatataattcaagaaccaattcatgatgtgtgtagaaattgaacaacctgaaaacattcatctgtgttaagcattagcacaatttgaatagtatccaatccattcagcattactgttagcaaacttccaaaattcaattacaaatttaatgttcaatttcaagacgcattacaatttcattaaagttagttgcagttagttataaatatgtaatagtacagttatagtacaactaatcttccgcaggcaacgaatgttggactacaaggaacgctatgccggcagccaggtccttctgcccgctctttccgaaggagcagctgcggtggcttcatctccatcgccagatgaccagcagcagctgtggcgcttctgccacgaggatgtgtttggccaaacactcgacggcttttcgctccaactgttggagctgcgccaggttttcgaggcagcggtgcagttccagcagctggagaagctggaagtgggcggattgcggggcaaaatactgactgaacgcgtcagagaggtgagcacagagcttgggtgtaagtttaatgtgcgatttttctaccctagattttcggcgagtttaaagtgctctttgagcagtggagcaacgtggacatcgatctcaccgccacggtggccagcaaatggaaatgctttcgacgggagcaaaccctgttcttcagccgaatgcagctgctggagcagaagctggccacagttttgctgcaggcctttgaacaatgtcacagctggatgcacttgctccggctgactttgatgtttggctccctgctgcaacgcgaagctgtgagaccggaattggcccgagtcctgccgcatatcctctttatctacgacactgaaatggagcagctggaggatagtgtgggggaggtcctgctgggctacgaaatacgtggcttggccgctttacctttggccaacaactttccaccgattgcgaatgccatgatgtggctggagcagcatataagtcgatgcgatgagtttggagcgaaggagttaagccaactcgttgagcagttgtaagtacattcgaagaaatcctctaaaactatgttatatacactgaaaatattagattgaaggaaaaatcggagctgcagacgctaccgatacagtggaattccttgctctcgcgtcgcaatattttgaccaccaaactgagtaatctgcaaatgaaaatctggatctcatggcatgagtgcgttgataagctcatcatccagggacttgatgaatcggttctgtcacgatcccaggatcttagccagctccacctgaacttctcccaagtactgtttaccctgctgaaggagacgaaatacttgttggctctacaggctactggcagtttatccggtgatctgttccagctgccagagccactgctcacactctatggccaccgagatgcctactgggaacgtcgcatacggctcatcaagattggggagttctacaatggcatccgctccggagaatgtgccgcagctgagcttcaattaattcgcaatgacctggcgtccatcgacgagcacgtggaagtggcctgccagcaactcacatggcgcaactacagtaagagcaatcaatcaatactggagagaatctctgaagaaatttatttaaataacagatgatgaacttgtggcgggcatctttgagcagagtcgcgacttatttgcccgcctgcagcaatcgcacggcaacctggatgccatcctggccagcatgcgtcgctggagccgggagccactgcatcagcgcagcttatacggtcgcaatctacttgatctgcgccaccaacaggaccgagtgcgtctgcggttgctgcagtgtgatgagaccaagatgctgctcaatcgcctgctgattgccaacttctgtctgttcttcaactatgagtcgcaggagtttcagctgtactccagagatctaagtgtgcaggaggtgggtttttaggcactttaaagggatttaaggtatcctgcattatgctatttgaaatgattatcctctatgtgaagctgtatgtttgaagctatcagtctgtcttcgttgcagtttattcgtgaatttccggaggagcagcggcggcagtacaacaaatatttggccagcgtggatgagttgatctgccgcgaagttcgggaggcgatgagaataaggtttttaagcaacccgaaccgacctagcacttgaatttcccactaccatcatcatcatcatcatcatcatcatcatcatcatcatcatcatcattgtcagtagcactcatcgccaatcaattgcacttcttcatcagacagccaactatttcattacatttcggcacgctggcagctcctttcatgtctcatcagaactaatcaagtaaatgagcacgaaatcgcacaactgcaaccgcaaaaatgaaagacacctgcaagtgcaagttgcaagttgcaagtgcaattggaattgcaactgcaagaaccacactttgcgaccgcagcaatatgggggcaaacaatgccaacaacaaatttgccgggggccgagcattcatgcgtcaattgcatgtttcacttagcggcacttttcgtgattgcatgcagacaacgtcggccaaaaataaataggggaaggggaaggggggccacattgggggcgtggctgtctcagcctgcaaacgaaataagctgcaaagcaaactgaacactaaatttaattttcacattactcatacgccgtgtaattcagtttagagtatttgtacaaagaaatgacagcaacagcaacagcaacgacgacgccaacagctccaccagtggatcctggctgttcagccggcatggcgaggttagtccttcagcaaatcacaacgccacaggcgacatccactgcgggagcgggtgctagtggcgcaccgcccacagccaacgatgctccactcttcgaagtaaaattggaactgacggaaacggaaatacgcttttcgcccgcctttgatgcaagtgtggaaaataattttcaacaaattgtggagcagctgttgctcgatataaaacagacatgcgactgcatgccaagaattgtggctgacaatgccccgtcagaggatgatgaagatgacgacacggcgacggtggactacgaacaggagctgaggtgggagccaagagaggaccgagcacaggaattgcaggagaggaagaagaaggacttggagctggagcaggagcaaggcgatccaaagccgcaggccgtgcaattcaacctgctggctgccgccaaggcgtacagtcaaaaaatggaatgcactggtaaggatttcgccaccccaataagtggtcgcattgcgatttaccctatcttagggcatatctatacttccgtatatttggttccccttttatattcaataaattaccgataagttaatgtgcataagttgaagaacaaattccaccaggctactttagttacagtatggcaccatattttgctcagatctcagttcctttcatcctctttttttttccacatcccagccgatggcctggaaatgctcgagagggcgatacgcgatgccctggcggatacggtggcggcggcatcggcttacgctgccaaattccaggcctatgcattcctgtggacccagcagagcagcgaggtgctggccgcgtgcatgcaaacagccagggagcagacgcaccacgtcagcgctggcggctatgccatcatggagacgttcaaaaaggaggtgagccggaaaaggcaaaggaaatgcccccggggtgccgaatgccaacagctttagtggctgcgacactcacaccccacagttctgggagcagataagaagtggggggtggatgaggcggacggacgaacggacggaggaatgcagactgggtcgctcaattggcagccacacaatttacgccatgtagcccctgagaccaataacgcttgataaatgccaaccatttagggtcaaatgtgtggcaactgaccgggccaagaaggaaataagcgaaaaaaggcacaggatccccgaacgaaagaaagcaaaacaccaaacaactgcttaaccaccacatggcgtcgttgacttatgttctggtggcaactggaacccacttcctaaagcacagcaggcaaatcgccgacgtatgcgtaatattttctttaaacaattatcaaacgccccgaaaagtatgcaataaattacccaacaggcactcgcacatacacacacacacacacgcaacaacaaatcatggtcaaagtgcacggacatggcgggaaattgggtgttgcccaataaaatgagggaaattcgccagaaggaaaacctcgaactgcaaatggtctaatcttaagcacaatcttaagttcaacacgttcaaacttgacttcctgaaagttatcaaatgttttgataaaagaggcacgagtttcaatagataattttctatcaatagtttgcttttaatattggaattccagcaaaaacttcattccttctgtgatgatcactcgatgattttcaacatatttttgacatagaagcttcccagacataagttcagtgatgccccacttccggcatagggcacgaaaaatcactggccggcattttatttatgactagccattgtgttgcctctgaggcagctggtgcctcttaataaaccgacagcagcagtagaacccactgtaatatatacacagcacattgggacttatcctgccacacacacacacatatgagaaacacccatgtgtggcaaattagcaaataaattagggtagggcccaatcaaaggatgttgtcactccataaacattcacattttttgcagatcgagaactacaacgaagtgcatgatgccattgaccagtgcgagaacagggagtgcatcaacggttggctggccctcgatatcaagcccctcaagtatggactccttaatctggcctgcaagtggtcacacatgtgcaagaagtggctactccgctacgtccagggaactctgaaggtgagacccgcaccccaaaaagttagaatacactttaaatggagggaacactccatttgcaggagttgaatgccttcattgctcgcggcttcgagacactccagctgcacatcgctcgccaggactttgccaccctgcttcgcgtcttggccattatgtcggagatccgggagagggaaccctatgcggacaatgtgttcaagccgctcaaggagatcatgggtctactgaagacctacaatgtggagttcgagccgcagctgctgcgtggaatcgagcagttgccgcaacagtggcagcaactgaagcactcgagtaccgttaagcaggaggcgctgcaggacacccgcttccaccagcaacaacgtgtgaccgctctcatcggcctgcatacctgccacctgcaacactatgcccggcagttccaaaagatgcccgtgagtggcgaatgaaatgtggcttccattatatttacattttgtttccagttctttcgggtgccctgcccgcaagtctacgatgtatgcgatgaagtctaccttcggttgcaccgcttccgccgacagcagcgcctttacacgcgctgggcccgacttcttgacatccagccacccgatcctgcaaccctgcagttctgcgaggtggagctgagaagggtcaaggtgggtacatgtcaattaatcattttatatatatgggaaataacaagatataaatacatctcaagcttaaatatatccgttggcaacatttagtacttaacaatattaatattattttaaaccaactccctttgttgcttcataagctagcgctagaaacggggttgtctcaaccatatccttgttagcacagcaaaactaataattgacccatcgccggcagcaattgtgggactttgtgcgcgtcatcgagtcgtgcatcgtggcgtggcacgccacgccctggctgctcatcgacaccgatgacatggagcacgagtgcaagaagttcacccgcgacctgcgcaccctggacaagtgcatccgcgagtgggcgccatacgttcacatagtgggcgtgctgcgcgagctggtcgcctcgctgagggccatcacggagctgcagaatccggcaattacggagcgccactggatggagctgatgcagctaacaaaggtgagcacaatgggaatggcgaatggggtagggaatatgtgtgtgtgtgtctttccaaatgattgagcgtgccaatattggatcaatggagccggcaatctggccgccggctgatgtctctttgtgcccagtttacatggcggtcacaatggcgcacattgggcaaacacattagcgcaggtgatgtgttgttaaacagcgagctgaaaacctcggaagctggaactggagctggagctgcagggcctgtcacaggttatggacacatctggtgattgcctgtgcttttgcccaatcaaagaaacactgataacaagcaatgcgaatctttcaaactatcccagcaattagattgtatcacatagatcaaaggtcgcataaataactgaaacttaatcaaaattcccgcttatctcttcatgctcagctgagtggacagcattccatggaggagctggtaagtgtaaattataatcagtagtgtaatacgaaaccaaatcagtcttcctcattcgaagtcatgtattaaaatgtagttatcgcatttgctcatctaagtccaatcagaaaacggccactaggcatcggtcatcctgggttccggattatgtgcattgttcaatggcattcctccagtttatggggcgtgttctctccattacataatagcactaacaactaacaattggctgatggacagcatagctcactactgttaattatttaatttaccaaaattcggtcgaaatgtgtgattaatattgtgtgccgagagcgacgaggaaacttctaattgacattcaaagcaatcaattacactagtctacacgaatataaatatttaaatattaataccaaaattcttagtcgtaaaaaggtttcagtatgctaatgacttttatctaacttacacattgcttgcaaaaaatatactttaatatttttgttgagacaaaatacaacgcagtgttttgctaatgaattaatcccctgacttttgagacatccataaatccattgaaatgcattcaaatttcggaataattagaccgactaggcgtatgcgtaatatatgatttccacactgcagctgtcgtacaaatgcaacaaatccacaagattggcccaactgctgaccctgcagctgcagcatcacgaggaggatatcaagaacactgtggaccgtgccatcaaggagatgacagtgacgaaagtgctcgacgagatcaaggccacgtgggcgcacctggaattcgagctggagcagcaccacacccgtccacatatacagttgctgaaggtatctgaagagctcatcgaaaccctagatgacaaccagatgcagctgcagaatatctcaacttccaagcacattgagtacctcctggacaagctcacccactggcaaaaagtcctgggaggcatcgatactctgattgtcaactggtttgaggtgcagcgcaagtggatctacctagaatgtatctttatcggatcagcggatatacgcgcccagttgccagcggatgcggcaaactttgagaggatcgatgaggactttacggctcttctagccaaggtgggtcatcacatgcaacattcatgaacatttgaggatttaggattcttctataggtgcaggaagttcgggtggtcatgcaggtggtgttgcgacacgacgatgtccttgcccaattgctgcagttgcaacatcgactggcagtgtgcgagaaggctctaaatgattacctagagaccaagagattggcctttccacgcttctacttcatctccgccgccgatctgctggacatcttgtccaacggtaacaatccgcaggtgattgaccgacacctcatcaaattgttcgattccatccttcggctgcagtacgagaccaataccccaaatgccttgggcatgcactccaaggagaatgatgagtatgtgcccttcgtttctttcgatccggatcaaccggcgtttatcgtttgcggcgggagagtggaactgtggctcagggccattatccagcaaatgaggagcaccctgcacgaattatttcggcgcgccctgcgcgtttttggggagaagccgcgggaactctggctctacgactggcccgcccaggtggcgctgtgctgcagccaaatcagctggacggcggacgtgaaccgatcctttggctgcatggaggagggctacgagggtgtaatgaaagagctgcacaagcgacagattgcccagctgaatgccttaattaatctcctgctgggcgaactgtcgcccggagatcgccagaagatcatgaccatctgtacgatcgatgtgcattcccgcgatgtagtgggcaagatcatagcctccaaggtggacaactcgctggccttccagtggcagagccaactgcgccacagatgggacgatgaccaggcgggtagctccagtggccgggccagcacggccataagttgtggaggaggcgatgaggattgctttgcgaacatttgcgatgcggagtttcggtatgcctacgagtatctgggaaacacctcccgactggtcattaccccgctaacggatcgctgttatatcaccttgacgcaggtaagtgaaacgaatgccacgtggcgtatacgcaatattaattgaataaaggcaaataacttgcacattgtagtcatgcaaatcctttctaacgagtcctgaattaaatataaaccttttcaacgcctgccagggggcgttaatggatttagcagcggaaatccgctacaaatgtaaagtccatagcccggctttgaataattgaaagccaatgtcccgtggcttgaatatattaaaaccagcagctagttaaagtcagttgagacaaaaacccactgatagctgtgagtgacaagaatgagaaagggcggaaattcaataaattaaatgtatttgcgtgtgcaaaaagcgcagattattgcattgacagtcaaatatttcatgcacgactgctgccatatcagatgttatatcactgacacccgcgaatcatattgttaaaaatgtgtcggaaagtttcacaaaatttaggtgtgaaaactaacatcggagaaaaccaatcacacatgtcaaatgcaatcatgttcatatttcacattacaataaatatcatatttccgaatcattggcatcaatagcacttctcattgcattcagttgcaacatgtcgcagctcatcttaattaggatagttttaataaatacttcattgaaattgattacaataattacattcaataaaaaaaaacttcttgatgaggtaaaaatttaggggcaatccctattggcaatatatgttgcaatccatctgcgtagctcagaatatcttacagcatattttcagtaaataccctattttcaagtcaagaacatccttcaggcagccattctcgacaattgagaaatacgtttaaattgagtgcagcataaccaggtgattgcacaaaaccgcatcgcatcagttttgcgaagcagtattcaaattggagttgccgcctgcggcaaattaaacaactcgttagtggaaaataaatgtagctaccaatttacatatgccacctctaccaacgaatatctcttggtttcttcccagtccctgcgattgcgattggccggagcgaccgctggaccggctggaactgggaaaacggaaaccaccaaggacctgggacgcgccctgggcgtaatggtttatgtcttcaactgctcggagcaaatggactacaaatcttgtggcaacatttacaaaggactcgcccagacgggagcctggggctgctttgacgagttcaatcgcatctgcgtggaggtcctgtccgtggttgccgtccaggtgaagaccatacaggaggcgataaaggtacgccgcccgcttgcaaattgatttcagtcacctttcctctgtttcgccatcctgcaccgttctgcattgattgctttaccaggacctcgcagaccagtggtgtcctgtcctctgtactgctccttctcctcttccttgtttacagatgcataaaacccaatttatctttatgggcgagcgcatttcgctggagccgtcggtcggaatttttatcaccatgaatcccggctacgccggccgaactgagctgccggagaacctgaagaccctgttccggccatgcgccatgattgtgccggacttcgccttgatttgtgagattatgctaatggccgaaggcttccaggatgcccgtctgctggcccgcaaatttatcaccctgtacacgctgtgcaaggagctgttgtccaagcaggatcactacgattggggtctgcgtgccattaagtccgtcctggttgtagcgggcactctcaagcgggatgaccacagtcgaccggaggatcaggttctgatgcgagcactacgcgacttcaacatacccaagattgtcacggaggatgtacccatatttatgggtctcattggtgacctcttcccggccctggatgtcccacgaaagcgggtctttgagttcgagaaaaccatccggagggcagtgaatgaaattaaactgcagccggaggagggattcctcatgaaggtggtgcaactgcaggagctcctcgatgtgcgacactcggttttcatagtgggcaatgcgggcactggaaagactaagatctggcaaaccctacgagagacctatcgcatccagaagctgaagcccgtgtgccatgtcctcaatccgaaagctttgtccaatgacgagctcttcggcatcgttaatcccacgacgagggagtggaaggatggcttgttctcctccattatgagggagcaggccaacatgccaccaggcaatcccaagtggatagtccttgacggcgacattgatcccatgtggatcgagagtcttaacacgctgatggacgacaacaagattctgaccctggccagcaatgagagaatatccttgaagcgcgagatgcgtctgcttttcgaggtgggacacctgaaagcagcaactccagccacagtttcccgcgcgggcattttgtacatcaatccgcaggatttgggctggtcgccgtgagtaatccaaaatagcattgtaaaaaatatatatatatactcaaaaaacggttgaacaccgttattttcaatttttaccatgttacaatacatttcgtgcgagtgttaaaacattaacaatgcaataaaatattcgatgggatgtagaatgtcatactccattgaactcgcgaaaaaaaaccgaatgaattggaatgccaacagatttttatatttcatcttttttacagacatttttttacaaatccttccttttcctttcattagctacgtatcctcctggctggaaactagggtggacatgattgagaggggcatcctcaacgccctttttgagaagtactttccctgcctgatgcagcggcaacgcgacttccggcgcattactcccatcacggacatggccatgatccagatgacctgccacttgctggagtgccttttggacagcgatgaaggaaatgcggatggacgagggcgaggaagtgcaaccggaggagctgcaaatccgcacagtctgcatcacggcgagctgtcccatgaggcgatggtcatggcactggaaacgatctttgtatacgccacggtttggagttttggttcggccctcagtcaagatgtaatcatcgactggcatcgcgaattccacaagtggtggattggcgagttcaaggacatcaagttgcccagccaaggcactgtctttgattatcaactgaatgtgcagacactaaagtttcagccttggtctgagttggccgcccatcagtctctggaggggcaaattgattcggagactcccttgcaggtaataaatattatttattaataaatattctggggatagaagtaccctataatgcgaacttaccgaatagaatgtgctgatttccactgcggagaccattcgactggcctactttctcaagctgctcatcgaccgcaatctggcttgcatgctggtgggaaactctggttgcggcaaaggtgccatcttccggcagctgttcggtcagtatgccaacgaccaggagctgctcgaagtggccgtgtcggcggcaacagctggtgacagcagccatcagcagcagtcgggcaatccagcaggagccgtagttgtgcgccgcaaggcatcctcctcagccacgccacttctgaccacagtgcaggccacgcactttaacttctacaccagctcggagatattccagaagatgctcgaccgaccgctggagaagaagtcgggacgctgctatgctccaagtggaccgaagcgcagactcatctactttgtcaacgatttgaacatgccggaggtggatgcctacggcacagttcagccgcacacgataatgcgtcagttcatggactacaggcaatggtgagtgtacgcgagtgtgccgattgttgtggttagtgattcagagtcatctcccgaccaggtacgaccgacagcgtctgcagctaaaggacattcggcactgtcagttcgcagcctgcatgaatcctacagccggctcctttaccatcgatccacgtttgcagaggcacttttgtgtcttttcggtggcaccgccgggcgaggatacactgcatcacatctatggcagcattctgagcagtcacttggagagtccaagtcaaggatttaccaaagagattcgatccattggtagcctactggtgcgagtgggtattgccttgcaccgtcgtgtggaatatgcctttctgcccaccgccctcaagttccactatctgttcaatctgcgggatctcacgggaatctatcagggattgatgaatagcgtgggtgctccggcatcggcgggtggaggtggtgcatccggttttggcggcaccatatgtagcagaccctctgaactgatgaggctctatgtgcacgaggcctttcgagtctaccacgatcgcttggtggatccctacgacattaagtcgtttaagtcgtccatacgagacattttcaaaaaggatttcgaggactttgacgaggattttgtgtttgctgagccgctgatatatagccattttgctcaatcgctggtggaccagaaatatatgccactgaagagctgggactccttgtaccaattgctaattgaggcacaagcaagttacaacgaggtggtgggttacatgaacctagttctcttcgaggatgccatgatacacgtgtgccggtaagcaaaacatagtttattcaacttacataatatatttttattttattattgacagaatcaatcgcatcttggagagtccccggggaaatgcccttctaattggagtcggaggttccgggaagcaaactctggcccgtctggcggcctttatatcgtccttgaatgtatcccaaatccaaatcaagcgaggatttggactactcgatatgcgtgaagaaatcggcaacctttacatgaaggtgggcctcaaaaatctggcctccgtgtttctcatctcggatgcacagattcccgacgagtccatactgatgctgattaatgatctactggcatccggtgaaattcccgagctcttcaacgacgaccaactggacaccatcacaaatggcatacgcaacgaggtgaaacagagcggtacgctggataccaaggagaactgctggcgctattttgtggagaaggtaaggcgactgctcaaagtggtgctctgtttctcgccggtgggccaaactttacgggttcgggcccgaaaattcccggccatcattagtcgcacggccattgactggttccatgagtggcccaaaagtgccctggagtccgtttcccagaagttcctcaatgaaatcaacggtattctggaggtaagtgtgacttggtacaaaagattagataaggaaaaatcatttttgtttgtttttaaaatgcacatggctttcattttttcgagtgcactggtagcccgttctcttatttatgcgtctgtcgggcgcaatttacaacagcaaaccgtcaggccggacactttaagtcctggcaaccaggacgagtgccgactgacctgatccatgtgctctttccgtttcgcccaaacgaaatttccacacagcctgctctggtgccgcccatcggttgctttatggcttacgtccacggcaccgtgaatcagatatcgagaatttatctgcagaatgaaaaacgctacaactacacgaccccgaaaacttttctcgaatacattttcctctaccgcaaactgttggtggacaaaaacggcgagttcgccgagcgcatcgctcgtctgcagagcggaatgtccaagctggcggagtgcgcccgtcaggtggacacgctgaaggtgagtaaatgatggagtggacgaccggcgaatgcggcacggcgtccatatggcatatgagaatgaaatgtgcatgcggtgaatccggttcgcgggtgctaatacactgtgacatcaatttggaattcggattaaattaatcatataaaagatataaaggatttcattataagtggatattattgatattattaggtatgttttacaaaaacaaatacataaaatactgaaaaatcggtaatgaaccacattgtatattgatcccttaatgttcagagctcaataatctcaacgaaatcaaattaattgctcatttaagattccttatttaattcagccagacttattttccactctgcacaaacagattgtgcacactagtgtccatacctcctaccagtatgccaacaaaaaatacaaataaaaagtattacaatctcggcagagttaaaaattgtgtctgtctgtgctatcaaatattaattaaacacgaatgcagggtgcccgcaaaatcgatcatcattgggcatcggctttcaatggtacactgccattcgatccggtggcgaagcgttcgccattcaattagtgcgcttaattgaattgttgttgctgcaaatctgctatccacttgtccaactccgggcaacatcaatggcggaaaccggagaggcggaaggtcgctgccattctttgagtttttaacgccgtttccggttacctcgcgtatacgcaacggagacccagcggcatcacgtttatttcgtatcgtactcctcgccgctaaacaacattcagtcaactgcgatggcggtgaagtgggggaagcagaccaaatgttatttaaactaattgaattaattgaattcgtttccctcgaacaaaagccgcttcattttcccgagttttcactattgtgcttctgcttttctagcgatggggttcacctgtagaaatggtataggaatgggtaaaaaaaaagcataccttcgacattgaaaggaatttctaagcagtgtttatttttaaaagaacgtaaaggcaatagattaattttagaatatacttttaaaaagtaaatgtgcttggttaaaatcgttatctaaccatacgattcctctcatcacttcctcaattcacatgtatttgtgtggctgtgcccccaatttgtgcgccatagttgctctgcgtaaatattgagccatcgtgccggggctttaattattttcgtcaggcgtaaaagttttcagctcactttgattttggctttgagtttcaattgacgcaattcaccgaattttctaattccgcacgcagcaccaactggccatccaggaggttcaattggcggccaaaaacgcggcggccgacaaactgattgtgatcgttagtgccgaaagtgagaaagtgaagcgggaaaggtacatcgcatcggaggaggaaaagcgtgtacgtatcatcgaggaggatgtgtcgattaaaaccaagatgtgcgaggaggatctgcgtcaggcggaacccgccttggtggccgcccaagcagctctgaataccctaaacaagaacaatctgaccgaacttaagtcctttgggtcgccacccaaagcggtggtgaatgtctgtgccgccgtcatggttctgttggccagtaatggtaagattccgagggatcgcagctggaaggcatccaaattgatgatggtgcgcgtggaccaattcctcaacgatctgctcaactataacaaggataacatacatcctaatatcattgagacgctgcaagagtatctaaaggtgggagaacatatgattttacatttttcaactatatttcaattgatattctcttcaggatcccgagtttaatcccgataaggtggtgcaaaaatcggtggctgccgctgggctatgtgcctgggtgatcaatctacaccgctatcaccaggtcttcctaatcgtgggacccaagcagcaggctctacaagactcccatcaggagctgctggaggccagggagcggctgcagtacctcaaggctaagatcaataatctggaggccaagcttgccgagatccaggccgagttcgagaacgcggtgggcgagaagcagaggtgccaacgggaggcggacaagaccgccttcaccatcgacctggcccatcggctggtcaatgggctggccaacgagaatgtccgctggaaggagtccgtccaaaggtgagtccttcggccatgtggttgcgggcgtttggttatagcactgcatttatgagtaatcaattattaaatttaatttacattctgtgtgcgttcgccatggctgtaattgcttcgccagccacttgtcggcggggtggagaagtgtttttgcactgaaaaaaatatatataccgattaacccaaaacggatatcttaagttaaggaaaacataccagagtatacttacttgccctaaaccttttgtttataaagcgtttactgctaatatccccagttaatgttgaaaaagctttcataaagcgatagccaattaaatactcccctgtcattacgttttttttcccgaagtgcatgagaacttcgctcactggcggaccatggcggcaataaagggccgtaaattttatttatccgctcccatttggcgcagagtgctccggggtccccgaacccggctcattcactcgattgcgcactcgtcggaaggcaatgaaccgccaggagtgacggcaatttgcaaaaatcattggcagttaaccgaaatgcatttaagcagctcgacgccggaggcacgtactccaaataggggtatgcaaacttgtcataccaagtgcgtcgtgctgggctggtgctaatcccatctgttgcagctccttctcgtgctgcttcgtgctgctccgatgatgtgagccacgaaaatgtggagccaaggtgccaggcacctgcctaacaagccaacaattgcagttgacaagtgtgaaagttgccacaatggtgggtggttatggcgatagctacgaaacccgaagaaacgtggaaggcagcatgtgagcgagcggaaggcaaagcctattaggatttccaaggacatgggtgatggaaacgtgggctttgtgcatctccgcttggaaatcactgatgcagcccgagaaatgtacatgatatatccaagcgcctcaaggtatgcaacatgtcatcatgcgtgtcattgggataatctacttttacagctgaactgcaaagcaagtaaagccttgtcaaatatatgaaatgattgaaaaatattctgcatttagttaaaaattattcactactactatttattagcaatcaaatctgcacagaatcttttaaaggaaacttaatattcttattttcattcggcaaagtcacaaaaagcagaaatacgaatctattttctcttttataaaatattgcataacttttggcttcaactcaaaaacacaattaccttgcattgttctgatttcggagtccgaaattcggactaaccttaccgcaagatgtcatcaaaaataaatatagttcaataactaatgtgcaatggaacatttcgaaattttagttcctgagtttgattactcggcgactttcgaaagttcaacatctccgtggataggctccctaaacatccttattccttattgcttggtttcactccattttcatggatttaggcagagtctagaaaaagagccagttaggtctccgggagtggaagcaattatgtcacagtcagtaatggcgactacttcgtttttaagatcgatagacaagagctatatacaatatttgcagcaatgaagaagtcgaatcttccatcttccatttgactggcattccaatgtcaaggagacgataccttgggggattatttttgtatgctgcgagtataaacattcagcagctgttagatgaagtctcaactggtggagtgatcgtgtccaaccgcagcgttgtggctttatctgagaggaaagcagtggtcctctttccccgggaagatgaagcggctgccgttgtcaaataaaactttgcattggtttttacattgtatcaaatgaatcctaaataacttttcatgtagaaaacaaaatgtaaagagataacaaatgattttttctttttttgcgtttatgtatttggggcgggatatgataacaaatgtgacacaaaataattcatatgtgcatttagttaagaatgtagttactttttgcggttttcattcatttgttagcttttgtgactttcgtataattaattctaattagccgcaaaaaaaactggtgatagcaaccaagttgttaattaataatattactagataatattgtattacgttgccaattgtaatgggaattctgtttgatctcggtcaaaatcaaaaattaccaaattgaatggaaacacatgcaaggcaaaagcagagctcgtggcaatattcccatcaaagccatcgccaggtgccaaaaccattttcccaaaatatggtttatctttgccgattcaaagagccaaaattatcagtaatcaccaaacttgtgccaaaaaacgttacgatttaatggcacctgaatggggaaactaatgaaaacgcaaccgttttggggtcatgaatatccagaattttcattcaatgccaaaaggacccaaaaagcagtggggcgcccaactatcaattatataaaccatcaggccacatgcaataagcattgggcaaaaacttaatcaaattcatatagatgtcaatggcaatatagcattcgaacattcgaacattcgtacattcaaacattcaaacattcgtacaacacgcagagcactccgacacctttggctgcccattgacgactggttgcattcattgaaattcaattgagtgcgcgtgcaagccaaaagaaaatccgtaaagggcgtccatcgatgctgctgatgatgatgatgatgatgatggtgggggttttgggtgtgtttcgggggttttgggtgttttggggtgggcaaagtactacatttttcgcacctaaacaactgctgagtgcgcacacaaactgaccagctgaacaacccatacaaaatgggctgcgtcagcagctaaatcgccgggggatccggctccgaatataaatgcatatgaaatacgtattgaattacgaaaaatgaaaaatttctcaactgtgtgtgtatgtgtgtagaggtgtgagcctggtcgatccttggaaattgaatgcattgctggcaaaggagcaacagcctcgactctggactttgccagtgagaattgttcaaatatttatgaaaatattatttgacccgctacggcaaattgtttgtaccttcggtgggtggcgttgggctgccttttcggacaggtgtgtgtgcgtgtgtgtaagctgctctgacttgcatataaatttctgcatatttgacaatggcattacacacgcacacacacacatttaaatggatcctcctgcaggatactcgcatttggttgccaacttattgttgttattgttggagctgttggcatagttggtcgtgctgccttcgaaaaatactatccgctctaaatgagaatgctcttatgtcacctgacaggtatttcaacaaaattcaacacaatattttcagcaaaaaacaattatgccacacacacaaatgaaaatggcaggcagtggcgtgcatataaattcccagccagggttttaaatcaacaatgatctaccatgtagccatgttatattgggaaatttcaagcatttttgttataattttagccccctgtttcgcagaggtctctgatcctccagcaattaacagattattcaattacaaagcattactcgtgcatataaatgagcataaatcattgttgttttcagtttttaggagagaatgtctggcggagaagtgtggtggccactggggcttactaattgaaaatagcttaagcaagcactacaaaaagttgtcctgcgaggagtctgccccttgccaagcagctttgacataataagctcaaatatttcaataagagttggcatgcagcaatttccgataatttatgcaaccacttcagctggagctgcagctagagcccacccatcgcctgtgagcccacccatcatcatccagcatggttgggaatgtcagcaacaaaaggcaggaacaacaacaacctcctacttcctcctcctccgacatcattattttttcaatttcccctcatttaaatttaaatgcagctaagaggcaaagggggggcaacgaggccggctgcagcggaagtcgggtgatggtgcaaccttaagcttcctgctgctactgtaatttatacgatttgttagcatcaaaagcacgggattaccacttacacttgcctcccccattcctttatatcatccgtagcctgctggccaagataggtaccctgcccggagatatcctgctaatttcctcgttcctgtcgtacgtgggctgcttcacgcgccgctatcgtgaggaactgcagcacaagatgtggctgcccaactttcgcaaaatcgatgtaagttcgcactttcacttgccacagttgatggaacttaaacttcgtttcatttcgggctattagccccatataccgcacaccgagggcgtggataccctggccctattctcggatgacgcccagatagccgcctggaacaacgagggtctgcccatggaccggatgtcgacggagaatgccaccatattgcagtactccaccagatggccgctgatgattgatccccaactgtaagtgtaggcattaccaactatgtacccaaaatttagatatcatattcaggcagggcattaagtggatcaaaaatcgctttggaaccgacttggtggtgctgcgcctgcgacagaagggctttctggaggctcttgagaagagcatctcacagggggacacggtactcatcgagcagattgaggaatcaatggatacggttctggagcccctgctcagcagggcattgatcaagaaaggacgctatcttcgcattggcgacaaggagatcgagttccatgccagcttccggctcatcctgcacaccaaaatggccaatccgcactacaaaccggaaatgcaggcgcagaccaccttgatcaactttacggtcacgccggatggtctagaggaacagctactggccgaggtggtcaagattgagagaccggatctggagcaaatgaaaacagaggtcaccgtgcagcaaaacaaatttaagatatccctcaaggctctcgaggatgagctgctggccaggctggcatcatcgggtgaaaatgtcctagacgatcacgctttggtaatcaatttggagaacaccaagcgaaccgtggacgaaatcgaagcgaaggtgcgggaggccagggttacgactctgcaaatcgatgatacccggaatatataccgatcggctgctaagagagcggctatattgtacttcgtactcaccgatctgagtcgcattaatccgatctacaagttctcgctgaagtcctttatgaacgtattccggcaagctattgccatggccgcggaatccaagaactacgagaagcgtgtgctccacctcgtggaatccattaccttgcagacttatcgctatacgttgcgcggtctcttcgaggcggacaagctgaccttcacctcgcacatgacccttcgcatcctcatagccgccgagcaggtggccaaagatgagactgactttctgctgagattcccccacgatcccaccaccttgtcgcccttggatttcgtgggtcggagcgcctggggtggcattaaatccctgaccttgatcgagcacttctacggtattgacaaggacatggagaactacacgaagcgctggcgcaaattcatggccagcgatactcccgagcgagagcagtttcccggcgaatggaagcaccgcactccgctccagaaattgtgcatcatacgatcactgaggcctgatcgcatgacatacgccatgcgacagtttgtggagcagactatgggtcgatcgtatgccgagatccaaacgccaccctttggagccatctttcaggagctgaatgcggccacgccggcgttctttatcctttcacccggtgtggatcccattagggatgtggagcgttatggccagcgacagggctttcattcggagtccgataccctggtcaatatctcactgggccagggacaggaactgttggccgagcaggcaataataggagctctggaatccggtcagcagtgggttattctgcaaaatattcacctggtggttaactggctgcccacgctggagaagctaatcgaacggattgtgctgcagagcgagtcgaagggggagtccaattttcgtctgttcatcagcgcagaacctgctccggatccgcagtaccacgtgattccacagggcatccttgagtcctcgttgaaggtacgtattttttcgtatcctattcggttagataaatcaaagtgtaatctccaggtggtcaatgaacctccatctggtatggcagccaatctgcacaaggcgtgggacaacttctcgcaggatgccttggaaacgtgcacccaggaggcggagttcaagtcgatcctgttcgccctctgctactttcatgcggtggccggtgagaggcgcaagtttggaccccagggctggaacaaagtgtacccattcaacattggtgacctgaccatctcgtccaatgtcctgcacaactatctggagggtagcaatcggattccgtgggaggatttgcgctacctctttggggagatcatgtacggtggtcacattaccgatgactgggaccgccggctgtgccagacctatctggaggagctcctgcagcaggatctcattgacggtgactttgagctgtgccccggttttccggcaccgccgaatctcgacttcgagggctatcactcgtacattacggaaatgctgccggaggagagtccactgctttatggcctgcatccgaatgcggagattggcttcctgaccaccgcatccgagcagctgctgcgcaccattttcgagctgcagccgcgggagtcggaactgagttcccattgcggagcaccgcgcgaggagctggtcaaaatcatgatcgacgacttcctggacaagctgcaggatgagttcaatctgcaggctctgctcaatcgcgtggaacgcaagacgccctttgtggttgtggccctccaggaatgcgaaaggatgaacgctctgatccgggaaatcaagcgatccttgcgtgaacttatgctgggattaagaggcgaactcaccattacacaggagatggagcgactggatcatgctatattctatgatcatgtgccggctgcctgggcccgactggcctatcccagcatgttgggcctacaatcctggtttgcggatctgttgcatcgcatcaaggagctggccggttggctcaacgacttcaagttgccctgcgccatctggctgggcggactctttaatccgcagagcttcctcaccgccatcatgcaggagagtgcccggaaacacgacctgccgctggacaggatgctcataagctgcgatgtcaccaagaagcaaaaggatgacgtcacgtaagttgcttattctggctatttaatttcccaggaaaagttttctgaagatgataaatatagaaaagcttaaatccttactaatcccttcaagatgtatctttacgattttaaactgcatctttgcttgcccttcttctgacacatccttcgaatagcctgccgcccatggagggcgcctttgttcacgacctgtacatggatggcgccagctgggactgccagctgaactccattgtggccctgcggcccaaagagatgctctgcgccatgcccgtcatctacatcaagtccattgtccaggagaagcaggaactgcagcgcgtctacgagtgtcctttgtacaagaccaggtgggtgacatttcccaagatgcaccccagtctcctttgtccaccccgactaataattgactggtgcttttaggtcgcggggcaatacctacgtgtggacctttaaccttaagacccgcgaacgcccctcgcgatggattctggggggcgtggctctgctgctgcagccataggaaatcaacaatggaaactcatatcttcaaatacgaagcacacatctaaatctattgtatacccaccgcatataaatacatatatacccgcaaaaaatcgacgtcattccacaaactactcaacgctcgagaggcgagaaagcccccaatttcatgatatacccccatgtatgactaatcaattagtggatatttataaccttcggcacatcgatggacgcgcaactcacgtgctcttggcgaaatggtgacgaaatggaaaaatattgcttatctaatgtttcgaacattatgtgctaaactagtttcttgttgccatgtggaatatatcgtccaaaaagtgaaattacttgttcgtatcgtgggcgtaaatgttcattcacagactagcaattctaactggttacagccagttttatgtttcatatatttctaataaaattattatataaatatgattaaactattccaaataaatagcaacacaaccgaatgacaatatgggctcatattgaatagtggctcatatgattgtgtcgtctcattgtgacgtatcatctaaaggtcatttgcacatattcattggatgagtcttaatagatagcctcttatttctctcatttcaagaaatctagacagtgtctagccgaaatttcgtatggaatattccctttcgagttcagtgacgtacttgcataaataaaaaatatattcgcttttaatgagacttttcaaatattgcccgtgtcgaactgaaaatattccagttggaattcaattttgtttgagataagcagctggaattaatttttagcaattgtaaaagaaaattgtgaaatatctctttcgattccagtgacgaagtaaccaaagtccattgaatgttagagttagtataaaagaaagttaaactttttatggatctaatcagtcaaatagtggcggtctaataatagtttatggaggtagtattttaaatttctttataatttgataacga

SEQ ID NO: 40457 - DNA, 14668 bp, DROSOPHILA
atgtccgatgcggcggcaatggccagcagtgatgaggagggcctgcccgccgggagcaccagcggtcgccagcgcgtccagcgtgactacagtgatgccaggttggaacgggtggccgcctacacaacgaccacaatgcgccttaagccagataaatggaccaaaatgatggcatgcgatgacctgcggcgcattgttgtggagtggcagcatggccaccgtcgtgtcctggtgatgactctcagtccgggcggagatctggtgcccaggagctgcctcagcgacttgtacctaccgtattcggtgcagagtgcccgtggctccattccatccgccatgttgcccgccgaagatgaggcgatggccacagttacggccgccgtttctgccgtggtgtctgccacgcccggtgctctgctcatcccgctgccacccgcctcttccagcttcacgactctggacggcgtgccacgtggcaagtgcgcctactttgtgcgccgcaatacttcggacggacccttgacagcatccaattttgcggagagcgtgctgtacggcgacttcccggtgcacagcaaaatcgagaccatgtcgctgctgttcgacgacgttcttcagccgctcctggagcaggctcaaagtcagtggcccgccattgtgcgcaaggatctgcaggcgcgcatcaaggaagtgcggaacacactgaccgagattaagggcaaaaccaacaatcgcacaattttatcgttattagtttcgccaacaatcgtcgaggaagtgtttgcccacgtgagtcaaggaaatagcaatcgtgagctggccatcagcattgttaagaaaattgtccagaatttagccaaaattgccatcggagattggattctggacgaaccggaagctcaacttacagaacatctacgaacagctgcgagagtccacgcacaagactctggcccagatattggagcgaatcgagtcggtttactatgagccatatgccaccgctttccggaaactggtggcagcctggctggaggcacaggatgtgtccctttggctgcagccgttgctacgtcagactgccgcatttaattcggttcagttcagcaatggtcacgatttggtggcgccactcgtccatatcgtgcacctggtgtggagcaatgccagatactatcgaagcacccaaaggatgagtgtcctgctgcgttgcatatgcaacatgctggtgcatcgagccgccgaggatctcgagctgcagctgcttttccagggcgatgccgatgagggattactgaaaatcaatcgaaccatcgcggttctggaacttttcaagcaacgaatgttggactacaaggaacgctatgccggcagccaggtccttctgcccgctctttccgaaggagcagctgcggtggcttcatctccatcgccagatgaccagcagcagctgtggcgcttctgccacgaggatgtgtttggccaaacactcgacggcttttcgctccaactgttggagctgcgccaggttttcgaggcagcggtgcagttccagcagctggagaagctggaagtgggcggattgcggggcaaaatactgactgaacgcgtcagagagattttcggcgagtttaaagtgctctttgagcagtggagcaacgtggacatcgatctcaccgccacggtggccagcaaatggaaatgctttcgacgggagcaaaccctgttcttcagccgaatgcagctgctggagcagaagctggccacagttttgctgcaggcctttgaacaatgtcacagctggatgcacttgctccggctgactttgatgtttggctccctgctgcaacgcgaagctgtgagaccggaattggcccgagtcctgccgcatatcctctttatctacgacactgaaatggagcagctggaggatagtgtgggggaggtcctgctgggctacgaaatacgtggcttggccgctttacctttggccaacaactttccaccgattgcgaatgccatgatgtggctggagcagcatataagtcgatgcgatgagtttggagcgaaggagttaagccaactcgttgagcagttattgaaggaaaaatcggagctgcagacgctaccgatacagtggaattccttgctctcgcgtcgcaatattttgaccaccaaactgagtaatctgcaaatgaaaatctggatctcatggcatgagtgcgttgataagctcatcatccagggacttgatgaatcggttctgtcacgatcccaggatcttagccagctccacctgaacttctcccaagtactgtttaccctgctgaaggagacgaaatacttgttggctctacaggctactggcagtttatccggtgatctgttccagctgccagagccactgctcacactctatggccaccgagatgcctactgggaacgtcgcatacggctcatcaagattggggagttctacaatggcatccgctccggagaatgtgccgcagctgagcttcaattaattcgcaatgacctggcgtccatcgacgagcacgtggaagtggcctgccagcaactcacatggcgcaactacaatgatgaacttgtggcgggcatctttgagcagagtcgcgacttatttgcccgcctgcagcaatcgcacggcaacctggatgccatcctggccagcatgcgtcgctggagccgggagccactgcatcagcgcagcttatacggtcgcaatctacttgatctgcgccaccaacaggaccgagtgcgtctgcggttgctgcagtgtgatgagaccaagatgctgctcaatcgcctgctgattgccaacttctgtctgttcttcaactatgagtcgcaggagtttcagctgtactccagagatctaagtgtgcaggagtttattcgtgaatttccggaggagcagcggcggcagtacaacaaatatttggccagcgtggatgagttgatctgccgcgaagttcgggaggcgatgagaataagtttagagtatttgtacaaagaaatgacagcaacagcaacagcaacgacgacgccaacagctccaccagtggatcctggctgttcagccggcatggcgaggttagtccttcagcaaatcacaacgccacaggcgacatccactgcgggagcgggtgctagtggcgcaccgcccacagccaacgatgctccactcttcgaagtaaaattggaactgacggaaacggaaatacgcttttcgcccgcctttgatgcaagtgtggaaaataattttcaacaaattgtggagcagctgttgctcgatataaaacagacatgcgactgcatgccaagaattgtggctgacaatgccccgtcagaggatgatgaagatgacgacacggcgacggtggactacgaacaggagctgaggtgggagccaagagaggaccgagcacaggaattgcaggagaggaagaagaaggacttggagctggagcaggagcaaggcgatccaaagccgcaggccgtgcaattcaacctgctggctgccgccaaggcgtacagtcaaaaaatggaatgcactgccgatggcctggaaatgctcgagagggcgatacgcgatgccctggcggatacggtggcggcggcatcggcttacgctgccaaattccaggcctatgcattcctgtggacccagcagagcagcgaggtgctggccgcgtgcatgcaaacagccagggagcagacgcaccacgtcagcgctggcggctatgccatcatggagacgttcaaaaaggagatcgagaactacaacgaagtgcatgatgccattgaccagtgcgagaacagggagtgcatcaacggttggctggccctcgatatcaagcccctcaagtatggactccttaatctggcctgcaagtggtcacacatgtgcaagaagtggctactccgctacgtccagggaactctgaaggagttgaatgccttcattgctcgcggcttcgagacactccagctgcacatcgctcgccaggactttgccaccctgcttcgcgtcttggccattatgtcggagatccgggagagggaaccctatgcggacaatttcgagccgcagctgctgcgtggaatcgagcagttgccgcaacagtggcagcaactgaagcactcgagtaccgttaagcaggaggcgctgcaggacacccgcttccaccagcaacaacgtgtgaccgctctcatcggcctgcatacctgccacctgcaacactatgcccggcagttccaaaagatgcccttctttcgggtgccctgcccgcaagtctacgatgtatgcgatgaagtctaccttcggttgcaccgcttccgccgacagcagcgcctttacacgcgctgggcccgacttcttgacatccagccacccgatcctgcaaccctgcagttctgcgaggtggagctgagaagggtcaagcaattgtgggactttgtgcgcgtcatcgagtcgtgcatcgtggcgtggcacgccacgccctggctgctcatcgacaccgatgacatggagcacgagtgcaagaagttcacccgcgacctgcgcaccctggacaagtgcatccgcgagtgggcgccatacgttcacatagtgggcgtgctgcgcgagctggtcgcctcgctgagggccatcacggagctgcagaatccggcaattacggagcgccactggatggagctgatgcagctaacaaagctgagtggacagcattccatggaggagctgctgtcgtacaaatgcaacaaatccacaagattggcccaactgctgaccctgcagctgcagcatcacgaggaggatatcaagaacactgtggaccgtgccatcaaggagatgacagtgacgaaagtgctcgacgagatcaaggccacgtgggcgcacctggaattcgagctggagcagcaccacacccgtccacatatacagttgctgaaggtatctgaagagctcatcgaaaccctagatgacaaccagatgcagctgcagaatatctcaacttccaagcacattgagtacctcctggacaagctcacccactggcaaaaagtcctgggaggcatcgatactctgattgtcaactggtttgaggtgcagcgcaagtggatctacctagaatgtatctttatcggatcagcggatatacgcgcccagttgccagcggatgcggcaaactttgagaggatcgatgaggactttacggctcttctagccaaggtgcaggaagttcgggtggtcatgcaggtggtgttgcgacacgacgatgtccttgcccaattgctgcagttgcaacatcgactggcagtgtgcgagaaggctctaaatgattacctagagaccaagagattggcctttccacgcttctacttcatctccgccgccgatctgctggacatcttgtccaacggtaacaatccgcaggtgattgaccgacacctcatcaaattgttcgattccatccttcggctgcagtacgagaccaataccccaaatgccttgggcatgcactccaaggagaatgatgagtatgtgcccttcgtttctttcgatccggatcaaccggcgtttatcgtttgcggcgggagagtggaactgtggctcagggccattatccagcaaatgaggagcaccctgcacgaattatttcggcgcgccctgcgcgtttttggggagaagccgcgggaactctggctctacgactggcccgcccaggtggcgctgtgctgcagccaaatcagctggacggcggacgtgaaccgatcctttggctgcatggaggagggctacgagggtgtaatgaaagagctgcacaagcgacagattgcccagctgaatgccttaattaatctcctgctgggcgaactgtcgcccggagatcgccagaagatcatgaccatctgtacgatcgatgtgcattcccgcgatgtagtgggcaagatcatagcctccaaggtggacaactcgctggccttccagtggcagagccaactgcgccacagatgggacgatgaccaggcgggtagctccagtggccgggccagcacggccataagttgtggaggaggcgatgaggattgctttgcgaacatttgcgatgcggagtttcggtatgcctacgagtatctgggaaacacctcccgactggtcattaccccgctaacggatcgctgttatatcaccttgacgcagtccctgcgattgcgattggccggagcgaccgctggaccggctggaactgggaaaacggaaaccaccaaggacctgggacgcgccctgggcgtaatggtttatgtcttcaactgctcggagcaaatggactacaaatcttgtggcaacatttacaaaggactcgcccagacgggagcctggggctgctttgacgagttcaatcgcatctgcgtggaggtcctgtccgtggttgccgtccaggtgaagaccatacaggaggcgataaagatgcataaaacccaatttatctttatgggcgagcgcatttcgctggagccgtcggtcggaatttttatcaccatgaatcccggctacgccggccgaactgagctgccggagaacctgaagaccctgttccggccatgcgccatgattgtgccggacttcgccttgatttgtgagattatgctaatggccgaaggcttccaggatgcccgtctgctggcccgcaaatttatcaccctgtacacgctgtgcaaggagctgttgtccaagcaggatcactacgattggggtctgcgtgccattaagtccgtcctggttgtagcgggcactctcaagcgggatgaccacagtcgaccggaggatcaggttctgatgcgagcactacgcgacttcaacatacccaagattgtcacggaggatgtacccatatttatgggtctcattggtgacctcttcccggccctggatgtcccacgaaagcgggtctttgagttcgagaaaaccatccggagggcagtgaatgaaattaaactgcagccggaggagggattcctcatgaaggtggtgcaactgcaggagctcctcgatgtgcgacactcggttttcatagtgggcaatgcgggcactggaaagactaagatctggcaaaccctacgagagacctatcgcatccagaagctgaagcccgtgtgccatgtcctcaatccgaaagctttgtccaatgacgagctcttcggcatcgttaatcccacgacgagggagtggaaggatggcttgttctcctccattatgagggagcaggccaacatgccaccaggcaatcccaagtggatagtccttgacggcgacattgatcccatgtggatcgagagtcttaacacgctgatggacgacaacaagattctgaccctggccagcaatgagagaatatccttgaagcgcgagatgcgtctgcttttcgaggtgggacacctgaaagcagcaactccagccacagtttcccgcgcgggcattttgtacatcaatccgcaggatttgggctggtcgccctacgtatcctcctggctggaaactagggtggacatgattgagaggggcatcctcaacgccctttttgagaagtactttccctgcctgatgcagcggcaacgcgacttccggcgcattactcccatcacggacatggccatgatccagatgacctgccacttgctggagtgccttttggacagcgatgaaggaaatgcggatggacgagggcgaggaagtgcaaccggaggagctgcaaatccgcacagtctgcatcacggcgagctgtcccatgaggcgatggtcatggcactggaaacgatctttgtatacgccacggtttggagttttggttcggccctcagtcaagatgtaatcatcgactggcatcgcgaattccacaagtggtggattggcgagttcaaggacatcaagttgcccagccaaggcactgtctttgattatcaactgaatgtgcagacactaaagtttcagccttggtctgagttggccgcccatcagtctctggaggggcaaattgattcggagactcccttgcagaatgtgctgatttccactgcggagaccattcgactggcctactttctcaagctgctcatcgaccgcaatctggcttgcatgctggtgggaaactctggttgcggcaaaggtgccatcttccggcagctgttcggtcagtatgccaacgaccaggagctgctcgaagtggccgtgtcggcggcaacagctggtgacagcagccatcagcagcagtcgggcaatccagcaggagccgtagttgtgcgccgcaaggcatcctcctcagccacgccacttctgaccacagtgcaggccacgcactttaacttctacaccagctcggagatattccagaagatgctcgaccgaccgctggagaagaagtcgggacgctgctatgctccaagtggaccgaagcgcagactcatctactttgtcaacgatttgaacatgccggaggtggatgcctacggcacagttcagccgcacacgataatgcgtcagttcatggactacaggcaatggtacgaccgacagcgtctgcagctaaaggacattcggcactgtcagttcgcagcctgcatgaatcctacagccggctcctttaccatcgatccacgtttgcagaggcacttttgtgtcttttcggtggcaccgccgggcgaggatacactgcatcacatctatggcagcattctgagcagtcacttggagagtccaagtcaaggatttaccaaagagattcgatccattggtagcctactggtgcgagtgggtattgccttgcaccgtcgtgtggaatatgcctttctgcccaccgccctcaagttccactatctgttcaatctgcgggatctcacgggaatctatcagggattgatgaatagcgtgggtgctccggcatcggcgggtggaggtggtgcatccggttttggcggcaccatatgtagcagaccctctgaactgatgaggctctatgtgcacgaggcctttcgagtctaccacgatcgcttggtggatccctacgacattaagtcgtttaagtcgtccatacgagacattttcaaaaaggatttcgaggactttgacgaggattttgtgtttgctgagccgctgatatatagccattttgctcaatcgctggtggaccagaaatatatgccactgaagagctgggactccttgtaccaattgctaattgaggcacaagcaagttacaacgaggtggtgggttacatgaacctagttctcttcgaggatgccatgatacacgtgtgccgaatcaatcgcatcttggagagtccccggggaaatgcccttctaattggagtcggaggttccgggaagcaaactctggcccgtctggcggcctttatatcgtccttgaatgtatcccaaatccaaatcaagcgaggatttggactactcgatatgcgtgaagaaatcggcaacctttacatgaaggtgggcctcaaaaatctggcctccgtgtttctcatctcggatgcacagattcccgacgagtccatactgatgctgattaatgatctactggcatccggtgaaattcccgagctcttcaacgacgaccaactggacaccatcacaaatggcatacgcaacgaggtgaaacagagcggtacgctggataccaaggagaactgctggcgctattttgtggagaaggtaaggcgactgctcaaagtggtgctctgtttctcgccggtgggccaaactttacgggttcgggcccgaaaattcccggccatcattagtcgcacggccattgactggttccatgagtggcccaaaagtgccctggagtccgtttcccagaagttcctcaatgaaatcaacggtattctggagcctgctctggtgccgcccatcggttgctttatggcttacgtccacggcaccgtgaatcagatatcgagaatttatctgcagaatgaaaaacgctacaactacacgaccccgaaaacttttctcgaatacattttcctctaccgcaaactgttggtggacaaaaacggcgagttcgccgagcgcatcgctcgtctgcagagcggaatgtccaagctggcggagtgcgcccgtcaggtggacacgctgaagcaccaactggccatccaggaggttcaattggcggccaaaaacgcggcggccgacaaactgattgtgatcgttagtgccgaaagtgagaaagtgaagcgggaaaggtacatcgcatcggaggaggaaaagcgtgtacgtatcatcgaggaggatgtgtcgattaaaaccaagatgtgcgaggaggatctgcgtcaggcggaacccgccttggtggccgcccaagcagctctgaataccctaaacaagaacaatctgaccgaacttaagtcctttgggtcgccacccaaagcggtggtgaatgtctgtgccgccgtcatggttctgttggccagtaatggtaagattccgagggatcgcagctggaaggcatccaaattgatgatggtgcgcgtggaccaattcctcaacgatctgctcaactataacaaggataacatacatcctaatatcattgagacgctgcaagagtatctaaaggatcccgagtttaatcccgataaggtggtgcaaaaatcggtggctgccgctgggctatgtgcctgggtgatcaatctacaccgctatcaccaggtcttcctaatcgtgggacccaagcagcaggctctacaagactcccatcaggagctgctggaggccagggagcggctgcagtacctcaaggctaagatcaataatctggaggccaagcttgccgagatccaggccgagttcgagaacgcggtgggcgagaagcagaggtgccaacgggaggcggacaagaccgccttcaccatcgacctggcccatcggctggtcaatgggctggccaacgagaatgtccgctggaaggagtccgtccaaagagtgctccggggtccccgaacccggctcattcactcgattgcgcactcgtcggaaggcaatgaaccgccaggagtgacggcaatttgcaaaaatcattggcagttaaccgaaatgcatttaagcagctcgacgccggaggcacgtactccaaatagggctccttctcgtgctgcttcgtgctgctccgatgatgtgagccacgaaaatgtggagccaagcctgctggccaagataggtaccctgcccggagatatcctgctaatttcctcgttcctgtcgtacgtgggctgcttcacgcgccgctatcgtgaggaactgcagcacaagatgtggctgcccaactttcgcaaaatcgatccccatataccgcacaccgagggcgtggataccctggccctattctcggatgacgcccagatagccgcctggaacaacgagggtctgcccatggaccggatgtcgacggagaatgccaccatattgcagtactccaccagatggccgctgatgattgatccccaactgcagggcattaagtggatcaaaaatcgctttggaaccgacttggtggtgctgcgcctgcgacagaagggctttctggaggctcttgagaagagcatctcacagggggacacggtactcatcgagcagattgaggaatcaatggatacggttctggagcccctgctcagcagggcattgatcaagaaaggacgctatcttcgcattggcgacaaggagatcgagttccatgccagcttccggctcatcctgcacaccaaaatggccaatccgcactacaaaccggaaatgcaggcgcagaccaccttgatcaactttacggtcacgccggatggtctagaggaacagctactggccgaggtggtcaagattgagagaccggatctggagcaaatgaaaacagaggtcaccgtgcagcaaaacaaatttaagatatccctcaaggctctcgaggatgagctgctggccaggctggcatcatcgggtgaaaatgtcctagacgatcacgctttggtaatcaatttggagaacaccaagcgaaccgtggacgaaatcgaagcgaaggtgcgggaggccagggttacgactctgcaaatcgatgatacccggaatatataccgatcggctgctaagagagcggctatattgtacttcgtactcaccgatctgagtcgcattaatccgatctacaagttctcgctgaagtcctttatgaacgtattccggcaagctattgccatggccgcggaatccaagaactacgagaagcgtgtgctccacctcgtggaatccattaccttgcagacttatcgctatacgttgcgcggtctcttcgaggcggacaagctgaccttcacctcgcacatgacccttcgcatcctcatagccgccgagcaggtggccaaagatgagactgactttctgctgagattcccccacgatcccaccaccttgtcgcccttggatttcgtgggtcggagcgcctggggtggcattaaatccctgaccttgatcgagcacttctacggtattgacaaggacatggagaactacacgaagcgctggcgcaaattcatggccagcgatactcccgagcgagagcagtttcccggcgaatggaagcaccgcactccgctccagaaattgtgcatcatacgatcactgaggcctgatcgcatgacatacgccatgcgacagtttgtggagcagactatgggtcgatcgtatgccgagatccaaacgccaccctttggagccatctttcaggagctgaatgcggccacgccggcgttctttatcctttcacccggtgtggatcccattagggatgtggagcgttatggccagcgacagggctttcattcggagtccgataccctggtcaatatctcactgggccagggacaggaactgttggccgagcaggcaataataggagctctggaatccggtcagcagtgggttattctgcaaaatattcacctggtggttaactggctgcccacgctggagaagctaatcgaacggattgtgctgcagagcgagtcgaagggggagtccaattttcgtctgttcatcagcgcagaacctgctccggatccgcagtaccacgtgattccacagggcatccttgagtcctcgttgaaggtacgtattttttcgtatcctattcggttagataaatcaaagtgtaatctccaggtggtcaatgaacctccatctggtatggcagccaatctgcacaaggcgtgggacaacttctcgcaggatgccttggaaacgtgcacccaggaggcggagttcaagtcgatcctgttcgccctctgctactttcatgcggtggccggtgagaggcgcaagtttggaccccagggctggaacaaagtgtacccattcaacattggtgacctgaccatctcgtccaatgtcctgcacaactatctggagggtagcaatcggattccgtgggaggatttgcgctacctctttggggagatcatgtacggtggtcacattaccgatgactgggaccgccggctgtgccagacctatctggaggagctcctgcagcaggatctcattgacggtgactttgagctgtgccccggttttccggcaccgccgaatctcgacttcgagggctatcactcgtacattacggaaatgctgccggaggagagtccactgctttatggcctgcatccgaatgcggagattggcttcctgaccaccgcatccgagcagctgctgcgcaccattttcgagctgcagccgcgggagtcggaactgagttcccattgcggagcaccgcgcgaggagctggtcaaaatcatgatcgacgacttcctggacaagctgcaggatgagttcaatctgcaggctctgctcaatcgcgtggaacgcaagacgccctttgtggttgtggccctccaggaatgcgaaaggatgaacgctctgatccgggaaatcaagcgatccttgcgtgaacttatgctgggattaagaggcgaactcaccattacacaggagatggagcgactggatcatgctatattctatgatcatgtgccggctgcctgggcccgactggcctatcccagcatgttgggcctacaatcctggtttgcggatctgttgcatcgcatcaaggagctggccggttggctcaacgacttcaagttgccctgcgccatctggctgggcggactctttaatccgcagagcttcctcaccgccatcatgcaggagagtgcccggaaacacgacctgccgctggacaggatgctcataagctgcgatgtcaccaagaagcaaaaggatgacgtcaccctgccgcccatggagggcgcctttgttcacgacctgtacatggatggcgccagctgggactgccagctgaactccattgtggccctgcggcccaaagagatgctctgcgccatgcccgtcatctacatcaagtccattgtccaggagaagcaggaactgcagcgcgtctacgagtgtcctttgtacaagaccaggtcgcggggcaatacctacgtgtggacctttaaccttaagacccgcgaacgcccctcgcgatggattctggggggcgtggctctgctgctgcagccatag

SEQ ID NO: 40458 - protein, 329 aa, DROSOPHILA
MSDAAAMASSDEEGLPAGSTSGRQRVQRDYSDARLERVAAYTTTTMRLKPDKWTKMMACDDLRRIVVEWQHGHRRVLVMTLSPGGDLVPRSCLSDLYLPYSVQSARGSIPSAMLPAEDEAMATVTAAVSAVVSATPGALLIPLPPASSSFTTLDGVPRGKCAYFVRRNTSDGPLTASNFAESVLYGDFPVHSKIETMSLLFDDVLQPLLEQAQSQWPAIVRKDLQARIKEVRNTLTEIKGKTNNRTILSLLVSPTIVEEVFAHVSQGNSNRELAISIVKKIVQNLAKIAIGDWILDEPEAQLTEHLRTAARVHAQDSGPDIGANRVGLL

SEQ ID NO: 40459 - DNA, 3121 bp, DROSOPHILA
aaacccacctccgttgattggctcaaacacgctttgacatctaacatccacattgctactgcttttatctttattggattaggcgaaacattaattccaacgaacgaaaacaccctagaaaaagctcttcttaccgcaatttaaattcggtcgattgttatgcacaaaagatgttatcgataagcagtgttgcgcaaagtgaaacctatcgatatgaacgtgaccatatcagacgctcaccactgcatgcagcccaaaaaaaacaacaacgtttgacgtgcgtgaaaattggttaagttttatgaaaataacttagttaactgactttccgacagccatcgatcaatccatatgctgcgggggagtgcggggctaagggcattaatcattaggacattgcaaagaggtccggaaacgtaaattttgtcaagtgaaaacggggttgtgctgtgtgtgtggaaaacggaacaaaacggtgccaaaaacgcaaggaaaagctgcgaaagcggtgcacagcaaacgggttgataaagcagcaggcttagatttaaattatcagtgcttttaaccgatttgccagcgaaacaataaccgacattcaataaccacccacacaaacgtattgtgtacataatatatacatccatacctacatacgtatattttgcgtagtgcggcgcttgaaagctgtttccccatcaccatatcatcactgccattcattgcaaacccactctggaatccatcccacctccaccgtaccacatgtcctacatgatggccaaaacgctggaggagcagagcctgcgggagtgcgaacactacatccagacgcatgggatccagcgagtcctcaaggactgcatcgtccagctgtgcgtctgcagacccgagaatcccgtgcagttcctgcgacagtactttcagaaactcgagagggtgagtccaaaaccaaaattataaataataccatatatattggtagataaaatatgggtagaaatttgatcagacataaaacctttatttctaaacagtacaaccgcttatcgttgccttgaggatcaatgcttgggccttcctgtgttatgtccttggtttatcagatccgtatgatcgatttcttaatttcctggttcactggaggttcctcaagttcatagattctagcaacgcaagttgtttacatcatttgggaaattttgactggttcctgatcaataaaaatggccgaaaagtggtgtaggaaagggtgtggaagatgaaacctccgattacatcgagcacttgggcttggagctcttgggcttaagacaccttggctttgccttcgccttgccgcattccatcttcttcctggggcggggacatgccttccggggtcgggcgcccttgggcttcggtttgccgcaactgcgacgttgcttcgaggttttcgcccgtggtttggggcaactcttccgcaccctgggcttggaacacttgttctcctttcttggagtgcagctattggagccaccggcaccgaagaaagtgtctgcgcagccacttatttcagagtgcattctgtgctcgccctcactagaacgctgaagactgctcacactgttgggctctacatgaaaagtgtccaatggttcctgcggaagtgcattacgattgcatacatgtgcatttcgtttgtattcgacacctaacttaccgcagaatactggcatcgatgacggaatgacatttcgttccatcgggtttcagcagcccgtcttatctcgttattcgagtaatattctccgtagcgcttcttaaagtccctcagaaaattaacaaagccagacgatgaggcgtattcgtcctctgccctattgatatcttcttcaatgtcggaggcgtcggaattaacatattcaattgattttttataggttttcactgattttgttactgccacctccggcttgctatccttttgtttcagattactcattttgcaaccaattcttgctcgacagaaattttcacaaacaaatttgttactcagaattatacaaaaaaaaattatatatgtataaaaaactgtactcaattttatcgaaatattttagttgttcctcgttcaaaggtagtgtactaactgtttgtatgctggcttcagcgtggagacctggaaattggatttgaatgaaggctcaattctactatgatcaagaaaaagttccttttttcaaaccaagttggctgttttcaaagtacatttcgcagatcggcgccatatttccatggttatttttgtatactatattcgttcaagatattgtaggagaaaatgtttaatgtttcttgatcagtatcagtcgagctggccatattcgtccgtccgtgtgtcttgaaaaaggttttaatattctgtttgcaatccgactagctgagtaacgcgtatctgatattcacgaaatagaatagcgtacttccttgttttcaatgaaatgaaatgaacaaatattttacaaaagcaatactaaatgttatattataatctgaacaaaatatgtaagaaataccagaaatgtcgttggtgagggaaggtgtttaaattatcctgtgcgactacgttcctttccggggtttcaaccacttggtaagcaacaagcggcattttgctggttaatgctgccgcttaaacgaaaatcaatacaacttgcggtctattttcgagcggattgttaaaaaaaaaacccatccataggtggatttcccagcacggatgctttattttcggcttcctgcttcggagaactgtattccctctgttcattgtgaagctttaaagtttattttgtgagacaggctgcagcaaaagcttgcaatgctgcaatgtaaatagagcagcgcacctgtggaggtcctttccacatcgtcctgttccccctctcacttgccaagcgactttccttacccctttttctcccaactttgattttgagtacgcctgtgtgtgtgcgccggactctctggggcaagttgcctgttgaatgccggacccgctgtcagttggattagcatcctgacgccgtgcagaagcatcctgcttccacctagttcactccgttcgtttgctttttat

SEQ ID NO: 40460 - DNA, 1059 bp, DROSOPHILA
acctttgaacgaggaacaactaaaatatttcgataaaattgagtacagttttttatacatatataatttttttttgtataattctgagtaacaaatttgtttgtgaaaatttctgtcgagcaagaattggttgcaaaatgagtaatctgaaacaaaaggatagcaagccggaggtggcagtaacaaaatcagtgaaaacctataaaaaatcaattgaatatgttaattccgacgcctccgacattgaagaagatatcaatagggcagaggacgaatacgcctcatcgtctggctttgttaattttctgagggactttaagaagcgctacggagaatattactcgaataacgagataagacgggctgctgaaacccgatggaacgaaatgtcattccgtcatcgatgccagtattctgcggaaccattggacacttttcatgtagagcccaacagtgtgagcagtcttcagcgttctagtgagggcgagcacagaatgcactctgaaataagtggctgcgcagacactttcttcggtgccggtggctccaatagctgcactccaagaaaggagaacaagtgttccaagcccagggtgcggaagagttgccccaaaccacgggcgaaaacctcgaagcaacgtcgcagttgcggcaaaccgaagcccaagggcgcccgaccccggaaggcatgtccccgccccaggaagaagatggaatgcggcaaggcgaaggcaaagccaaggtgtcttaagcccaagagctccaagcccaagtgctcgatgtaatcggaggtttcatcttccacaccctttcctacaccacttttcggccatttttattgatcaggaaccagtcaaaatttcccaaatgatgtaaacaacttgcgttgctagaatctatgaacttgaggaacctccagtgaaccaggaaattaagaaatcgatcatacggatctgataaaccaaggacataacacaggaaggcccaagcattgatcctcaaggcaacgataagcggttgtactgtttagaaataaaggttttatgtctgatcaaattt

SEQ ID NO: 40461 - protein, 215 aa, DROSOPHILA
MSNLKQKDSKPEVAVTKSVKTYKKSIEYVNSDASDIEEDINRAEDEYASSSGFVNFLRDFKKRYGEYYSNNEIRRAAETRWNEMSFRHRCQYSAEPLDTFHVEPNSVSSLQRSSEGEHRMHSEISGCADTFFGAGGSNSCTPRKENKCSKPRVRKSCPKPRAKTSKQRRSCGKPKPKGARPRKACPRPRKKMECGKAKAKPRCLKPKSSKPKCSM

SEQ ID NO: 40462 - DNA, 10418 bp, DROSOPHILA
cacctggatgcgacctttgccccgctcggcacactccttcagcacgtccacatcgtaggcggtgactccgatgaatcgagcctttcccgcctggacgtactcctcgaggacgggtatggtctcattcagcaccatgtccagactaggtgccgcatccacgtcatgaacctgtcacaaggtgttagtttatagacaaatctatatattggtataccaaacacacctgtagtacgtccaccctgtccaactggagcagctccagactacgcttcacactctcccgagccttggcagccgtatagtcgaacatattgtttggatccaactcgtaacgtgcaactttagttgctatataataggcctcccggggcacatccttgagcgcctggccaagcagctcttccgatttgccttggccataaaagggagccgtgtctatgtagttgataccggatctaatggcttcctgcaccgtgaggatgccctcctcgcgatcgaagtcatcggagaagagcttggagagagtggcaccacccaaagcaattttggatactcgcagacccgtggatccgagttggcggtactccatacgacgcaccttctcctcatcgtggaaacccttgacgaaagtagctggcagtgatcccgacatccttttcgcttcaattaacaagcttgaatgaatagaactcctagaaaaatggcactttataagtgcataaagtgattttaacatatgtaggtatgagtgagttccaaaatagatttgcctcccttagcaagcttctcttcgtgataagctgtggaagagaaggttcgctcttagttctttatatatattactatgtaatttcgcattattaatgtagctctctgtaagaatgattctaaaaattgtgatatcatataccaaccacattttttaaagagaaaaccaattcccaattaaggtaattccttttaataccttgcatgtgaacaataagcataactccgatcatgtttgttttaatactatttattttatttatcagaggagattctgagctttttgcggcttccaatcagttgacaaatcgttaagagtaaatataaatatctgctttatatatcaatatgcatgagatggggacgagcaccgctcagaagaagacatcgaaatcgccctgtggctgatagccagctccgggcgggatcagctggggtcgctgctgttgctggcgctgtgggcgtggcacgatgatgtcgttgatctcatggagaattccattggtggccaccacatcgcacttggtgacgccggcgttctcgatcttgggacgacgatcgcgggtgatacgcagatgctggccagagatggactcgatggagcggacaaatggccagttggttgggataatgccggcacagcagacaacatcctcaacgatatgggttttgaccaaggccatgggatcggcgggctttgaaccctcaccggactcgttcagctcctcgaagatatcgttctttggcaccagcagggtgagactcctcgaatcgttggacagcagctgtgtaagattagccttacgaaccagctccaggaacttgctgtagttgggattagcctccagcagcttaagcatgttctgtggaatatttacaaataagcataagctttaaattccgtgataacctcgtagaactcacattcttgggaggcgccaaggcacgatccacctggtggagaacggatccgcagctctcgtcatcgaagtgcaccaaacgggcacagtttaccgttgcccggttcatcacgtccgagaagagagcatgggtggagtacaggttcagacgcacactagatccagcaaccgtgggcagggacttctccgacaggtcacaggtcttgatcatgggcttgaccacatggtagttaaggaactccagcagatccaagttatgattcagcagctccggctgttccttgagcatgcgagcccattccgtattctgcagagccttgtcagttggtgcaaagatggtcacgttgtccagatcgtcgaactgatcatcgtagccggaggcctccagcaatcgctggaagatggtcaggttcttttgcgacatcagcgaggtcatgggcagagccgattcggtgggcaggatggtgtcgattacgtgcagcacaccattggtgcccatgatatcggcatcaatgattttggccaagttattgatgtagatgggagtcggtccagtctgattcgcagcgcggtgggttcggttgaggagcaggggttctcccagtagattgtaggccgtcgtcttggcacccggaacagtggccagcgagcagaaggtgaggtccagcaaatggttcttcaggatgtctaccggataaatgggaatcatattatattagttagttagctgcttgtggataagtttccagaccaactcactggaggcacaaccgcgaccttccttgagggctcgacgcagatgaggttccaacttgtcgaaggcggcatcggtgggcacaaagatggtcactggcttgtcatcctctagcatggcgctcaggttggtcttctccagaacggtgcgcataatggacatatccgcacgctccctgatgatatccataaggttcttggtcagcggcttcaggactccgcccagagtgtggacaagggcctgctccgagagcttgtcgtgcttctcgatgggcacacagttggcggcaaagcggtagggttccaggcccaaagccgcaggcagctggtagctgttgatgcggatcttctggtcaggcagctccgtctgcagaagcttctcattgggcacatcctccagctgaacttcgccgagaacagcgtgcagtttgtagatggatggcttggaagcctcggccttggcatcttccacattctgttgtacgcaaagaattctcatttatttacatgaattttagtaaccaaaggcatgctcacattctcctgctgatgatgaccacggtactccatgaaggcggcgtcgttgggcacgaagagggtcaccttcttgccactgcctgctccgagcatatcggccagctcaccggcggtgcgtgcactctccaggaactgcttggcacccatgtcactggccgtggcctccacgtccttgatgtcgatcttctcgcagggcgttgtgaagtcagcgtttctggggcgtccatatccatagcagcactggcgggtcagcgtcagcgttttcttcttgccattttgattcacgctgcaggggataaagtgttcaatcaattggatgagattaggtaatcctactgtaatctgcttacatcttggtgcagacgtgcttgttgggcttctcggcgcaggagttaacgctgaactggaactggccaaagagtggggatcgcaccacgttggtaacgccatcacgttcctggccaaaggtgtccacggtttcttctgcctccgtttcactggccacagtctcgtcttcctccttttcggtgcacacattgggtctgaataaagcgaaaaattggttattggttaacaatgtgatgtagtaatagtttggcgaaatgaacaaatataattcaaggcaatcgtttttcgagactcaaatacataagctttaaaaatagtgtatttcaggcatatattcaaatcattagttttataagttatcttcaatgagcaattactaataacttgttgctatatttaatctatgatgatcattctccctttacgttctctacaaattatagccaaacctgctaatgaattggtcatataacagacatgcaaatcgaaatgtcaatgcactatatagcactatataccactatacatatatgtatataattttgattcaaccctaaattcctatatatccacaactccgaatccaatccaacttagtcggttgatcggcactcgctaaccgattgtttgcccaatggatttgcacaatgagtccggcacatagaaagcatagttatattatacaaactgacttttatataaatgcgtatgtgtgttggcttaacagctttgccagtccatcaattcaattatggcagcgatgagaggagtctactgaatgcgaactcattgtgtgcgtagattttagaaatttctcactgaaccatagatacacagtcgcatacatacatacatacatatgtttgtaatgcagctaatttatcaatttgccacatctgtgactttcattttactatgcccgcgcagtaacgagttcatcgcacagtgcaaaaaagacgacaagtggatttcacaatttataaaagtgcaagctcggctgtagaaaccgtgcagttgtgcacttatccaatatagacactatatatctatatattcattcacttttccctatatacaatgccatatctggttgggcaattaaaaaaaaaaacagcaatcgagccctggaaaattattaagcagcctcagctgcgaataatcttggatggaaaattatttaagtaggtatttaccatttaattgatatgctcgattgcctctatgatggcgataacccatccaactttacacaattatagaatatatataccatacaatcatatagttaatgggtcgtatgaacttgacattgtgctctcttaattgccaaatgccaagaacggcgaagttggccacagaatcactcgagtgcggcgattaggaaagacgccaaattagtgaccataactgggggacttttttttttttttttagcattcaagtgggggcaaatgcccttaatggatggcacttaccccttccaccagggctcctgggcagctccaaagccaaagcctccgaacgaattgaagaactcattgccaaagaaggggaacgattgctggaagaagatggccggatttggggaattcacatccgtggtgatggtgtccacatctgcgaagtaaggaaacgcaattaaaaccatactataaaatttaacaattgcttaagacacttaaaatattctttagtaacaattcaaattacgctgagattaagcttgcacataatattcttcaagatactaattttgcgagtgcaatttttatggcattgttaaatcactataattaagcgatcagcatagttgatcaagaatggctacctcttgctgttttgcaaagtagtttataaattggtcgtttctaagattcaatttcagatttaaattcagattttattccagatttggactagaaaccaattgcaacagaaataattaaaagagttttgggatttctattttaataaattttaaacgaatatctaaatatatgtatattatagagatatagagcacttactgaacggcttctgctccacaccgctgggggtttgagcgggaacggtggccgccgtctcctggcgtccctgcggctgctgctggtgctccagtggcacgaactcggtgtcgtatccgctgctgaagaggggcaacaggtgagatgagtggagttgcggcgccaacggggcgggtccgttccagacgctcgccatccgctgcgaggcctgggcatgcagtggatcttggggctcgagcggtgcgagtggtgcgaagggcaggggcgcgaacagattgcgatgcgccggcaatgggtgggttaaatgtggcataaagctgcagaacggtgggagtgggcgtaggagtggacgtggtgtagagtgatgtggttagtgtatacagtattagctggctactgtgtgcccatatgtgtgtgtgtgtgtgtgtgtctgtgtgtgttcccttcatgcaaattccattggtgagcggaacgaatcgaaacggaaccgggacccaataattcatatgcctccattgttacctcgcataaaaagaagctcaactctatcctcaccaaactaaatatatgtatctatctgtatgtagtatatatgctgatcgtgctcattgtttaggttttttgcgcagcatttacctgagccgcatactaagcgcctgtcagtggaactctttttagaatcaaatgaaaataactttttaagtgccgaaacaatcgctgaaaaaggcgaacaaaacttgagaaatgttcctgcacttgtcatccatcaactgagatttatgtcaacggattttggttttttctgcgtctcccaatgcattcgaaatctgtaaactgactcagatactttctatgaagacatacatacgcgttagccaacttcaaatctttttttcttcgctgcggctcattaaaattcgcttcgcgggagctaattaaaaaaagctcataataagtgctaaatgaaaaaaatatacgaaacgaaactagctggaaataaataataaaacaatactgcccgaaaaggcgaaacgtaaacaatttgttgggttgctgactttgaggtacttctgtgtatccgattcacttctggttggagatctgcctccgtccaagatgactcatccaggcgggacgtgatcgacagggctcgaagcggctttggctgagctacagatacaggcggtttaagccgacattacaatacatagaggcttggccagtttgatttttttttttctctttctaccttgtcagattctctggaaatcacttctataatattgctagagcgagtgaatgcacctcagtttaaatcaattgtgtgtccatcaatcaaaaaaccatcaaaatatttgataaaaaggaacacttaatttattcacaatttattcgcaagaatatttactcaaaacgttatcataaatattttatattacttggaaataagtcaaaaattttatttctttttcattattttaactactgtacgtcgattattgaatgcaaataatatttcaaaatgtatacattcatatgaacagatttgaataaagaaataaaaaatcttacaatagagcgaatgacttttgaaatcttagaataattactcttcatcttaaaaattgtgcaaaaatataatatcaactgtatgttgtttgataagatattaaatatatccatttagcagtaattcaatgactaagtactttgtgaaagattaatgaatgtgtgaagtatttgttttgtgatcatggtattcaagactacttggaatatttgtagactgcgtatccaatctgtgaatcgaatataatttgcaaacaaactaaattctgttcgcttgaagccagagcgaaagtcattggccacagaaatttccagggaaatgtttacgtcgagggcagagatggatccaaccaaatggctgcctgatttaatttaagcgcagccgtgacaggcagaataaaaaaaaacattctgtgagcgttaaagggggaaccaaattgtgggcgacccaattcgagggcagattatagagtttgcggagacattcttttgccggcgcattacccattacccacaatatgccacttaatgccgtgtcaaatgtcaattgctctcagggccaaaactgttcgagatttgtgtgccaaagatgagccctgcggcggcttgaacccaaaggtggcaaagtcagccaagtgtggagcgaacggagaagatcggtggaagaagatgtggatcttggttgcccaagtcccgcggtgttgccccactttggttgcacattgttctcttgcgatgcagtatctttcgcaaaaaagggggaaaaaaataataaaagccaaagactcagatcgtggcctttgcacatttccaatggcggcaaagaacccagttcgatgcggatttattggcagacaatctctgcgactcaacaatttcagtttaaggtttatcaattgaggtcaatactcggcgggcttttggactttctttccgggggaacttttcgctctttcagcgccttcgctaccataaacatttcggtcaactttatttgcagtttcgtttagcgggcgaaaagtttctccaagaacaaacagggctcggtgcctcgttgggcttgaaaatgtcataaaaaacactgaacccggtattagccaacttttatgtggtgtcagtgggcccagcggaacccgtgagtgaaaaaaatattgaaactgtttaagcatttttaagttgtttaacatgtaaacctcgtcggtatgtttgctttgttaagtagttgtaaatgagcaaatctactgggaaatgttggggactcaacagctgggctaactacgtttacttatagttcacctggagttatctgaggactcgtgtgtggaatccgaggagtcatcgaattcggcaacctcttcagaacttgaactggaattcaacatttcgtttattgggacagatttaaaaggtcgggcggatgggaaaaatctactagggttagttctatgggacttaagcacttaatattaacgattatttggaaactttaccaattggtcttcaaaaatatatttgaaagcgttattgtaaaacttcaataatggcaaaatacttgttttttaactcgtggcttacattaatattgttataaacattgttatggatggtatcaaacgtttcaatttagatctaattttgtatttctttcaaagtgtttttttttttttaatttttttccgtttttagttatttgggatgcgcttgttaggtaaaattttgttccaatgattctatgaaattgtatatgtttaattagagaagtatttcaattttgtgggtcccaggcattcctggcatttcaattgtgttccgataacataaaacatttagttcatgccttatcagaagatgtcgatgtacatatgttaaccatttagcccgcaacgcaaacaactcaaactacgtgaaatgtgcatgaaacgaacgctactacacagcacgaaaaacttgtcggattgatactcactcgccgtagaatggaaccgcctggatctggattgatcccaggaggagcaggcaggcccacagccgtagcatgtttggtatcacaattttaatctggagcctcggttgggagctaagtaaatgaacgagacaagctgaaagttgctgtaatcaagggaatggctgaagctggctgaatggctggttggattcgagaaatttcaccgcgatggatggaaaaacagctgagaaaccgaagaaatacaggttttccacgcagcgctgcactcgcgtatgtaggtgactgattttgggagtgagagcgacggtcgacgaagaaaattttccactgtcttcacgcattaattgtaaatatgctacggatagacgacatataccgcctgtcactcacttgtaattattgtcaattgtcttgtttttacaaaaattggcacacactcaattatcaaatgtctctggctccttttactgcagttaatcgtaaaaaaggggcacttgtggcactcacgaaagttgttatatgttgcttgatccgacgatgttgccgcttcaagtcgcagtttaaaactaactgcccaagaacgtcgagcatctggtatttataagctgctctgccgcagtcgccgtcgattcctctgccgcgatatcaacgcatgtagtgatcatgggagctttgggagaacagagagaacttttggggacgctgtgaaatcggtaatagctctatatatgtatgtatgtgtgtatttacatatgtatatgcaaatagtgcgggtggcaggaggttcgtacaaattgtgaaagtgccagctattaacacttcatagagaagcgagcgaaacgaagcacttttattaatcatagtacatttcactcaaaatactgtagaatttgggatacaaaacccaaactaaaacggtgtagaatctgaagaatatatcctataatataggactcatatcatttcagactttggcttggcgagcatttcaaactacttattcatttcgagtattttcaatttcctagaatcattttctgtttaaactgcacctagagcgtttctggcaatgtcctacctgtatttgctagccaggtgtagtgcgcacttggaatttccgatattcccgtaacctctaacacccatcaatcactgtggtgtctggtcggttccgccttattaggagtctcctcatattttgaaactgttccgatcggtttttattgttttgtataaacaagatgtcagcttgtagctacatgtgtagatgaaattgaatttcttggaactgttagaagactttataatgtgttcttatatttgattgctcattgttttgattttagtcaatattagatgcccgttttttacttattaccaaagtcaagcaaagtatgttgttattgaaaaaccatgaaaaatcgtaatcatccgtttctgaaataaatatttattcattatttacaatatttatttgtgctattaatgtaggtgtatatatattttgtatacgtagatgtaccacaactgaaa

SEQ ID NO: 40463 - DNA, 2971 bp, DROSOPHILA
ggatcaagcaacatataacaactttcgtgagtgccacaagtgccccttttttacgattaactgcagtaaaaggagccagagacatttgataattgagtgtgtgccaatttttgtaaaaacaagacaattgacaataattacaactcccaaccgaggctccagattaaaattgtgataccaaacatgctacggctgtgggcctgcctgctcctcctgggatcaatccagatccaggcggttccattctacggcgactttatgccacatttaacccacccattgccggcgcatcgcaatctgttcgcgcccctgcccttcgcaccactcgcaccgctcgagccccaagatccactgcatgcccaggcctcgcagcggatggcgagcgtctggaacggacccgccccgttggcgccgcaactccactcatctcacctgttgcccctcttcagcagcggatacgacaccgagttcgtgccactggagcaccagcagcagccgcagggacgccaggagacggcggccaccgttcccgctcaaacccccagcggtgtggagcagaagccgttcaatgtggacaccatcaccacggatgtgaattccccaaatccggccatcttcttccagcaatcgttccccttctttggcaatgagttcttcaattcgttcggaggctttggctttggagctgcccaggagccctggtggaagggacccaatgtgtgcaccgaaaaggaggaagacgagactgtggccagtgaaacggaggcagaagaaaccgtggacacctttggccaggaacgtgatggcgttaccaacgtggtgcgatccccactctttggccagttccagttcagcgttaactcctgcgccgagaagcccaacaagcacgtctgcaccaagatcgtgaatcaaaatggcaagaagaaaacgctgacgctgacccgccagtgctgctatggatatggacgccccagaaacgctgacttcacaacgccctgcgagaagatcgacatcaaggacgtggaggccacggccagtgacatgggtgccaagcagttcctggagagtgcacgcaccgccggtgagctggccgatatgctcggagcaggcagtggcaagaaggtgaccctcttcgtgcccaacgacgccgccttcatggagtaccgtggtcatcatcagcaggagaataatgtggaagatgccaaggccgaggcttccaagccatccatctacaaactgcacgctgttctcggcgaagttcagctggaggatgtgcccaatgagaagcttctgcagacggagctgcctgaccagaagatccgcatcaacagctaccagctgcctgcggctttgggcctggaaccctaccgctttgccgccaactgtgtgcccatcgagaagcacgacaagctctcggagcaggcccttgtccacactctgggcggagtcctgaagccgctgaccaagaaccttatggatatcatcagggagcgtgcggatatgtccattatgcgcaccgttctggagaagaccaacctgagcgccatgctagaggatgacaagccagtgaccatctttgtgcccaccgatgccgccttcgacaagttggaacctcatctgcgtcgagccctcaaggaaggtcgcggttgtgcctccaacatcctgaagaaccatttgctggacctcaccttctgctcgctggccactgttccgggtgccaagacgacggcctacaatctactgggagaacccctgctcctcaaccgaacccaccgcgctgcgaatcagactggaccgactcccatctacatcaataacttggccaaaatcattgatgccgatatcatgggcaccaatggtgtgctgcacgtaatcgacaccatcctgcccaccgaatcggctctgcccatgacctcgctgatgtcgcaaaagaacctgaccatcttccagcgattgctggaggcctccggctacgatgatcagttcgacgatctggacaacgtgaccatctttgcaccaactgacaaggctctgcagaatacggaatgggctcgcatgctcaaggaacagccggagctgctgaatcataacttggatctgctggagttccttaactaccatgtggtcaagcccatgatcaagacctgtgacctgtcggagaagtccctgcccacggttgctggatctagtgtgcgtctgaacctgtactccacccatgctctcttctcggacgtgatgaaccgggcaacggtaaactgtgcccgtttggtgcacttcgatgacgagagctgcggatccgttctccaccaggtggatcgtgccttggcgcctcccaagaataacatgcttaagctgctggaggctaatcccaactacagcaagttcctggagctggttcgtaaggctaatcttacacagctgctgtccaacgattcgaggagtctcaccctgctggtgccaaagaacgatatcttcgaggagctgaacgagtccggtgagggttcaaagcccgccgatcccatggccttggtcaaaacccatatcgttgaggatgttgtctgctgtgccggcattatcccaaccaactggccatttgtccgctccatcgagtccatctctggccagcatctgcgtatcacccgcgatcgtcgtcccaagatcgagaacgccggcgtcaccaagtgcgatgtggtggccaccaatggaattctccatgagatcaacgacatcatcgtgccacgcccacagcgccagcaacagcagcgaccccagctgatcccgcccggagctggctatcagccacagggcgatttcgatgtcttcttctgagcggtgctcgtccccatctcatgcatattgatatataaagcagatatttatatttactcttaacgatttgtcaactgattggaagccgcaaaaagctcagaatctcctctgataaataaaataaatagtattaaaacaaaca

SEQ ID NO: 40464 - protein, 881 aa, DROSOPHILA
MLRLWACLLLLGSIQIQAVPFYGDFMPHLTHPLPAHRNLFAPLPFAPLAPLEPQDPLHAQASQRMASVWNGPAPLAPQLHSSHLLPLFSSGYDTEFVPLEHQQQPQGRQETAATVPAQTPSGVEQKPFNVDTITTDVNSPNPAIFFQQSFPFFGNEFFNSFGGFGFGAAQEPWWKGPNVCTEKEEDETVASETEAEETVDTFGQERDGVTNVVRSPLFGQFQFSVNSCAEKPNKHVCTKIVNQNGKKKTLTLTRQCCYGYGRPRNADFTTPCEKIDIKDVEATASDMGAKQFLESARTAGELADMLGAGSGKKVTLFVPNDAAFMEYRGHHQQENNVEDAKAEASKPSIYKLHAVLGEVQLEDVPNEKLLQTELPDQKIRINSYQLPAALGLEPYRFAANCVPIEKHDKLSEQALVHTLGGVLKPLTKNLMDIIRERADMSIMRTVLEKTNLSAMLEDDKPVTIFVPTDAAFDKLEPHLRRALKEGRGCASNILKNHLLDLTFCSLATVPGAKTTAYNLLGEPLLLNRTHRAANQTGPTPIYINNLAKIIDADIMGTNGVLHVIDTILPTESALPMTSLMSQKNLTIFQRLLEASGYDDQFDDLDNVTIFAPTDKALQNTEWARMLKEQPELLNHNLDLLEFLNYHVVKPMIKTCDLSEKSLPTVAGSSVRLNLYSTHALFSDVMNRATVNCARLVHFDDESCGSVLHQVDRALAPPKNNMLKLLEANPNYSKFLELVRKANLTQLLSNDSRSLTLLVPKNDIFEELNESGEGSKPADPMALVKTHIVEDVVCCAGIIPTNWPFVRSIESISGQHLRITRDRRPKIENAGVTKCDVVATNGILHEINDIIVPRPQRQQQQRPQLIPPGAGYQPQGDFDVFF

SEQ ID NO: 40465 - DNA, 2648 bp, DROSOPHILA
attaatggcccgtacgcctacgaaaccggagtgaaaaacgtctgggctcgagatgattacctcgttaggcgataaggtgtcacaggcgataaggtgctggcggcaattgcctttatttatcgcgaaaaggtgacacatggactccagccgaggggaaagttactgactagcagcgcctagaatgaggggctcgtcatgcgcaccacacggcggatgcgtgatctggccgggctaagcctccaactacttgattgctggggtttattgacagtcgatacaagtgtgtgcgaactatatatatgcatttgttgacattttccgttggcgtcattgctcagaaggcactggcggcactctgacctcaaccctcgaaaattaggcaggaaacaaatacacgcaaagaaactaagcagcactttaattgtaaataggaatttcctttattttaacaattaacgaacaaactgttaaagatttatacatacaagctgcatgtataaaatttataaaataagttaaacatacgagctacattttttttttcagtgcactaagcggtttcaacctgcgagcatgttacctaattttttctccaaatatgtttgcgctcgttttatgtgcgaaatttacggcataccgacagtctgcgctgggagtattcccccggccacgacgacgacacgtgaccacgaccgggcatcgggtggcctggcggtcttagccacccagagaccgacccgcacccaccctttgggacgcctcaagatcaaggcgattcagtgcaaattcttggacctcatacatagatacaaagtgctcgttgcccgacaacgaaaaagcgttggaatcggatcgggaatcggccctcgaaccagagtctagcaacgctatctatgaccaaagcagcggacggcggcgtcgacgtcgtccgacgaaatggtatttaagcgggaaatgattcggtatgacaaatcagaagtgaaataactcagcaacagcgagcaacaggctgctagccgttaaaaataactaacgaccaagaaatagcacaaggtaagcgaaaagggagagtttaattcagtaaaatatgtggggcaaatgcctttgccaagaattatagtaaatttatgcgacgatcacgctctgacatcgtggactaatgcccagttccggttttgatttcagaattccccaaaaaaccgaacccaatcacttgaacaaaatgcctaccgcatcagcacatctgcccattcagaagcgccggccgcatgagcacaatggcgagcccagctgccagggtctagatgaggtgaaccgcatgttccggaattactgggatcccacggcctactgggtgtgcgataagcagggcacacgggctcgtctccagcgctgtccgcagtcgcagctctactccgaggaactcggccgttgcgtccactatgccgattgggcctggacggatcccaaggagccggctggccgagccaagatcagtcaatcggtgtccacaaattagtgatatcttacggctaaacttaatttaatgctagtctaagacaaccaacctcattaggcttacgtctatttttacaaaatacctttatttttaatgaaaataagaaaaaaaatcagtacaaaatcaaaagttgctcgagtttaacaattttggggcattgtttactattaacttagctacatggaatgcacttccggttgtaaaaaggaatggaatgtttatagtgcctaagcaaaacagaattatatgttagtctacaacatataaagcgttgcccgtcgaggatcatatgagcaaggccctcggctagtctgaatttagctacctttcgactaaaattaactggtttcgacagcctgagttggggcatgataaataagaaacctttgaaaattccccaaaagtggttgagatgttggagggaaaaagataataatcctaataggttttgactgcgtgaagaaactaatctcgcgtccgggaatatgcccgattaactcaggaggaagctgatgcgtctgcgatcttaaagctccacattgacgccttgcttgttgatgaccttgagcttctccttcttgggtggctgtgtgtccgaggggatatcctcctcaacgggcgcgggtttctcaggcactgtgcgcttgaccttcggtttagaaggctctggagtaggagtagtaggagtagtagtagtagttggcttaggagtagtggtggttgttgtagtcgtagatggcttagctgtcggcggcttagtagttgttggcttcggcgtggttgtcgtagtggtggtagtggtcgttggcttcttggttgtcgttgtggtagtgggctttggcgtggttgtagtagttgtcgtcttggtagtgggtttcggcgtggtagttgtcgttgtggtagtgggtttcggagtggtggtgctaggagccgccttgggtttaggagtggctttgctgggtggcacaccaatggacgcctccaagccctcgccctcgacgcgaacattgcgcaccttcagcgtgggctgcttggcctttggcgacttgacacgcgccaggtactgattggtgggggagcccaagaacaagaagtcctggaactccaggacgtgtgataccgtggcggc

SEQ ID NO: 40466 - DNA, 516 bp, DROSOPHILA
agcaacaggctgctagccgttaaaaataactaacgaccaagaaatagcacaagaattccccaaaaaaccgaacccaatcacttgaacaaaatgcctaccgcatcagcacatctgcccattcagaagcgccggccgcatgagcacaatggcgagcccagctgccagggtctagatgaggtgaaccgcatgttccggaattactgggatcccacggcctactgggtgtgcgataagcagggcacacgggctcgtctccagcgctgtccgcagtcgcagctctactccgaggaactcggccgttgcgtccactatgccgattgggcctggacggatcccaaggagccggctggccgagccaagatcagtcaatcggtgtccacaaattagtgatatcttacggctaaacttaatttaatgctagtctaagacaaccaacctcattaggcttacgtctatttttacaaaatacctttatttttaatgaaaataagaaaaaaaatcagtacaaaatcaaaa

SEQ ID NO: 40467 - protein, 98 aa, DROSOPHILA
MPTASAHLPIQKRRPHEHNGEPSCQGLDEVNRMFRNYWDPTAYWVCDKQGTRARLQRCPQSQLYSEELGRCVHYADWAWTDPKEPAGRAKISQSVSTN

SEQ ID NO: 40468 - DNA, 4235 bp, DROSOPHILA
tgaaatgcgtttccgtgacggtgtccttgtgctccgtgatctcgtagaggacatcgccggtggaggtttcccaaacgaaagctcgatcgtcctcgctgcccgtcaccgcccaattgtagttgggatgcagactgcaggcgaaaacaggagcggtgtgcttcttgaaagtgaccgtagcttcgtccgtgatggctgctattctctcacggtcacgtagctcctcctcgtcctcctcttcatcatcatcgccaccggccattgcaagccgggcctccagttgctccagcgtcacctcctccaaatcgtcgtcatcttcgtccagcggctgctcctccagctcaattatctcctggagttcgtcgtcgccgtcatcgaaatctggccggtgtggcggtgtgttgtcacgcattcctattctcttaatggtccaaatagcaagttaagctgcataaaaataacaattaaatgaatgtatcacacgtgctagaaaatcaatggtctggcaactcgttcgccaatgttttttaaacatcgattgcttgttgggactatcgacttcgtcgattatttttttagccaaaatacagtgttgccaaatgtcaaaaattgagcggaattttcaaattgaagcgggctatgctgacacgttcatcttggtagtaaaacgtaagcaggtttcatgataaaatcaaactatattttgggggtgttatttttaattcatttaatgcaacaacaaattgcaataacgaggaagccgattaggaactctaaagtaaaggtttataggtttgacctaagatgtattgaaatttgtttttactttgcgtttgtttgatccttatgcacaaatgaacaaaagatgttcttaaagcttaattatatttaacgatgttaaaaatgtcattaagcaagtacttaaattaatgcttagtatatattaatattatatggtattattactatattggctttaaagcatcatgactatctttgaatttcaattatttaatttatttttgacagcctgaactctattcatcaattcatcaatagaatctagatcaccaaaatcacattcagcatcgcatagatcggctctatgttcagtattctccgcctccttttccagggtttttatttgctgttgtagcgaagcgatttggtccaaaagtgttttttcggaattcgctatttgttttggaaaatccatggcttcagcctcaagcttacttagtttttcgtcatattccttcggcgtgtctaatttagctaaacgttctgcgattagattttcttcccttttcatctcctctctgaaaagattaatatttcttagctgttcttcgagtttgcgatcaatttgttgcttgtccatttcgaattttaatcgggtatattgcagttgcctctcaaatttttcgatcccattctctgttaagttgtctatatctttttccaattgattaatatctagttgtaatgagctcgtgcttgaaacagatggatcaactttataagtcatgtcactttttttcaaggttaagcttttcgggctatgatatttcagttctttttccttgtctaaaagttcgttaaaatgcgctctgacaacattttcttgctgattataataagcgacaattttatttttatccttttcaattttttccaagtagtcatttagtttaatagactcatttgtacaaaatcttacttcactttttttctttaggttgatagcgaaatctgaggttgattgacctttgaacttcatgccatttttcatggaaataacagttatattagcgaagaatgatggactgttttcgaacattttattaacatcgtccacggattttctaagctttggccaatttacgtcttccaacaagctcaagttattgattttatattccaattggcttactttcgattcgagatcctttaatatgtttttttgatgccattcttctccgtacaaggaatttaatttctgcagattttccttttccaaattgagcagcttttctgcatctgaaatagttttattggcttcagctagattttcatttaatggctctatttgttttaataattcgcctaggaacttttcgggtcttatgtcatttattatttgttctaaattcttaatttgtgtttgttcgccttcacaataagtactttttttagtttggttcatgagagatgtttctagtagatcaatatccccaacataactcaaaatcatttctcgcaagctcttttctttttgaatatatggctggtggtcaagtttcagtgtcgttgtgccttcgaatttaagattgtctgcaaaatcatttcgaaaagtctccagttcgctcaaaatgttggggcaacattttccagtcgaatagttaccaccttcactttgaatgagattagaaaagttctccactctttctttcagatggaaaagatcggtattaacatctgtataatttgtcactaaagatgattctatgccctgcagttcttccagaaagtcaattccatcgtttatgatttccaaacgatctctgattaattcatagggacagcacttgctcttggcattcttatcgaattttgacataaagtccgaaattatgttaatatctttgtctaactgtcgtgtgcttctaatctcgttgaaaatccacctaccaaatgtggcatctatattgcaattttctaaggcattttgccttttctttaaatcgctgacaaattcatttgaatcattggccacttctgttatttcatcataattatcggtcctattgcaccagccgttccattttccaaacgttaacttggtattccgtccattctctgtcgtcataatcaccacgaagagattttggatcaggaacctgtcgtcgatttccttctgccatttggcgacaattttccaaaacaatcgttcaccgtccttcgacagcccagtcggtatgcaatcccccctcttgtactcagccatatcctcgccattcacctcgttttcatctggagtcttctcctcggaatcgctgtaatcgggagcttggtcccatactttgcggcaaactcgtattaacttcacacacaactcgtacttgtcgatgtcgccgtgaaaaatctgaaacgcagcgttgacttttgcatttgagggcgttgtctgggcaacaaccgatgtctttacggctgccacaagaaccagatacaatggcattaggactacgcgaatctgaaagatacatcattagtacttttagggaaacaaattattcaggtttttttgtgtggaaatataaagtataactttcgacttgaatgaaaaatgttatactaattcctttaaaataagactaacaaaagttcatcatactaatttacttattacataagtggaagaataaagaacttgtaagattttatatttgagctaagaagggatcagatcaggagcatttttaatttgattttgttctctattctattattattttatttctgtggccacttgcactctacaactatttcttatacaattgaaaaaatcgtaattgttgtcggttatattttgtaaatgccccggggatgattccttttttcacaattctccacttttaccgaggggttgcccatttaccatgacttgactgctaacttggctgcttgatttacatctgattgctttcattcttcgggacccattaaaatcgacccccaactccacctgggcaaccttttctaattccattcgaaatggcccgggtgcggagggacctgtctattgttaccctcttctagggtctggtgcatttatttttgtttaggtgcattttcggtttcgattcccacggtttcttccgtacgtgtcctgcgcgtgaggagcgcacgcataacgtacgttcccatgattttataaggaggagggttctcgaaaggagtcacggcgaaaaggaaatgattaggggaagcaattctagccatcctcctacctgcttggtaattgtcgaggtatttattgataagacccagagtaaacagtaacagcggaaagatttattcaaaatgggttgcagatatgagatactctttcagttttctatgtataatgcagatattgattatttatagttttacactatctccactatccatttcaaagaatgtaggaggtgctaattaggcaaagatggtagatattcggtctatagaatgtattt

SEQ ID NO: 40469 - DNA, 2235 bp, DROSOPHILA
atgccattgtatctggttcttgtggcagccgtaaagacatcggttgttgcccagacaacgccctcaaatgcaaaagtcaacgctgcgtttcagatttttcacggcgacatcgacaagtacgagttgtgtgtgaagttaatacgagtttgccgcaaagtatgggaccaagctcccgattacagcgattccgaggagaagactccagatgaaaacgaggtgaatggcgaggatatggctgagtacaagaggggggattgcataccgactgggctgtcgaaggacggtgaacgattgttttggaaaattgtcgccaaatggcagaaggaaatcgacgacaggttcctgatccaaaatctcttcgtggtgattatgacgacagagaatggacggaataccaagttaacgtttggaaaatggaacggctggtgcaataggaccgataattatgatgaaataacagaagtggccaatgattcaaatgaatttgtcagcgatttaaagaaaaggcaaaatgccttagaaaattgcaatatagatgccacatttggtaggtggattttcaacgagattagaagcacacgacagttagacaaagatattaacataatttcggactttatgtcaaaattcgataagaatgccaagagcaagtgctgtccctatgaattaatcagagatcgtttggaaatcataaacgatggaattgactttctggaagaactgcagggcatagaatcatctttagtgacaaattatacagatgttaataccgatcttttccatctgaaagaaagagtggagaacttttctaatctcattcaaagtgaaggtggtaactattcgactggaaaatgttgccccaacattttgagcgaactggagacttttcgaaatgattttgcagacaatcttaaattcgaaggcacaacgacactgaaacttgaccaccagccatatattcaaaaagaaaagagcttgcgagaaatgattttgagttatgttggggatattgatctactagaaacatctctcatgaaccaaactaaaaaaagtacttattgtgaaggcgaacaaacacaaattaagaatttagaacaaataataaatgacataagacccgaaaagttcctaggcgaattattaaaacaaatagagccattaaatgaaaatctagctgaagccaataaaactatttcagatgcagaaaagctgctcaatttggaaaaggaaaatctgcagaaattaaattccttgtacggagaagaatggcatcaaaaaaacatattaaaggatctcgaatcgaaagtaagccaattggaatataaaatcaataacttgagcttgttggaagacgtaaattggccaaagcttagaaaatccgtggacgatgttaataaaatgttcgaaaacagtccatcattcttcgctaatataactgttatttccatgaaaaatggcatgaagttcaaaggtcaatcaacctcagatttcgctatcaacctaaagaaaaaaagtgaagtaagattttgtacaaatgagtctattaaactaaatgactacttggaaaaaattgaaaaggataaaaataaaattgtcgcttattataatcagcaagaaaatgttgtcagagcgcattttaacgaacttttagacaaggaaaaagaactgaaatatcatagcccgaaaagcttaaccttgaaaaaaagtgacatgacttataaagttgatccatctgtttcaagcacgagctcattacaactagatattaatcaattggaaaaagatatagacaacttaacagagaatgggatcgaaaaatttgagaggcaactgcaatatacccgattaaaattcgaaatggacaagcaacaaattgatcgcaaactcgaagaacagctaagaaatattaatcttttcagagaggagatgaaaagggaagaaaatctaatcgcagaacgtttagctaaattagacacgccgaaggaatatgacgaaaaactaagtaagcttgaggctgaagccatggattttccaaaacaaatagcgaattccgaaaaaacacttttggaccaaatcgcttcgctacaacagcaaataaaaaccctggaaaaggaggcggagaatactgaacatagagccgatctatgcgatgctgaatgtgattttggtgatctagattctattgatgaattgatgaatagagttcaggctgtcaaaaataaattaaataattga

SEQ ID NO: 40470 - protein, 744 aa, DROSOPHILA
MPLYLVLVAAVKTSVVAQTTPSNAKVNAAFQIFHGDIDKYELCVKLIRVCRKVWDQAPDYSDSEEKTPDENEVNGEDMAEYKRGDCIPTGLSKDGERLFWKIVAKWQKEIDDRFLIQNLFVVIMTTENGRNTKLTFGKWNGWCNRTDNYDEITEVANDSNEFVSDLKKRQNALENCNIDATFGRWIFNEIRSTRQLDKDINIISDFMSKFDKNAKSKCCPYELIRDRLEIINDGIDFLEELQGIESSLVTNYTDVNTDLFHLKERVENFSNLIQSEGGNYSTGKCCPNILSELETFRNDFADNLKFEGTTTLKLDHQPYIQKEKSLREMILSYVGDIDLLETSLMNQTKKSTYCEGEQTQIKNLEQIINDIRPEKFLGELLKQIEPLNENLAEANKTISDAEKLLNLEKENLQKLNSLYGEEWHQKNILKDLESKVSQLEYKINNLSLLEDVNWPKLRKSVDDVNKMFENSPSFFANITVISMKNGMKFKGQSTSDFAINLKKKSEVRFCTNESIKLNDYLEKIEKDKNKIVAYYNQQENVVRAHFNELLDKEKELKYHSPKSLTLKKSDMTYKVDPSVSSTSSLQLDINQLEKDIDNLTENGIEKFERQLQYTRLKFEMDKQQIDRKLEEQLRNINLFREEMKREENLIAERLAKLDTPKEYDEKLSKLEAEAMDFPKQIANSEKTLLDQIASLQQQIKTLEKEAENTEHRADLCDAECDFGDLDSIDELMNRVQAVKNKLNN

SEQ ID NO: 40471 - DNA, 2998 bp, DROSOPHILA
gcccaggtccacctgccacaggccgtagtaggcgtcggcgatgatgaggttgttgccctgcgtatcaaaggccagtcccagcggacggccgcaccgggactcctcgtagatgtcctctgcaaggggattactattataaaatgaaattccctttataggactcgaaaatacgcaccgcagggctggccgatcttggtgacatgcgtgacatggttggacgttagcttgatgacctcaccgccgtggatgccggtgtagatctcgttgttgcgggctatcaggcactccgggccgtagacccgcccctccagcagtcgctccgctccctccaggtgaaagttcgattccagcgcacccttcaggtctttgggcggggtcacactgtacgaagtggcgatttctccaaggattaacacgggaattacgtcaattgaaacgggcggcacttacatatagtccttgaaggggaaggtggtgcgcggcggcagaccgggcattaggatgatgaggaggaagaaaatcatgaagttcatgatcctcacgcgcagcgcatatagcaggcccatgattgattccttgtgcgtccgccgatcacaaattacagcccaaaaacccgctaaatttaagcaataaccccgaagaaagcgacacgacggcaaagttcaacaagaaaaaaacgtaaaagtcatcatccggaccggtagaggtggccgaaatatcgatatgactatcattcgttgattgaacgtaccacatcttacactctgctacaaaaattaattgtatgcagtttctaaaaactatgttattagggatgcaaattataacaagcatagttggttgaataacatcataattaaagtacctgttagcctggtacctgataactgttttaaaaattccttaaaactatcgcacaatgttgaatgtgaccatcagataccgaaggcttttcgcgctaccttgcgacagtcacaccgctgctagtgtttttgttttgggaattccaaaacgtcgcagttgacgatgagcgataataacaacgcgttggccaccaaggaagacgttttcggcatggagcacgaccaggaccacaccagcaagcactactcgcggtgcagcagtgcgggcagcacgcacactccgaactcctcggcgcacaattcaggtgggcgaacgctggtcaagatcggtcacgctgatcggtcaagagtgcggggcgggggcagctgataaagcagtggcattgaattactcgctatcagcagcattttattacattgtactcatgtttcggttctgtatcgcagacgacgacgacgatagcggcgatgcgcgccattccgcggccgccaattccacgctgagttacaaggagcggagaagggaggcgcacacccaggcggagcagaagcggcgcgatgccattaagaagggctacgacagtctgcaggagctggtgccgcgctgccagcccaacgactcctccggctacaagctcagcaaggctctgatcctgcagaagtccatcgaatacattggctaccttaaccagcagaaactcaagcaggaggacgagggatcggcgctacaaaaggaggtaacagcgttacggatcattaagaacggctatgagaacatgctacagcatcagcaggcgaatccagggccggaggaggcacgactcaccgatgaggccaagtttcaagtggtaagtatggagcgcttacctctattataacctctagaatcgccacccaccaccctcctccgtagttccaggccattatggaggaaatgttcgagacatttcaacacatacccatggagaactttaagcagctgaccaccggcattatcccctggctggaggagcactgcaagccgcacatcctgcgcaacatactcagtcgtaccttgcagcaaatggcgcaggaggctatggaaaaacaggaacttcaggccatggagcaggagtcgagcgagggtttcagctgatcgcgcggttagttcatattctcattggttattttagaaatccctgtttggtagatactttcgttacgtttactgcgtacaaacattaaatgcgtcatttgaatagttgtaaaagcgttgacaaggaaagataactttttggcttaatgattaaagattagataaaactagatttgctaatgctagccgagagactcgacgagagccgctttatccgcactacccagctggcctagcagttccagcagcacattccgtgtgtacggcttgaagcgacgaactcgctcagtgacatccagcgcggtgagcagcgcttcaaggaatccctccagacgtcccgcgctccacacatgacgtgcttcgtgctttagtttcagcacgcccgatgtcagcgtgtaaatcagtccctcgtagaagttctcctcctccagattcgcggccaacttggcgctggccagcagcgccgccggcagatcgcagcggaattcgtgcgaccgcacaaagcaggtggccgccagttggcggacctgatcacatttgtgccgcaacaaatgccaactgagtcggcggaagcgaatgagcaggggatttggctctttcccgcccgacgtacgcaagtgctcgaccttggacaagaaggccagaaagagtatgatggatgacgtgacctcctggcgatcacagcacctcagcatgtgctcgcaagccttgggcagcaagcagcccaattcgtcgtagtccagctcactgggttcccaggcgggtcgtgtgtcaaactctgtagcttggcgctggccgaccagcttgcccagattggcgccaaagagttgaagtgccgcattcgaaatggtccattcggggttggtgatgtgctccatggccaccagcagaatctcattgtagtacttgctcatagctggcctcagttctgtgtcgcgcacaagaacgcaaaggtaatgcagtaccaatgcctcccagcgatcgtgattgctatcgagac

SEQ ID NO: 40472 - DNA, 791 bp, DROSOPHILA
ggaattccaaaacgtcgcagttgacgatgagcgataataacaacgcgttggccaccaaggaagacgttttcggcatggagcacgaccaggaccacaccagcaagcactactcgcggtgcagcagtgcgggcagcacgcacactccgaactcctcggcgcacaattcagacgacgacgacgatagcggcgatgcgcgccattccgcggccgccaattccacgctgagttacaaggagcggagaagggaggcgcacacccaggcggagcagaagcggcgcgatgccattaagaagggctacgacagtctgcaggagctggtgccgcgctgccagcccaacgactcctccggctacaagctcagcaaggctctgatcctgcagaagtccatcgaatacattggctaccttaaccagcagaaactcaagcaggaggacgagggatcggcgctacaaaaggaggtaacagcgttacggatcattaagaacggctatgagaacatgctacagcatcagcaggcgaatccagggccggaggaggcacgactcaccgatgaggccaagtttcaagtgttccaggccattatggaggaaatgttcgagacatttcaacacatacccatggagaactttaagcagctgaccaccggcattatcccctggctggaggagcactgcaagccgcacatcctgcgcaacatactcagtcgtaccttgcagcaaatggcgcaggaggctatggaaaaacaggaacttcaggccatggagcaggagtcgagcgagggtttcagctga

SEQ ID NO: 40473 - protein, 254 aa, DROSOPHILA
MSDNNNALATKEDVFGMEHDQDHTSKHYSRCSSAGSTHTPNSSAHNSDDDDDSGDARHSAAANSTLSYKERRREAHTQAEQKRRDAIKKGYDSLQELVPRCQPNDSSGYKLSKALILQKSIEYIGYLNQQKLKQEDEGSALQKEVTALRIIKNGYENMLQHQQANPGPEEARLTDEAKFQVFQAIMEEMFETFQHIPMENFKQLTTGIIPWLEEHCKPHILRNILSRTLQQMAQEAMEKQELQAMEQESSEGFS

SEQ ID NO: 40474 - DNA, 5314 bp, DROSOPHILA
tttttgaaccagtattcagcaggtcgcctatgtactcggtgtacatggagttcttatgccgcaaaggggtagtttctcacctgtaagaggattcacgaaaaccttgtttaccacacagcttggcagaagctcgatttcctactgagaatccaatttacagtagtctcccgtcgacaagaacctgaaatcgaatacccaaaggcctaaggtaattcgatatctttgctattacacaaaaagcaagttattacagtcgagtgcgattatctgcgttcactttgctctgactacagtgcgcaccaaaagtaatctcccacaagaactttgaaatgctatagttaaatccgttaagccgtgagtttcgctttatttttaaatactattgctcagtttctaagctcagttatccaacgggcttaaatctccaaagtttcaaacctttgagctaacactcttaacttaatctgcaatattgaatttaaagattatagatagtctgaaactttccgttagagtcttcttcacttcacggagaatggcagacgagcggaaaacaaaacttgaaaaatcattatactcgatttcaacatgtgtatactacattaaaactgtagctttttgcagtttttatttgctgtgtgtgtgtgtgtgtgtgtgtgtacgcgcgcgaacccataaatttatatattccccgaaataaccccgttcttaaaaaaagagcggaataaaaacgtaaatggcagcgaaagaagaaaaggcgaaataaaaaataataggcaactgtctctccggcaatctctcgcaatctcaaaaacaactagcgaccataaccattatttgtaccttccgaatacgaatacgaatacaagtacgaacacgaatatataacgtcgtagcgcacacgcacaccagcacaggtggccgtttatatagttgggtttttgtaggcccgttcgtcgctttttcgagttttaaaaattagtattgaaatcgtcgttaacggcgacggtttgcctcagttttgacgcttgaaaacggtcgtattttccactctctcgccgctctctcgctggtaagtgtgtgtgcagtgagcgagcgcgtgcatgtgtttgtgtgcaaggtgttgctctgcttggaaataaataaatagttcaagtcgaacgaactatttgaaactaattggcaggcatgtgcattaagttatcaaccgttgccattagccgattagcgaaaaatgccagacaaaatatcacttgtcaataatggatgttagtcactgtgaaggaaagttacgttctgtttctttttcttgaaaaattctcaactgcacataacaagcgtaaattcgttcgtccccgtccgtgtgtgtgtgtgggtgagccgagctgtggcgagagcaagacagcgagtttagttcactctctcggctctcgccaacccgcacaccacccccccccccctacaccgtgctccatctattggcttattatcgtatctttttcattacagtgctctgcaggcgatttaaattaagttggcaattacatttccatctgggaattcagtggttagtgtgccagttcggaattagtttgttaattggggctgccaaggaagaatccgccatgcagagcacacatcatgtgatatgtcattctgaaagctgcttttcgaacaacccccaaccactgtgcgaatcttggtcgtcgtcgctggaaaaatactcaaaatttgagattcgattctagtttcaacccgccactatgaatctttatatgtaacttgcccgctttcattcatactcgttgttcagtactggcggcgtatcatcctccgaattgtaagatgcgtaatcggttcttaaatgtgtatttctacgctgtattcggttttcggcattcgacgctatcttgtttacttgcatttggaaatcactatctcaaatatgttctgttattgagcgtgttccacttgccactttgtcgcagtgtatctgtgtgcgggagagttcgttttttacgttagctttttgctgtcattcgttttgaaataatcaaaatcgataaaaaattatatatatatatacatataagtttcgtcgctttagatttgtaagctcttttcgtgcatttatttggctacggcgagcgtgtcggtgagctgccacctttgatgggtttcgatttcgatttcggtttcggaatgtgttaaacagttggaaacacgtcaactttacacaaacaaatgtgtatgtgccagtaaatatcgagttggtggtggattctgaagacgaaaaccgaaacctaaccgaatccacgactgcctaacttttgacacaaaaagtccaaaactggattttttcgttggctcgtagccagcattttttttttaaaccatctgccaagtgaatttccagtgggcagaagtatacatatcaaacggaagtcgatttgctgattgagaagttagaatccgaatcatatttaatcaagtttttctgcagtttaaaatacctatgtgatttatgtaatatagccttcaaatgaagcgcgtagcatgcttttagtataaataaaatttgattactaaaacaagattgaagtagtcatttttgggcacagaatgcctactatatgaatatgactgacaatgtgtctaaaaactgaattttcgagttttccaaaactggttatgacatcggttgtcaagtcaatatttcgtggttttcgaaaaccaatttttaaactaatattggaatattttcttgcttgttttccaacagcatcgggaatttaagaccttgatcaaagggtgcaccctgagagccacatccatgttaatgcctcgctacttggatagctccacgtcgtctggcagtcacggagctgcaggagcgaccaacagctcctcctctccgccgacgacggtggccgctcacacgaagatgcggctgctaagtaaagtggagcacaacatgcgtcagagccaaggtcacatccagagcaaccagagcaacgcgagcggccaggacatcaaccacctcctgcacacggcctccacgggcaacggcgtggtggacgatgtcgacggactgctgacgcccatgcgcattaaggcgcacatgtcgccaccctactccgccggcagttcggtgaagagcgattccctcggctatagccctcggccggaacgcaacctgtggagccgggccgaaatgctggagatgctgagcatcatgcagaacctgaacgccctcgagcagctaaacgaccggaacatgaagagcgagcaggtcttccggcagatcgaagaggtgatgcgcagcaagggcttcgtgaagaagtccagcattcagatctggacaaagtggaagttcctcaagtccacgtacaacacaacaacgcgacatggtacgggtgtgcccaaggtggtgccggaggaggtttaccgcgtgctctgccggatgttaagtgatacaaatcatggcggcggcaacagcaatgtcaacggcagccttagtgaatgcggcaattcgatggacagttccaagacggcgggcgatgataacaaggaggatattctcggagtggagcatcccatattcggcttccgactgggacccattaaacccgagccaattgatataggtgagtgggattgtcaaaatgaaagtatgttaagagagtcattactgaaaacacgtaccattctatatttgcaggctatgagacgaccgaaaaacatgatatggtgtccgagcccgacatggagtcgttcgactacgaggcaggaagctcccatgccgacaacggcgaccaggaggatgtgccccacttgccgtttatagtgtccgttaaacatgaacccgacgtggatctgggcatggacaccaccaacacaccgccgcccacagcgccagcctcgccttcaccgccaccagtaactgtggatgacaccgaagatgacagcgtttactcatccacgccggtggcaccacctcccctgcgtgtggcctcctttgccaagggcgagttgcgacgacccacccacggcatactgcagatcgaccgcccgccaccgacgctcaccaagatgggacagcagcagatacccaatccgggccagatgagccggtccgtgccgcttcagagcaccagcagcataaactttgtccacccacacagcaagttaatgttaccgagaaggcagaatccgaatagcagtcagtccgggctgcgactgcccagggatatcagtgtccagtcgacaggaatgcgtatgaagacggtgccaatgagggacacgggctactcgctgcgtccggatcgaatgactcacgacatcgatcagtccacgtccagtccaccgcagtcgccgtccacaatgtccagtctcttgggtcgcgggccgccaccgaagtatcagatagctggtcagcaagcaggtgcttccaccagcaggcaggcccacatgatgtcttcccaccagctgacaccggtgcagcaccaacagctccagccgcgaaagcgtcgattgggccaaagtccggtgatgggaatgcccgtgccggtgaaactgcagcgcagcagtaatatgtacggctcagctccgaaagatatccgatctcaccctgcggttggcgaggagagcaaaaagaagtccagcgaggaggagaccaagcagcgcagaaagcgtcaggacgagctgctggccaaggaactcagccaactggcttctgccatgcgcacggcacagaaggagatgttgcaagacttcttcctccaacagaaggagatcgcacggcgggagcacgtgttccagatgaagcaggactcgttggtaatgcggacgctgcgcagacaaacagatgcgctgctgagaacagccaacgagctggtcagtggagtttccgaggcagctaaaatggagcccgacgataaggaaggtgtcattcccgaaactcaaatgccgttcgagccagaaaccgagcttcagactccggaaagcgaggaggacaatgaaaatggagaagggtatgctggcgatgatgtgcaggaaactatggaagagccagattatgaagacaatgaagatgatgattatgagcacgatgaggacgaggaagacgaaggcgactacgacgagaacatggccaatgacagcgacctggaaatgtccaatctagccatgtccgagggctccaacaatgccgaaatcattagcggagggcactagatggctatctcctaacttcctaacacatcgccaagtattaccccaaaaagacaaacaccattgttaataccgattcatt

SEQ ID NO: 40475 - DNA, 2451 bp, DROSOPHILA
cggcgacggtttgcctcagttttgacgcttgaaaacggtcgtattttccactctctcgccgctctctcgctgcatcgggaatttaagaccttgatcaaagggtgcaccctgagagccacatccatgttaatgcctcgctacttggatagctccacgtcgtctggcagtcacggagctgcaggagcgaccaacagctcctcctctccgccgacgacggtggccgctcacacgaagatgcggctgctaagtaaagtggagcacaacatgcgtcagagccaaggtcacatccagagcaaccagagcaacgcgagcggccaggacatcaaccacctcctgcacacggcctccacgggcaacggcgtggtggacgatgtcgacggactgctgacgcccatgcgcattaaggcgcacatgtcgccaccctactccgccggcagttcggtgaagagcgattccctcggctatagccctcggccggaacgcaacctgtggagccgggccgaaatgctggagatgctgagcatcatgcagaacctgaacgccctcgagcagctaaacgaccggaacatgaagagcgagcaggtcttccggcagatcgaagaggtgatgcgcagcaagggcttcgtgaagaagtccagcattcagatctggacaaagtggaagttcctcaagtccacgtacaacacaacaacgcgacatggtacgggtgtgcccaaggtggtgccggaggaggtttaccgcgtgctctgccggatgttaagtgatacaaatcatggcggcggcaacagcaatgtcaacggcagccttagtgaatgcggcaattcgatggacagttccaagacggcgggcgatgataacaaggaggatattctcggagtggagcatcccatattcggcttccgactgggacccattaaacccgagccaattgatataggctatgagacgaccgaaaaacatgatatggtgtccgagcccgacatggagtcgttcgactacgaggcaggaagctcccatgccgacaacggcgaccaggaggatgtgccccacttgccgtttatagtgtccgttaaacatgaacccgacgtggatctgggcatggacaccaccaacacaccgccgcccacagcgccagcctcgccttcaccgccaccagtaactgtggatgacaccgaagatgacagcgtttactcatccacgccggtggcaccacctcccctgcgtgtggcctcctttgccaagggcgagttgcgacgacccacccacggcatactgcagatcgaccgcccgccaccgacgctcaccaagatgggacagcagcagatacccaatccgggccagatgagccggtccgtgccgcttcagagcaccagcagcataaactttgtccacccacacagcaagttaatgttaccgagaaggcagaatccgaatagcagtcagtccgggctgcgactgcccagggatatcagtgtccagtcgacaggaatgcgtatgaagacggtgccaatgagggacacgggctactcgctgcgtccggatcgaatgactcacgacatcgatcagtccacgtccagtccaccgcagtcgccgtccacaatgtccagtctcttgggtcgcgggccgccaccgaagtatcagatagctggtcagcaagcaggtgcttccaccagcaggcaggcccacatgatgtcttcccaccagctgacaccggtgcagcaccaacagctccagccgcgaaagcgtcgattgggccaaagtccggtgatgggaatgcccgtgccggtgaaactgcagcgcagcagtaatatgtacggctcagctccgaaagatatccgatctcaccctgcggttggcgaggagagcaaaaagaagtccagcgaggaggagaccaagcagcgcagaaagcgtcaggacgagctgctggccaaggaactcagccaactggcttctgccatgcgcacggcacagaaggagatgttgcaagacttcttcctccaacagaaggagatcgcacggcgggagcacgtgttccagatgaagcaggactcgttggtaatgcggacgctgcgcagacaaacagatgcgctgctgagaacagccaacgagctggtcagtggagtttccgaggcagctaaaatggagcccgacgataaggaaggtgtcattcccgaaactcaaatgccgttcgagccagaaaccgagcttcagactccggaaagcgaggaggacaatgaaaatggagaagggtatgctggcgatgatgtgcaggaaactatggaagagccagattatgaagacaatgaagatgatgattatgagcacgatgaggacgaggaagacgaaggcgactacgacgagaacatggccaatgacagcgacctggaaatgtccaatctagccatgtccgagggctccaacaatgccgaaatcattagcggagggcactag

SEQ ID NO: 40476 - protein, 775 aa, DROSOPHILA
MLMPRYLDSSTSSGSHGAAGATNSSSSPPTTVAAHTKMRLLSKVEHNMRQSQGHIQSNQSNASGQDINHLLHTASTGNGVVDDVDGLLTPMRIKAHMSPPYSAGSSVKSDSLGYSPRPERNLWSRAEMLEMLSIMQNLNALEQLNDRNMKSEQVFRQIEEVMRSKGFVKKSSIQIWTKWKFLKSTYNTTTRHGTGVPKVVPEEVYRVLCRMLSDTNHGGGNSNVNGSLSECGNSMDSSKTAGDDNKEDILGVEHPIFGFRLGPIKPEPIDIGYETTEKHDMVSEPDMESFDYEAGSSHADNGDQEDVPHLPFIVSVKHEPDVDLGMDTTNTPPPTAPASPSPPPVTVDDTEDDSVYSSTPVAPPPLRVASFAKGELRRPTHGILQIDRPPPTLTKMGQQQIPNPGQMSRSVPLQSTSSINFVHPHSKLMLPRRQNPNSSQSGLRLPRDISVQSTGMRMKTVPMRDTGYSLRPDRMTHDIDQSTSSPPQSPSTMSSLLGRGPPPKYQIAGQQAGASTSRQAHMMSSHQLTPVQHQQLQPRKRRLGQSPVMGMPVPVKLQRSSNMYGSAPKDIRSHPAVGEESKKKSSEEETKQRRKRQDELLAKELSQLASAMRTAQKEMLQDFFLQQKEIARREHVFQMKQDSLVMRTLRRQTDALLRTANELVSGVSEAAKMEPDDKEGVIPETQMPFEPETELQTPESEEDNENGEGYAGDDVQETMEEPDYEDNEDDDYEHDEDEEDEGDYDENMANDSDLEMSNLAMSEGSNNAEIISGGH

SEQ ID NO: 40477 - DNA, 3308 bp, DROSOPHILA
tctttgttcgcattatcaacttagctctcaaacagtacgattctgaaaatcatattattgtatatcagccacattttttaagagaaaagcgagccatagttgcaacaactagttgtagcgatacaatgggatttttgcggctttttttcagtgcctgtctaaggagctcttcagagttagtgccagatttttgtttcgaaatcaaagctaaaaaagaaaatatattaacttctaaattgcacaacatttttataatattttataaatataagtcaaggcagctcacataaattggccttgccctatattattgaatacataatcgcaacttcatccaaaatttctagaactttctgtttttttgttttcattcgaatatattgcgcggtctgttgaaattcgatcggcagtcagagaagtactgcctgcttaatattataaatataacttatattctgaacaacacagattgcctcttatcaaagagagaatagttctgtatcggagcggttttaacgtgtttgaacaaatcttttattatctcttctcgaattaaaattaagagagggagtggatttttttaagggaaagtagtcttaaatgaaaagcctcttcagaagtattctgttttgcaataaacggtagtcgcttttgagaggctttcttctcttgcctttctcattggatcttttgaggcaaagaaaacaaatattaatcagctgaatcaaagctgtgtttgattattatctgtaatcttaaatgacctgaactgttggcccaactgaacttgatcttatctgggaataacttaatcataaatttgcataaagtttgctttaggccgactgttataaaaaataaataggttcaaaaatattcatttaatattttatttcagtgaatattataatctaaagtttattttaaatccgttctccctgcattaccaaagatttcttggtcttggagctcaagttcgattgcccgtccaagtggtcgctcatttgaacatgttaaccgtggataaagtggagccccaactgtaggacttggtaaaaacgctgaaacgaagacagaaaaggaaaccaatgtattgtagcgattggaatggagatttaacgctagcagtctgctctggatcgagctaccattaaccagtttggccaggccgaggccaagttcgtgcccgtgatgcaatagcaggattggtaacaccaaatccgacttgcacagttcggcgtaaccagttgttggccaacttacttttcgcgcagatactgcagcacttcctgttcgtgggaagtgagaccgtcgaagatcgcgtccaagttaatccgcagcagctttcggttggggataccgatgaggaaggtggccgccccatccagttgcattgtatagtacatggccagctttccaagctcaacgttcctcttctgacagatttcggctccccgtttgcccacagctaggagttccggactaccaggatgccaggactggggtccagcgttgcttaggagtcccagagagtgcgcggccgcacagacaacgcccacgcccatctcctggaaggccttcatgtggcgcagcaaagtgttgtccaacagggtgtagcgggcatagttgagcaccacctggatgcgacctttgccccgctcggcacactccttcagcacgtccacatcgtaggcggtgactccgatgaatcgagcctttcccgcctggacgtactcctcgaggacgggtatggtctcattcagcaccatgtccagactaggtgccgcatccacgtcatgaacctgtcacaaggtgttagtttatagacaaatctatatattggtataccaaacacacctgtagtacgtccaccctgtccaactggagcagctccagactacgcttcacactctcccgagccttggcagccgtatagtcgaacatattgtttggatccaactcgtaacgtgcaactttagttgctatataataggcctcccggggcacatccttgagcgcctggccaagcagctcttccgatttgccttggccataaaagggagccgtgtctatgtagttgataccggatctaatggcttcctgcaccgtgaggatgccctcctcgcgatcgaagtcatcggagaagagcttggagagagtggcaccacccaaagcaattttggatactcgcagacccgtggatccgagttggcggtactccatacgacgcaccttctcctcatcgtggaaacccttgacgaaagtagctggcagtgatcccgacatccttttcgcttcaattaacaagcttgaatgaatagaactcctagaaaaatggcactttataagtgcataaagtgattttaacatatgtaggtatgagtgagttccaaaatagatttgcctcccttagcaagcttctcttcgtgataagctgtggaagagaaggttcgctcttagttctttatatatattactatgtaatttcgcattattaatgtagctctctgtaagaatgattctaaaaattgtgatatcatataccaaccacattttttaaagagaaaaccaattcccaattaaggtaattccttttaataccttgcatgtgaacaataagcataactccgatcatgtttgttttaatactatttattttatttatcagaggagattctgagctttttgcggcttccaatcagttgacaaatcgttaagagtaaatataaatatctgctttatatatcaatatgcatgagatggggacgagcaccgctcagaagaagacatcgaaatcgccctgtggctgatagccagctccgggcgggatcagctggggtcgctgctgttgctggcgctgtgggcgtggcacgatgatgtcgttgatctcatggagaattccattggtggccaccacatcgcacttggtgacgccggcgttctcgatcttgggacgacgatcgcgggtgatacgcagatgctggccagagatggactcgatggagcggacaaatggccagttggttgggataatgccggcacagcagacaacatcctcaacgatatgggttttgaccaaggccatgggatcggcgggctttgaaccctcaccggactcgttcagctcctcgaagatatcgttctttggcaccagcagggtgagactcctcgaatcgttggacagcagctgtgtaagattagccttacgaaccagctccaggaacttgctgtagttgggattagcctccagcagcttaagcatgttctgtggaatatttacaaataagcataagctttaaattccgtga

SEQ ID NO: 40478 - DNA, 1051 bp, DROSOPHILA
cttgttaattgaagcgaaaaggatgtcgggatcactgccagctactttcgtcaagggtttccacgatgaggagaaggtgcgtcgtatggagtaccgccaactcggatccacgggtctgcgagtatccaaaattgctttgggtggtgccactctctccaagctcttctccgatgacttcgatcgcgaggagggcatcctcacggtgcaggaagccattagatccggtatcaactacatagacacggctcccttttatggccaaggcaaatcggaagagctgcttggccaggcgctcaaggatgtgccccgggaggcctattatatagcaactaaagttgcacgttacgagttggatccaaacaatatgttcgactatacggctgccaaggctcgggagagtgtgaagcgtagtctggagctgctccagttggacagggtggacgtactacaggttcatgacgtggatgcggcacctagtctggacatggtgctgaatgagaccatacccgtcctcgaggagtacgtccaggcgggaaaggctcgattcatcggagtcaccgcctacgatgtggacgtgctgaaggagtgtgccgagcggggcaaaggtcgcatccaggtggtgctcaactatgcccgctacaccctgttggacaacactttgctgcgccacatgaaggccttccaggagatgggcgtgggcgttgtctgtgcggccgcgcactctctgggactcctaagcaacgctggaccccagtcctggcatcctggtagtccggaactcctagctgtgggcaaacggggagccgaaatctgtcagaagaggaacgttgagcttggaaagctggccatgtactatacaatgcaactggatggggcggccaccttcctcatcggtatccccaaccgaaagctgctgcggattaacttggacgcgatcttcgacggtctcacttcccacgaacaggaagtgctgcagtatctgcgcgaaaacgtttttaccaagtcctacagttggggctccactttatccacggttaacatgttcaaatga

SEQ ID NO: 40479 - protein, 342 aa, DROSOPHILA
MSGSLPATFVKGFHDEEKVRRMEYRQLGSTGLRVSKIALGGATLSKLFSDDFDREEGILTVQEAIRSGINYIDTAPFYGQGKSEELLGQALKDVPREAYYIATKVARYELDPNNMFDYTAAKARESVKRSLELLQLDRVDVLQVHDVDAAPSLDMVLNETIPVLEEYVQAGKARFIGVTAYDVDVLKECAERGKGRIQVVLNYARYTLLDNTLLRHMKAFQEMGVGVVCAAAHSLGLLSNAGPQSWHPGSPELLAVGKRGAEICQKRNVELGKLAMYYTMQLDGAATFLIGIPNRKLLRINLDAIFDGLTSHEQEVLQYLRENVFTKSYSWGSTLSTVNMFK

SEQ ID NO: 40480 - DNA, 5512 bp, DROSOPHILA
tggtcaagatcggtcacgctgatcggtcaagagtgcggggcgggggcagctgataaagcagtggcattgaattactcgctatcagcagcattttattacattgtactcatgtttcggttctgtatcgcagacgacgacgacgatagcggcgatgcgcgccattccgcggccgccaattccacgctgagttacaaggagcggagaagggaggcgcacacccaggcggagcagaagcggcgcgatgccattaagaagggctacgacagtctgcaggagctggtgccgcgctgccagcccaacgactcctccggctacaagctcagcaaggctctgatcctgcagaagtccatcgaatacattggctaccttaaccagcagaaactcaagcaggaggacgagggatcggcgctacaaaaggaggtaacagcgttacggatcattaagaacggctatgagaacatgctacagcatcagcaggcgaatccagggccggaggaggcacgactcaccgatgaggccaagtttcaagtggtaagtatggagcgcttacctctattataacctctagaatcgccacccaccaccctcctccgtagttccaggccattatggaggaaatgttcgagacatttcaacacatacccatggagaactttaagcagctgaccaccggcattatcccctggctggaggagcactgcaagccgcacatcctgcgcaacatactcagtcgtaccttgcagcaaatggcgcaggaggctatggaaaaacaggaacttcaggccatggagcaggagtcgagcgagggtttcagctgatcgcgcggttagttcatattctcattggttattttagaaatccctgtttggtagatactttcgttacgtttactgcgtacaaacattaaatgcgtcatttgaatagttgtaaaagcgttgacaaggaaagataactttttggcttaatgattaaagattagataaaactagatttgctaatgctagccgagagactcgacgagagccgctttatccgcactacccagctggcctagcagttccagcagcacattccgtgtgtacggcttgaagcgacgaactcgctcagtgacatccagcgcggtgagcagcgcttcaaggaatccctccagacgtcccgcgctccacacatgacgtgcttcgtgctttagtttcagcacgcccgatgtcagcgtgtaaatcagtccctcgtagaagttctcctcctccagattcgcggccaacttggcgctggccagcagcgccgccggcagatcgcagcggaattcgtgcgaccgcacaaagcaggtggccgccagttggcggacctgatcacatttgtgccgcaacaaatgccaactgagtcggcggaagcgaatgagcaggggatttggctctttcccgcccgacgtacgcaagtgctcgaccttggacaagaaggccagaaagagtatgatggatgacgtgacctcctggcgatcacagcacctcagcatgtgctcgcaagccttgggcagcaagcagcccaattcgtcgtagtccagctcactgggttcccaggcgggtcgtgtgtcaaactctgtagcttggcgctggccgaccagcttgcccagattggcgccaaagagttgaagtgccgcattcgaaatggtccattcggggttggtgatgtgctccatggccaccagcagaatctcattgtagtacttgctcatagctggcctcagttctgtgtcgcgcacaagaacgcaaaggtaatgcagtaccaatgcctcccagcgatcgtgattgctatcgagacaaacagtctccgcggtttggttttcatttagcctcttaagaatctgctgcacagcgcgatggagcagcagccgctgtcgtggattatcgttcttcagcacgtgaaggaacattatggcgaagccggcaccacgtcgtgtggtgctcacttgacggctttcagtcagcagctctcgctctaggcagtcgtgaagcatttggaatcccgaatcgcagctgtctaagctactggtgatggcacgggtaagtctgccaatgctcaagccggccgcctctatggctcctttgtgccggcaaagcgtcaaaacggaaacattaatattgaggcaacgacgcagagtctcggtgttaactgttttggcagacgtttgcaattggtaacacccaatgctggtggccagatcgcaacagccctgcagaaggataaacaaatgataagtttatcaagagttaagaaatatatctacgcaccttcaacgttaaccagaagctcatcagtaagtactttcgacaagcctcttcctccccatcacacttgaaggagctttcgctgaccagcagctggagactctcgtccatgtcctggaaactggctgctgtggctgcctcttcctgtcgccgggcgttggccacattgaggaacttgagaatgccgctgagaattctctctagcaatggcaacaaatcctccagaggcgtctccactgccaagccagccttgaccacctcgtccaaggcgcaaagatagccaaagagatgtcctccgctcttggcggtctgcaaaggatcttcgaagaagggatctaatttaccggtaagccttttcaggcactcatcaaatatctttgatccagcttgctcttttgtaaccgccaactgtgcgtagagggaaaccaaggagcattggtccatatcagacgtgtggcacagttcgaagcaccgctccacgcacttttcactgtccacatggcccatctgaatcaacagggagaccgttaggtccaaagcatcatcgaaaccttgtggattgttgagggtttcgaagagctgttgcgccatttcctttggacgaaagactccgtgctccaggagaaatatgcccatgcgctgattctgctgaggactgcacatttttgcattttttgcgacttcttctgcatatagcgacctatttaggatttccagcaacttcagggcaaagatcttgggttgataaacctcgctgtggatgtcccgctcaatcagatgctgaagatgtgaaaagaatcgcttgatattctgagccaatgcatggccacccactccgatgtccgcctttagaaccttttgaaagtgcttggccgtgtgattgataatcgttggcatcttgcccagcatcgtgttccggaactctgagctttccagacagcgatgtcgctctacaaagctgtgaaagaaatccagacagtcttcgacggcaaagtttcccagattgtcaaccagaaagcgaaagatcaacagctgcgcctccgtctccatctggctgcagttggtcaacagctcggtgctgatcttaaagaagtgcagcttggaggtagcatatatctccctggcgaacatgctgaagatcagaatcagacgtaattgatcgctcggcgacctttcctcctcggtggccaggaactccacaatctgaggatttgcttgcagcagctcaaacaactcttcccgctgttggatgcgcaggaaccactgcgaatgaaagttctgaatctcggccacactgccgttaagcaacagctccacactggctgcaagtagtgccggagagcgctggttgctcaagcttttcacgggatattgactggcggcccgaagtcccttatagctcaggctgagccttaggccattgaagaactcctcttcgctttgattcgttgccgccaagagatcaggcagggaatgagagttgagagcgccgctcagcagatagtacttgttgcgattcgtccatggccagaactccacaatcaagcgaaagtaggagaatgctctttccggctgtttgcagcagtggttgtacagcgtgagcgtttcctcacgggatcccgtttgcgtctggcgttgcaggcagtgatagaagtgctccaacttcagcggaaggagttgcagcttggggaacttctttaccagcaagtttgtggccttcagcacggccatcaggctgggattgttgcgctgcagagcctcaattatggcagtggtgcatttttcctccagcagcgcagcatcgagacgcttccaatggtcggtgagcagaatggattggagcatcaggaaggcagtgggttgctcgctggtcaaacgctggaaaagatccgcgaagtgcgagtcttgtagttcgtacttgtgcactatgtggtagtacacacggaagctaatgttcagggcggcttgattggcaccactgcacgtgtccgcctgcgccgcctcatcctcctccgtctgtattcgttgggccagctgcagtgcggcatcctccgggcggacatctcccaggccctagaaagaacacaatatgttacacctcagtccccgtgccgtactcaattcacctgcaggtagcagaggcaatcgctgggtccgatttttggccgttttcccggagattccgacatgcccaatctcaattctcacaactttcgtcttaccacaaccagggctccacaaaaccggccactgcgctacgataattgcgcggtaatcgataatcgatggcttttcgttatctaaaaacttgaaacgcccaaccgttgttgattaaaaattatgtttccaattaatgtgacatataatttttatatttatcatttatagcggtaccaagtacttcgtttagagactcagtgtttaaaattttcgttatattttgtgagggatggctgtctggtaatgttaactaggtacagggtactgtattctgttttcttttacagcgtttttaaatattaaaaagatgataaattttttttttttttaataaactttattaacaacaatctttgaatataaagctttcacaaagcagctgtttgatacaaccgataaaattaattcgatagcagaaattgcagatccgtaagttcaaaagttttcttgacaaccacagcgcgtacaggaaacgagaaaaatataatattttaaaggtatttcatgcaatcgatataacaaaccgaagaccaaattggctctttgttttttcaagtgagtgctccctacaaagttcgttatgataagaaaatgcatgtgtttgtgctcttggattcaatgcttgcaaggtttgcctcgcgttttgtttatttatttgcatacatgaaattcagataaacgtgtggattttcctagaactggtgccatgcgtaattaatgcaaatgctttccgcatttcccagcgtcgtgctgctcatccacagagaatagctgcagccgatttcaagtttcctgttctggcatcgctcccagttcgaaaactccagcttccccgcaacccatcttttcggtccgcccaatacttgtaaatctagtttcgactgacttcagcacatggctttcagatgcgatacgagatacaacctattcgcattctcggcatctgccaccccgaaaatttcaaggaagctcggctgaatgcgaattttttgaaccagtattcagca

SEQ ID NO: 40481 - DNA, 3335 bp, DROSOPHILA
ttgtggtaagacgaaagttgtgagaattgagattgggcatgtcggaatctccgggaaaacggccaaaaatcggacccagcgattgcctctgctacctgcagggcctgggagatgtccgcccggaggatgccgcactgcagctggcccaacgaatacagacggaggaggatgaggcggcgcaggcggacacgtgcagtggtgccaatcaagccgccctgaacattagcttccgtgtgtactaccacatagtgcacaagtacgaactacaagactcgcacttcgcggatcttttccagcgtttgaccagcgagcaacccactgccttcctgatgctccaatccattctgctcaccgaccattggaagcgtctcgatgctgcgctgctggaggaaaaatgcaccactgccataattgaggctctgcagcgcaacaatcccagcctgatggccgtgctgaaggccacaaacttgctggtaaagaagttccccaagctgcaactccttccgctgaagttggagcacttctatcactgcctgcaacgccagacgcaaacgggatcccgtgaggaaacgctcacgctgtacaaccactgctgcaaacagccggaaagagcattctcctactttcgcttgattgtggagttctggccatggacgaatcgcaacaagtactatctgctgagcggcgctctcaactctcattccctgcctgatctcttggcggcaacgaatcaaagcgaagaggagttcttcaatggcctaaggctcagcctgagctataagggacttcgggccgccagtcaatatcccgtgaaaagcttgagcaaccagcgctctccggcactacttgcagccagtgtggagctgttgcttaacggcagtgtggccgagattcagaactttcattcgcagtggttcctgcgcatccaacagcgggaagagttgtttgagctgctgcaagcaaatcctcagattgtggagttcctggccaccgaggaggaaaggtcgccgagcgatcaattacgtctgattctgatcttcagcatgttcgccagggagatatatgctacctccaagctgcacttctttaagatcagcaccgagctgttgaccaactgcagccagatggagacggaggcgcagctgttgatctttcgctttctggttgacaatctgggaaactttgccgtcgaagactgtctggatttctttcacagctttgtagagcgacatcgctgtctggaaagctcagagttccggaacacgatgctgggcaagatgccaacgattatcaatcacacggccaagcactttcaaaaggttctaaaggcggacatcggagtgggtggccatgcattggctcagaatatcaagcgattcttttcacatcttcagcatctgattgagcgggacatccacagcgaggtttatcaacccaagatctttgccctgaagttgctggaaatcctaaataggtcgctatatgcagaagaacacggagtctttcgtccaaaggaaatggcgcaacagctcttcgaaaccctcaacaatccacaaggtttcgatgatgctttggacctaacggtctccctgttgattcagatgggccatgtggacagtgaaaagtgcgtggagcggtgcttcgaactgtgccacacgtctgatatggaccaatgctccttggtttccctctacgcacagttggcggttacaaaagagcaagctggatcaaagatatttgatgagtgcctgaaaaggcttaccggtaaattagatcccttcttcgaagatcctttgcagaccgccaagagcggaggacatctctttggctatctttgcgccttggacgaggtggtcaaggctggcttggcagtggagacgcctctggaggatttgttgccattgctagagagaattctcagcggcattctcaagttcctcaatgtggccaacgcccggcgacaggaagaggcagccacagcagccagtttccaggacatggacgagagtctccagctgctggtcagcgaaagctccttcaagtgtgatggggaggaagaggcttgtcgaaagtacttactgatgagcttctggttaacgttgaagggctgttgcgatctggccaccagcattgggtgttaccaattgcaaacgtctgccaaaacagttaacaccgagactctgcgtcgttgcctcaatattaatgtttccgttttgacgctttgccggcacaaaggagccatagaggcggccggcttgagcattggcagacttacccgtgccatcaccagtagcttagacagctgcgattcgggattccaaatgcttcacgactgcctagagcgagagctgctgactgaaagccgtcaagtgagcaccacacgacgtggtgccggcttcgccataatgttccttcacgtgctgaagaacgataatccacgacagcggctgctgctccatcgcgctgtgcagcagattcttaagaggctaaatgaaaaccaaaccgcggagactgtttgtctcgatagcaatcacgatcgctgggaggcattggtactgcattacctttgcgttcttgtgcgcgacacagaactgaggccagctatgagcaagtactacaatgagattctgctggtggccatggagcacatcaccaaccccgaatggaccatttcgaatgcggcacttcaactctttggcgccaatctgggcaagctggtcggccagcgccaagctacagagtttgacacacgacccgcctgggaacccagtgagctggactacgacgaattgggctgcttgctgcccaaggcttgcgagcacatgctgaggtgctgtgatcgccaggaggtcacgtcatccatcatactctttctggccttcttgtccaaggtcgagcacttgcgtacgtcgggcgggaaagagccaaatcccctgctcattcgcttccgccgactcagttggcatttgttgcggcacaaatgtgatcaggtccgccaactggcggccacctgctttgtgcggtcgcacgaattccgctgcgatctgccggcggcgctgctggccagcgccaagttggccgcgaatctggaggaggagaacttctacgagggactgatttacacgctgacatcgggcgtgctgaaactaaagcacgaagcacgtcatgtgtggagcgcgggacgtctggagggattccttgaagcgctgctcaccgcgctggatgtcactgagcgagttcgtcgcttcaagccgtacacacggaatgtgctgctggaactgctaggccagctgggtagtgcggataaagcggctctcgtcgagtctctcggctag

SEQ ID NO: 40482 - protein, 1098 aa, DROSOPHILA
MSESPGKRPKIGPSDCLCYLQGLGDVRPEDAALQLAQRIQTEEDEAAQADTCSGANQAALNISFRVYYHIVHKYELQDSHFADLFQRLTSEQPTAFLMLQSILLTDHWKRLDAALLEEKCTTAIIEALQRNNPSLMAVLKATNLLVKKFPKLQLLPLKLEHFYHCLQRQTQTGSREETLTLYNHCCKQPERAFSYFRLIVEFWPWTNRNKYYLLSGALNSHSLPDLLAATNQSEEEFFNGLRLSLSYKGLRAASQYPVKSLSNQRSPALLAASVELLLNGSVAEIQNFHSQWFLRIQQREELFELLQANPQIVEFLATEEERSPSDQLRLILIFSMFAREIYATSKLHFFKISTELLTNCSQMETEAQLLIFRFLVDNLGNFAVEDCLDFFHSFVERHRCLESSEFRNTMLGKMPTIINHTAKHFQKVLKADIGVGGHALAQNIKRFFSHLQHLIERDIHSEVYQPKIFALKLLEILNRSLYAEEHGVFRPKEMAQQLFETLNNPQGFDDALDLTVSLLIQMGHVDSEKCVERCFELCHTSDMDQCSLVSLYAQLAVTKEQAGSKIFDECLKRLTGKLDPFFEDPLQTAKSGGHLFGYLCALDEVVKAGLAVETPLEDLLPLLERILSGILKFLNVANARRQEEAATAASFQDMDESLQLLVSESSFKCDGEEEACRKYLLMSFWLTLKGCCDLATSIGCYQLQTSAKTVNTETLRRCLNINVSVLTLCRHKGAIEAAGLSIGRLTRAITSSLDSCDSGFQMLHDCLERELLTESRQVSTTRRGAGFAIMFLHVLKNDNPRQRLLLHRAVQQILKRLNENQTAETVCLDSNHDRWEALVLHYLCVLVRDTELRPAMSKYYNEILLVAMEHITNPEWTISNAALQLFGANLGKLVGQRQATEFDTRPAWEPSELDYDELGCLLPKACEHMLRCCDRQEVTSSIILFLAFLSKVEHLRTSGGKEPNPLLIRFRRLSWHLLRHKCDQVRQLAATCFVRSHEFRCDLPAALLASAKLAANLEEENFYEGLIYTLTSGVLKLKHEARHVWSAGRLEGFLEALLTALDVTERVRRFKPYTRNVLLELLGQLGSADKAALVESLG

SEQ ID NO: 40483 - DNA, 4755 bp, DROSOPHILA
attttttctccaaatatgtttgcgctcgttttatgtgcgaaatttacggcataccgacagtctgcgctgggagtattcccccggccacgacgacgacacgtgaccacgaccgggcatcgggtggcctggcggtcttagccacccagagaccgacccgcacccaccctttgggacgcctcaagatcaaggcgattcagtgcaaattcttggacctcatacatagatacaaagtgctcgttgcccgacaacgaaaaagcgttggaatcggatcgggaatcggccctcgaaccagagtctagcaacgctatctatgaccaaagcagcggacggcggcgtcgacgtcgtccgacgaaatggtatttaagcgggaaatgattcggtatgacaaatcagaagtgaaataactcagcaacagcgagcaacaggctgctagccgttaaaaataactaacgaccaagaaatagcacaaggtaagcgaaaagggagagtttaattcagtaaaatatgtggggcaaatgcctttgccaagaattatagtaaatttatgcgacgatcacgctctgacatcgtggactaatgcccagttccggttttgatttcagaattccccaaaaaaccgaacccaatcacttgaacaaaatgcctaccgcatcagcacatctgcccattcagaagcgccggccgcatgagcacaatggcgagcccagctgccagggtctagatgaggtgaaccgcatgttccggaattactgggatcccacggcctactgggtgtgcgataagcagggcacacgggctcgtctccagcgctgtccgcagtcgcagctctactccgaggaactcggccgttgcgtccactatgccgattgggcctggacggatcccaaggagccggctggccgagccaagatcagtcaatcggtgtccacaaattagtgatatcttacggctaaacttaatttaatgctagtctaagacaaccaacctcattaggcttacgtctatttttacaaaatacctttatttttaatgaaaataagaaaaaaaatcagtacaaaatcaaaagttgctcgagtttaacaattttggggcattgtttactattaacttagctacatggaatgcacttccggttgtaaaaaggaatggaatgtttatagtgcctaagcaaaacagaattatatgttagtctacaacatataaagcgttgcccgtcgaggatcatatgagcaaggccctcggctagtctgaatttagctacctttcgactaaaattaactggtttcgacagcctgagttggggcatgataaataagaaacctttgaaaattccccaaaagtggttgagatgttggagggaaaaagataataatcctaataggttttgactgcgtgaagaaactaatctcgcgtccgggaatatgcccgattaactcaggaggaagctgatgcgtctgcgatcttaaagctccacattgacgccttgcttgttgatgaccttgagcttctccttcttgggtggctgtgtgtccgaggggatatcctcctcaacgggcgcgggtttctcaggcactgtgcgcttgaccttcggtttagaaggctctggagtaggagtagtaggagtagtagtagtagttggcttaggagtagtggtggttgttgtagtcgtagatggcttagctgtcggcggcttagtagttgttggcttcggcgtggttgtcgtagtggtggtagtggtcgttggcttcttggttgtcgttgtggtagtgggctttggcgtggttgtagtagttgtcgtcttggtagtgggtttcggcgtggtagttgtcgttgtggtagtgggtttcggagtggtggtgctaggagccgccttgggtttaggagtggctttgctgggtggcacaccaatggacgcctccaagccctcgccctcgacgcgaacattgcgcaccttcagcgtgggctgcttggcctttggcgacttgacacgcgccaggtactgattggtgggggagcccaagaacaagaagtcctggaactccaggacgtgtgataccgtggcggccgacttgtcgaagccatgcagcgagcccacaatgttgccgttccagtccacacgcacgacagtcgttcgcttgggcgccagcacagtgatgctctccatgtgtcccacgaagtgaacgaatcgctgcgagaacttgttcggatatacgctgttcaagtagcggaagggcagctcgaacaaagccagcatgcgggccaggaacaggcgcacgctggggaagcgagtgaacagggtgaagccgttgggatgctcgctatccgcgctctggaccaatggcacccagatgccctcggcgtcgggtgtcaggttatcgggcaaaccgggcagtccgtcgacgaacacctcgctctgaccggccttcgctcccttcaggtgatactttgtcagacgcatcgctccggtttcggctaccacgatgaagtcctcgttgggactgagggccaatccattggcgaaagccagttcgtccagcagcacctcgctaacattcttcgagcgattgtatttgaagagactggaacgtagaagaaagcaaaggccgttagagtaaccataagaccagatcgagaaaccggtttgcgttcgtcttacagtcatacttctgtaacttgtcccttaattataagaattaagctaacttcagtaagcgtggactcttaattgagattaattaagtgactccctcgattcctccgctacaaacatttgaaataatcttaaatgggtcacaaaacacgttttataaagaaatacattgtaatggggtcccactgtagccctattccgaatagctatcactttgaattctagcaatattagacagtgtcgctataatttgcgatgaactcaccggccggaggggttagcaaagctggcaaagacgaggtcttcgatggtgaagtccgacgaggagtccgtccagtagacgtcgccctctttgctcacggtcacgccgttgaaaatcttggcagggcggttgatggacttgccggcaagctcctgggcgggcgagaccagcagagtcttcttattggtgcccaggtccacctgccacaggccgtagtaggcgtcggcgatgatgaggttgttgccctgcgtatcaaaggccagtcccagcggacggccgcaccgggactcctcgtagatgtcctctgcaaggggattactattataaaatgaaattccctttataggactcgaaaatacgcaccgcagggctggccgatcttggtgacatgcgtgacatggttggacgttagcttgatgacctcaccgccgtggatgccggtgtagatctcgttgttgcgggctatcaggcactccgggccgtagacccgcccctccagcagtcgctccgctccctccaggtgaaagttcgattccagcgcacccttcaggtctttgggcggggtcacactgtacgaagtggcgatttctccaaggattaacacgggaattacgtcaattgaaacgggcggcacttacatatagtccttgaaggggaaggtggtgcgcggcggcagaccgggcattaggatgatgaggaggaagaaaatcatgaagttcatgatcctcacgcgcagcgcatatagcaggcccatgattgattccttgtgcgtccgccgatcacaaattacagcccaaaaacccgctaaatttaagcaataaccccgaagaaagcgacacgacggcaaagttcaacaagaaaaaaacgtaaaagtcatcatccggaccggtagaggtggccgaaatatcgatatgactatcattcgttgattgaacgtaccacatcttacactctgctacaaaaattaattgtatgcagtttctaaaaactatgttattagggatgcaaattataacaagcatagttggttgaataacatcataattaaagtacctgttagcctggtacctgataactgttttaaaaattccttaaaactatcgcacaatgttgaatgtgaccatcagataccgaaggcttttcgcgctaccttgcgacagtcacaccgctgctagtgtttttgttttgggaattccaaaacgtcgcagttgacgatgagcgataataacaacgcgttggccaccaaggaagacgttttcggcatggagcacgaccaggaccacaccagcaagcactactcgcggtgcagcagtgcgggcagcacgcacactccgaactcctcggcgcacaattcaggtgggcgaacgctggtcaagatcggtcacgctgatcggtcaagagtgcggggcgggggcagctgataaagcagtggcattgaattactcgctatcagcagcattttattacattgtactcatgtttcggttctgtatcgcagacgacgacgacgatagcggcgatgcgcgccattccgcggccgccaattccacgctgagttacaaggagcggagaagggaggcgcacacccaggcggagcagaagcggcgcgatgccattaagaagggctacgacagtctgcaggagctggtgccgcgctgccagcccaacgactcctccggctacaagctcagcaaggctctgatcctgcagaagtccatcgaatacattggctaccttaaccagcagaaactcaagcaggaggacgagggatcggcgctacaaaaggaggtaacagcgttacggatcattaagaacggctatgagaacatgctacagcatcagc

SEQ ID NO: 40484 - DNA, 2291 bp, DROSOPHILA
cgtcgtgtcgctttcttcggggttattgcttaaatttagcgggtttttgggctgtaatttgtgatcggcggacgcacaaggaatcaatcatgggcctgctatatgcgctgcgcgtgaggatcatgaacttcatgattttcttcctcctcatcatcctaatgcccggtctgccgccgcgcaccaccttccccttcaaggactatattgtgaccccgcccaaagacctgaagggtgcgctggaatcgaactttcacctggagggagcggagcgactgctggaggggcgggtctacggcccggagtgcctgatagcccgcaacaacgagatctacaccggcatccacggcggtgaggtcatcaagctaacgtccaaccatgtcacgcatgtcaccaagatcggccagccctgcgaggacatctacgaggagtcccggtgcggccgtccgctgggactggcctttgatacgcagggcaacaacctcatcatcgccgacgcctactacggcctgtggcaggtggacctgggcaccaataagaagactctgctggtctcgcccgcccaggagcttgccggcaagtccatcaaccgccctgccaagattttcaacggcgtgaccgtgagcaaagagggcgacgtctactggacggactcctcgtcggacttcaccatcgaagacctcgtctttgccagctttgctaacccctccggccgtctcttcaaatacaatcgctcgaagaatgttagcgaggtgctgctggacgaactggctttcgccaatggattggccctcagtcccaacgaggacttcatcgtggtagccgaaaccggagcgatgcgtctgacaaagtatcacctgaagggagcgaaggccggtcagagcgaggtgttcgtcgacggactgcccggtttgcccgataacctgacacccgacgccgagggcatctgggtgccattggtccagagcgcggatagcgagcatcccaacggcttcaccctgttcactcgcttccccagcgtgcgcctgttcctggcccgcatgctggctttgttcgagctgcccttccgctacttgaacagcgtatatccgaacaagttctcgcagcgattcgttcacttcgtgggacacatggagagcatcactgtgctggcgcccaagcgaacgactgtcgtgcgtgtggactggaacggcaacattgtgggctcgctgcatggcttcgacaagtcggccgccacggtatcacacgtcctggagttccaggacttcttgttcttgggctcccccaccaatcagtacctggcgcgtgtcaagtcgccaaaggccaagcagcccacgctgaaggtgcgcaatgttcgcgtcgagggcgagggcttggaggcgtccattggtgtgccacccagcaaagccactcctaaacccaaggcggctcctagcaccaccactccgaaacccactaccacaacgacaactaccacgccgaaacccactaccaagacgacaactactacaaccacgccaaagcccactaccacaacgacaaccaagaagccaacgaccactaccaccactacgacaaccacgccgaagccaacaactactaagccgccgacagctaagccatctacgactacaacaaccaccactactcctaagccaactactactactactcctactactcctactccagagccttctaaaccgaaggtcaagcgcacagtgcctgagaaacccgcgcccgttgaggaggatatcccctcggacacacagccacccaagaaggagaagctcaaggtcatcaacaagcaaggcgtcaatgtggagctttaagatcgcagacgcatcagcttcctcctgagttaatcgggcatattcccggacgcgagattagtttcttcacgcagtcaaaacctattaggattattatctttttccctccaacatctcaaccacttttggggaattttcaaaggtttcttatttatcatgccccaactcaggctgtcgaaaccagttaattttagtcgaaaggtagctaaattcagactagccgagggccttgctcatatgatcctcgacgggcaacgctttatatgttgtagactaacatataattctgttttgcttaggcactataaacattccattcctttttacaaccggaagtgcattccatgtagctaagttaatagtaaacaatgccccaaaattgttaaactcgagcaacttttgattttgtactgattttttttcttattttcattaaaaataaaggtattttgtaaaaataga

SEQ ID NO: 40485 - protein, 579 aa, DROSOPHILA
MGLLYALRVRIMNFMIFFLLIILMPGLPPRTTFPFKDYIVTPPKDLKGALESNFHLEGAERLLEGRVYGPECLIARNNEIYTGIHGGEVIKLTSNHVTHVTKIGQPCEDIYEESRCGRPLGLAFDTQGNNLIIADAYYGLWQVDLGTNKKTLLVSPAQELAGKSINRPAKIFNGVTVSKEGDVYWTDSSSDFTIEDLVFASFANPSGRLFKYNRSKNVSEVLLDELAFANGLALSPNEDFIVVAETGAMRLTKYHLKGAKAGQSEVFVDGLPGLPDNLTPDAEGIWVPLVQSADSEHPNGFTLFTRFPSVRLFLARMLALFELPFRYLNSVYPNKFSQRFVHFVGHMESITVLAPKRTTVVRVDWNGNIVGSLHGFDKSAATVSHVLEFQDFLFLGSPTNQYLARVKSPKAKQPTLKVRNVRVEGEGLEASIGVPPSKATPKPKAAPSTTTPKPTTTTTTTTPKPTTKTTTTTTTPKPTTTTTTKKPTTTTTTTTTTPKPTTTKPPTAKPSTTTTTTTTPKPTTTTTPTTPTPEPSKPKVKRTVPEKPAPVEEDIPSDTQPPKKEKLKVINKQGVNVEL

SEQ ID NO: 40486 - DNA, 12181 bp, DROSOPHILA
acaaatcgtgctatttgccaagccagcaaacttggtaatggcttggaggtgcaatatttaatctcttttatacacttttaaatgccctgtcataggtgtaacggaatatttatatattttttgcttttttaggccaagttggaactaaactacatatttgatgtgaaaagtacgttcttgcaatctgtcttattggcttttcactttaaatgggcatagcatagtacaatatattatcagtaaatccaatcagattgatctcttttgtaggggtgctgttttttcgaccgctgctgttgcgctatttaccgcaacctttcgtaattcctgcataggaatagccaagcgatgcggactcgggactcccggattccgagagtcagcgacatcggtggaatcgacggggtccgtaccccgtaccgtgctcgcctattgcggctatgctgttttgtttgattttttggtactcgctcggcgatccgatcggatggtatcatatcgtgggggatcgtatgggatcggatcgctcgcgtgccgtttcgtgtcgtatcgcttcgtttcgcatcgctttcgcaaacggcggtccggggctccgcgcacttgactcgctccgctttgcgcattttgctcatttcgattttgccaagcgacgtgtacggaactgaactgaaccgaactgaattgatacgcggttcggcggattcgctttgtactttcgtttcttgtgctgttctgtgtgctgtgcgcccccacatcaatatcgagtcaaaatcaagtcaaaatacgagaattcgtgtgttttttctctgttctttttttttaactattttgttttttttttattatttgcgtactaagaaattagcgttgtagcaaaagtaatctgtgatttttttttccgttctgttttgtttacctttggcttgtaacgattcaaaacaaatagcaaatcgcgtgattaagtgataaagtggccagaagtcggtggtcgggcgctctgcacactgcttgcattcagcgcgcgcctgcactgcttgcattccagggcaatggctcagtcgacggcaacggcgccgctctacgccgggctacaaacccctgatcagctcggtaaccacgggatacggatccggatccggatatggccccctccctgtgtacgtatactatttagtgtagattcccgccagagtctcttcatttcacccacgttgcactccatttgtgctgactgggttgtttggggtgtctgggttgtctgggttgtcggggctgtgggcaccaccaccttgattagcagttattctttggctcattaacacagcgacgatagcacagagtggggagtgtggggagtagagtgcctattcttgggcatccactctttctctctctctctatctctctctatgggttttctattgtggggattacacgcagcattgccatttacgtcgtttgtttatgcggcgcttggctcccttctcattttggcgtcattatcgccatccccactcgtcatcatcgtcatcggcggtcgtatcggcatcctatgaagaatgagaatctgaagcagtgaaacgctttgtttgtttttattttcaagtgtattctggcattttgctatttttgctaatttttgtgaatttcctatctgccgcctttgttattgttgttacgactgctagttttcaagttttctggcttttgctatatgcaacaccacgtagtcgtcgccgtcgtcggtcgccttcattttctatcattccatttttctcgcttttctttggggaaccggaaaaataagccagaacacagcagcacatacgacagaggcaccgaggaatcgctgtgatttggtcattttttcacttgctatccgtatcacctgaccgctttgcacaagccaccccattcccacccgctttgcaccccttttccgcccctccggcggccttgagggtccgttatttataattcctgtttgtttgtttgtttgtttgtgtctggtggggcccagcgaatatcaccttgctgatcggaagctgtctacggcttcaatttcagttcagtgccctgccgaacttcggatatcgacggactactactaccagtcacatgacacatgtgttccacggataggagcctaggcttcggtgcttagagcccaatcccttttgagcccagtgcagcacatggcattgaaaccgaaagttggggcttatctatgtgcctacagcggtgaaaagtgaatcccacacacacacacacagggtgtctccatattaaatagttgaactacagaaaacttttagctgcattcggtattcagaagtgtgctgcatgctgcacttaatctatagaaattgcactgcattgaaaaatccaaaacaatattgtcatgtaatttgtcatgtatttgtaaaattgattcatataagctgaagtctagaatgtcaaaagcgaagagcactattcttttttgtttgctttctaaaattaaaaattgtttaatgaggggcgtaaagttgtaatatcgaaactagacaataactatgacacataccattgctcgaactggccaaatgctccaccctactacaatgggaaatgaaagcaaggtggtcacgagtcccattggagctattcgcgaaacgcaattagaacccgggtcaggtggtctgatcggtattatggggttgcgcccacttataacccttttgcgatcaagtcaaacgtctttgggtagtttctaattgatttttagatggaatcgcagttgttaaatgatgaaaacaaacatatgtgcaaacattgccggttgagcaaagttaaactattatagtgcgaaaatcaattcaagtgaactatgtctgccatagaatgatcgttttttttcgttttttttttgtgaatacagatgtctatatgattcgcaaatacgtgaaatcatttacctaatcagcatactctgcaaactaagggatgctaagttgaaatttaaaagaagcttacaaataatcagaaccaaaaacgatgaagaatcttaaagagtgcatgaacattgtatagatttttttttgcactcatatcaagggctcactgtttctgtaaagcgtagatatagcaagttacagaaaactcccgatctttcaactgatgatacgaaatggacggagggcagagggctttgatgtcgcacatatgtacatatgtatataatggtaaaatggttccgcaaaaggggctgtaatgactcaatgcggctgagtcagaggcagaggctagatatcgagtggcaacagtgtttgtttcttttcgccagtgaggtggaaagttttgcatttgccgcttggcagacccaatttagcatccacccacgcagcatcgccatcggcagcagcaccactcactcgcaactcacgtgaacaccgtgccgtgcatcgtaaattgccacctggaggagcgataaaaggcgcctgttcggggaggcgatggatgatggaggcgtttatgaactctgccgctatccaaatgtggcagtgatctatggctctggccatagctctggcccgctgataaccgacgaggcgaccataatcggtattaaacaccgccatcatacgccgatggacttctctgctcccttcccttcgctcatcagttcatttagttgagtcgccgttccgttctgcaatgtgccattatcagtcttatcaggccctgtccggccggactttcatgccgctgaaaatgttgttattgctgttgagcgttattttcggtggttccgatagggaccaccgacagttgggcgagattatcagccagtcggtgggagattgtaccacttgtgtccgcatggtcgcattcgccatttctgcattgctccatttctccgattgcgtcgctgatcttgcggatgagtcagtcaacctatgacgatccaatttttagattccacgaggcagacacaatgcggatattgtattttgcaactgtgtactattgtcgtttgtcacataaaatggatttttattcataacagaacgcaatgtttgcgttgaacattcgcgcatttggcaatgtacatataaatatatatatacatatatatgtagatctaatctagataaaagcaaaatagctccgataacagcttgatatactcagacttatatctatttgatagtcgaaaaacatgaacaaattacgaattttacatcctctgttcctcaacaaggaactactatgtacatatacatacatatatgttcgttatgacacttactgattgcaaacattcttcttcgtcattttatcggacgaattacttccattttgatagcgatttgtttgtggcttgctctttaaatagtgagtagcagatagagatgattgtagccaatttccatttagattatacatacgtgcttagcatttcaagtgcaagtgtgtatgagagagattaggcgcctgttaacttagtttaatagcactttgtcgtggcattatttgaaacttatctgtggagtcggatgtgggttaggcggtgccaggtggtcgccagaccatcttcattatcgccatcttcaatcaatcctaagcagtaccaacggacaaccaacaacgattaaatgtgattgcctaccagatgtgaattaggaatatgaaattacagtatcttaagagtttttgatctcttcaaagattactttccaccaaaagatttgggagaagccaatgagatgagctcatagaagctgggttcggtaaaatcgaatttttgaaatttaaaagctttaattgtttgcccaccaattagtttttttttttccccacgtccagtttttgagatatggtttttcgaaaataaaaaatttcacttttttcaatttttttttttaaatcgcaataacattgtttgccaaactttgcccaccctgtagatttttgaaaaatatgtatactttagcaaatatacctacatatcaaaatatctactcagagataaaaaatcctttgataccaaaaagtatcaataaaaaacgtttgcccaaccaatattattagtttttatcgtttgcccacccttaaaaaaaaacctttaacaagcattttttcgattgcctacacttaaaatataaccaatttcgttagcccacctctttaaaataaaaattttcgataaatattccagctttaaaatttcaaaaattcaatttttccgaacccagcttctttaagctaatgagatgcactaatcactagcaaacaaaactcatttgggtgtgtaaaattcatattaatattttgcatattacaaattctataatgaatattcaattgcacgtttaatgtgcgataagacattttggcatatttctgtcaaataatcaaactttgtgtaaaatggtatataagaaggtgttctttaaagcgattttagacaaattttcagttatgtataaaattaatcgcgttgcgttctagaccaacaaacaatgatattcgagaaaagcgccaagaatttttgtttaagcgcttaaaacttaatttatcaaaaatgaaatgacgcagtattctccacaattacactgcgaactaataggtgtggctcttggctagaaatgaaatttgcatattggcttaattccgaccaaaactagactggaactgaaaacgggaacaggttttgagctggcaattcgcctcgttgataagggagtgcagtgcagacgagctgcacctgacgatccacgtcccgaatgcgtgatcgtctaacccaatcggatctgtttatcgccaatctcgaccttgagctggccaggccatgtggtccagtttgggaagcggctctctgatggcttcagagcagatcgaatcgattgccttcccgtaagccaatgacgcacatctgagccgagcaatcgatctgcccagtcggatggtcgatatggttggtcagaccagccagctagattgcgtcgggcggccctgtggacggaacacgtgaggttcgagttaagggtaagacgacttgtggggtgaactttgcattccgcccggcaatgtcaattccaccaggaagcgcaacaacacaccgtgcgcaaacaattcaacaattcagtggtcaatacgaatgtgcgcaattgtcatggccaattctgagatgcagtagaacattgataacatgcacaatggtgctaaaaaagtgatagatttagtggacatttgtggtgcaacccactagtgttcggaactttctagttcttagctcggttacttgggtgggtaaacgttacatatttctgttgtattatgttaattaatttgggtttttcttttccatgctgaatttttaagcaccaatgatatttaccccaatagtaaacaaagaatccaattaatatttgaagttagaaaccatgttttcaaaaacgggttcctttcgagaaatctgactgtagctgcgcagttaagcaatgattcttcattttgaattggaaacccagccgtcgtcgtcgtcgtcgttacagttacatttcgtgcctatagctctattagctacatgctatatgctatatgctatatgccatatgccatatgccattagctatttgccattagcgccggcgtcgacgacgcttttctctgcccgccgacgatcggggttctcggaaatcggcactagtttttcagtgtttgagcgttcagcgcagtgtctgcttcaccttttgcgattcgttgtgttctctccggctcctcgacggatccacaagcctccgcccgccgtcttcgccagtcgatccaggtaaacaattcgacgcagaaattcacacattccacaaattattggtcaccataaacgctattatcaactcgtccagttcccacaaagccatgaggcttgagtcccccgccagtaatactagactatgatatccattgccagtgagatttgagtggaactcgtttttgtttgtggcccatttggtactaataaacataaacatcgaaccagcaacaactctcggccaatggccacataaattcagtttgctgtgacaacaaatgccaaagtcaaaaaatacgcatacgcagtgcagaatcagttgccttttagaaaatattaaacatctataagataaagatacatcccccaattaatagtatgatattaaaagttcgattataatcctattgtatcataattgatacttaattgattttttttagtgaattacagcgaccatgaaatttgttttgattgacttttaataagagtttccaaaagtatacatatgtaattattttgtaaatcaaataatatttacaaacttacaacttaccacgcagagcttggcaagtaaagttattatttatgatttggaacattgataatgtctatcttcagatcttaggcgacatggaaaaagtgcttagaagttagcattgttttgctatttttttattttgattatagtccatatatatgtatgtatatatctgtaaacatttaacgatcacactgcgggaacgtggtaaatgtgtttgagaacagaacagcgagagtgagaatttttgggagatattggatccgtgtgaggctttccatcccgaaagattgctcggtttgtggggtttgtggttagattactgggtttctgattgggccgcgattaagacggtcacggtgcctgtaatttctgccccgtctttatcattttcacggcccctgtggtaaatttccatcgaagttcccctggttttcaagccgatttcgacgaacccccggtcgttatgtttgcattgtattgttgatagtctggggcaataattaacagcggttccatataaaaatactcgatacggcgacaagtggacccataaatagtccacttgttaatgagcgcatttgaattccatttgtagtttgtgtgtgcgtgtttttggtttttgtttttttttttgcatttaatccagatcgtatcaaagatactaaatatttgaaagtaactgggaatttggcaataattccaggtagtcccgctataatcggctgagctggcaaccctgatgccatcgaactgcaccgagcaccaaactatcgataacgaacagtgtgagaagtagtcgattcaattcgattggactcgatacgattcgtcagctgttttcactggtttctttccgtttcgttttgtttttagtgtgtgcttccttcgttcgtttattatttgtgctaattccgcgtgctcacgctctctctctctcccgcccgatttctcacactgaaaaagagcgtcgcccacgcagcacgcacgttttgtgttcctcctctcctcctttcgtgtatgtttctgtttctgtttcgctttagtttcactttcattcgtcttcgatcgtcaagagcaaagaagtcaaatattagcacaaacacatttgtgcacatgcatacatacatatttgtatctacccacattgagtttttgtgcggattgtagctacctcgtaggtacccactttatttgcgacacattcttgattttttcaatctctaatccagatcctctcgaaattcggcaattcaaagtacccaaatattgttggattgcatctgaaagcagctcctcgcatctccacaaatcacaacattatcattccattcgacaatttaacaacccagtaaaacaaacatttatgttcgaatactccactaatttcatgtcttgccacgctacgaaaacaacaaacagcagcagaaggaacagctgatcagccccaaaaatcacagagagaaggcgaagtgaaaggagcatcatcagaagcccaacgaacaaaagcaaacccaaaccagatactttcagccagcaacagcagctcaatcgacgagcaagacgaggatcaagtaggaacattgccattgcccctgctgtccatcaatagaaggacacccaccctgctcccccgccccgttccaccatcatcgacccgattcacatcgtcctacaacgacgacctgtgcacgtgcagcaactgcgcgtactccagtttctcatcctcctcctcctccgcctcgtccacatcctcgtcatccacgagcgctacagcagcaggaacagcattagcatcagcagccgcatccgccgttgccaagaagctagcacgctccgtgaccgccaccagcatcatggacatgccgtacaacacctcgccgtcgctacgcgtgcgcaccacctcgctgaatcagctgaagaagaccgccgacctggccatcgagaatgagctgcacgtctgtccgtcggtgatgtccgaggagctgcgcaagctgctgccgcccacctcggagaccgtgatgaccaaacccttccccatccggggcgaacggaccattgccgactgtaccacgccgcatgtgatcgccatggttggcctgccggcgcgcggcaagacctttatctccaagaagctagcgcgctacctcaactggatcggaatctccacgcgtgttttcaatctgggcgagtacaggcgtcatgcaaccacagcatacaagtcgcacgagttcttccgcgccgacaacgaggaggcgatggccatccgcaaccggtgcgccaatcaggcgctgcacgactcgtgcgattggctgctgagcggccagggaagcatcgccgtgttcgatgctaccaactctacgcgcgaccgtcgccagctgatccacgacattgtcgtgaagcagcatggtttccgcctgttcttcgtcgagtccatttgcgacgatccgcagattatcgagcagaatattctggaggtaaaggtcagctcaccagattaccttaacatgaacacggagctggtggtgcgggacttcctgcagcgcatcgagcactacgaagagcgctaccagcccatcgacgaggttaccgagtcgcacctcagcttcatgaaggtgtacaacgccggcaagaaggtggtcgtctacaataacgagggtcacgtggagtcgcgcattgtctactacctgatgaacatccacattacgccgcgcaccatctacctgacgcgtcacggcgagagcgagtacaacctgagcgggctcatcggcggcgactcgaacctgagcgcccgtggccaccagtatgccaatgcgctatccactttcatcgcccagcagcagatcgacggtctgcgcgtgtggacgtcatggatgaagcgtgccattcagacggtggccgatgtgaaggcgccgcaggagcgctggaaggcgttaaacgagatcgatgccggtcattgcgaggaaatgacgtacgagcaaatcaaggagaagttccccgaggaattcaaggctcgcgacgttaacaagttcgcctatcgctatccgcgcggcgagagctacgaggatcttgtggctcgactggagccggtcatcatggagctggagcgacagggcaatgtgctggttgtttcgcaccaggcggtgctgcgctgcctctttgcctacttcctggacaagtccgccgacgagctgccctacctgtatgtgccgctgcacacggtcatcaagctgacgccggtggcctacggctgcaaggtggagcacatcaagttgcccatcgatgcggtggacacgcatcgtcccaagcctaagattcccggcgacgtcagtgagccaggactggatggcctcagcggcgagctggtggcacccgatggcgtcggcaaggtgctcattgtgggtgacgatgtggcgacggccacgaacggcaatggcgggcgcgtcgatgtccaggcgcaccaatgacggcgtcgcctgcaccccgtgcatccacatccacctccgaaatccaagacaatctaagcacggctgctggaacggctacggctgccccaacctccaagacacttgcccgccaaccccgcccccccaaatcccagaacagatcccgcactaattcttcccccagcgcatcccggacagcccaactgaaacggacaaagacacggacgtggtcatgcgagggcaacactgacaactgctcctgcacctgctccaaggatgtggtggcatctctacttaacgtggcgtcgaaggactgcgtatgaaattgtgattgatccattgtgctgttttattatgtactttaatgaacgattaaatatttttaaaattttctagaacatctatatactttgataaaagcaaaatacagacttaaacacctatctagatttacacaatacacaccttctcctgtaaatggagaagtcctggcttgattgattcaatgtgattagttacccctggcttcacatgcaggcggttggcataccgcatgctgagtgctccagccactaaaaacttgattgattctaacgctgtatacttaaatgtgctctaatctaattcgttgtctattttttataaccgttttgagcgaattttatagctaagcgagaggataaactcacggattccatttgccaactctgtttaactgaaaccacttgcccgacacactttttagcctatgtatatgttgcttgtaaatgtatgtgtggaataaatattgtaactacaatacataaatactatttcaaataatcaacaataaatacaatttatcaaaagaacccatgctcaaatgcatcaaatgtttcattcccgttagaagaaaaaaaaaaaattcaaattgatagaggaaaagtaatacgagggtaaatgtaaactttacatacgatattctttaaattattatttgaaattatttaataatacgttttaaatactaatagctaacataatttacaatcggttgacaataacaaagttaatttatttaaatacatacatatatgcatatgtatgtaagttaggatatctttcccaattaagtaccaaagttttctgttaagcacgtgtcattaaaaataccaaactgaaccaaagattccgatagataaaaatcggttccagacgcgatctagttagctcgcaaaatttgactttttcgctagttaaaattttcgcatgtcaggggacggaagtttctagcaaatttcttaattttcaattcattcaattgggtttcagctgccgggaagtgttttgtggtgtttcttcatcctcgtctgctaggattaattatatcactgagtgactacgcaccggcaattccag

SEQ ID NO: 40487 - DNA, 2580 bp, DROSOPHILA
cacactgcttgcattcagcgcgcgcctgcactgcttgcattccagggcaatggctcagtcgacggcaacggcgccgctctacgccgggctacaaacccctgatcagctcggtaaccacgggatacggatccggatccggatatggccccctccctgtgcagcagaaggaacagctgatcagccccaaaaatcacagagagaaggcgaagtgaaaggagcatcatcagaagcccaacgaacaaaagcaaacccaaaccagatactttcagccagcaacagcagctcaatcgacgagcaagacgaggatcaagtaggaacattgccattgcccctgctgtccatcaatagaaggacacccaccctgctcccccgccccgttccaccatcatcgacccgattcacatcgtcctacaacgacgacctgtgcacgtgcagcaactgcgcgtactccagtttctcatcctcctcctcctccgcctcgtccacatcctcgtcatccacgagcgctacagcagcaggaacagcattagcatcagcagccgcatccgccgttgccaagaagctagcacgctccgtgaccgccaccagcatcatggacatgccgtacaacacctcgccgtcgctacgcgtgcgcaccacctcgctgaatcagctgaagaagaccgccgacctggccatcgagaatgagctgcacgtctgtccgtcggtgatgtccgaggagctgcgcaagctgctgccgcccacctcggagaccgtgatgaccaaacccttccccatccggggcgaacggaccattgccgactgtaccacgccgcatgtgatcgccatggttggcctgccggcgcgcggcaagacctttatctccaagaagctagcgcgctacctcaactggatcggaatctccacgcgtgttttcaatctgggcgagtacaggcgtcatgcaaccacagcatacaagtcgcacgagttcttccgcgccgacaacgaggaggcgatggccatccgcaaccggtgcgccaatcaggcgctgcacgactcgtgcgattggctgctgagcggccagggaagcatcgccgtgttcgatgctaccaactctacgcgcgaccgtcgccagctgatccacgacattgtcgtgaagcagcatggtttccgcctgttcttcgtcgagtccatttgcgacgatccgcagattatcgagcagaatattctggaggtaaaggtcagctcaccagattaccttaacatgaacacggagctggtggtgcgggacttcctgcagcgcatcgagcactacgaagagcgctaccagcccatcgacgaggttaccgagtcgcacctcagcttcatgaaggtgtacaacgccggcaagaaggtggtcgtctacaataacgagggtcacgtggagtcgcgcattgtctactacctgatgaacatccacattacgccgcgcaccatctacctgacgcgtcacggcgagagcgagtacaacctgagcgggctcatcggcggcgactcgaacctgagcgcccgtggccaccagtatgccaatgcgctatccactttcatcgcccagcagcagatcgacggtctgcgcgtgtggacgtcatggatgaagcgtgccattcagacggtggccgatgtgaaggcgccgcaggagcgctggaaggcgttaaacgagatcgatgccggtcattgcgaggaaatgacgtacgagcaaatcaaggagaagttccccgaggaattcaaggctcgcgacgttaacaagttcgcctatcgctatccgcgcggcgagagctacgaggatcttgtggctcgactggagccggtcatcatggagctggagcgacagggcaatgtgctggttgtttcgcaccaggcggtgctgcgctgcctctttgcctacttcctggacaagtccgccgacgagctgccctacctgtatgtgccgctgcacacggtcatcaagctgacgccggtggcctacggctgcaaggtggagcacatcaagttgcccatcgatgcggtggacacgcatcgtcccaagcctaagattcccggcgacgtcagtgagccaggactggatggcctcagcggcgagctggtggcacccgatggcgtcggcaaggtgctcattgtgggtgacgatgtggcgacggccacgaacggcaatggcgggcgcgtcgatgtccaggcgcaccaatgacggcgtcgcctgcaccccgtgcatccacatccacctccgaaatccaagacaatctaagcacggctgctggaacggctacggctgccccaacctccaagacacttgcccgccaaccccgcccccccaaatcccagaacagatcccgcactaattcttcccccagcgcatcccggacagcccaactgaaacggacaaagacacggacgtggtcatgcgagggcaacactgacaactgctcctgcacctgctccaaggatgtggtggcatctctacttaacgtggcgtcgaaggactgcgtatgaaattgtgattgatccattgtgctgttttattatgtactttaatgaacgattaaatatttttaaaattttctagaa

SEQ ID NO: 40488 - protein, 717 aa, DROSOPHILA
MAQSTATAPLYAGLQTPDQLGNHGIRIRIRIWPPPCAAEGTADQPQKSQREGEVKGASSEAQRTKANPNQILSASNSSSIDEQDEDQVGTLPLPLLSINRRTPTLLPRPVPPSSTRFTSSYNDDLCTCSNCAYSSFSSSSSSASSTSSSSTSATAAGTALASAAASAVAKKLARSVTATSIMDMPYNTSPSLRVRTTSLNQLKKTADLAIENELHVCPSVMSEELRKLLPPTSETVMTKPFPIRGERTIADCTTPHVIAMVGLPARGKTFISKKLARYLNWIGISTRVFNLGEYRRHATTAYKSHEFFRADNEEAMAIRNRCANQALHDSCDWLLSGQGSIAVFDATNSTRDRRQLIHDIVVKQHGFRLFFVESICDDPQIIEQNILEVKVSSPDYLNMNTELVVRDFLQRIEHYEERYQPIDEVTESHLSFMKVYNAGKKVVVYNNEGHVESRIVYYLMNIHITPRTIYLTRHGESEYNLSGLIGGDSNLSARGHQYANALSTFIAQQQIDGLRVWTSWMKRAIQTVADVKAPQERWKALNEIDAGHCEEMTYEQIKEKFPEEFKARDVNKFAYRYPRGESYEDLVARLEPVIMELERQGNVLVVSHQAVLRCLFAYFLDKSADELPYLYVPLHTVIKLTPVAYGCKVEHIKLPIDAVDTHRPKPKIPGDVSEPGLDGLSGELVAPDGVGKVLIVGDDVATATNGNGGRVDVQAHQ

SEQ ID NO: 40489 - DNA, 3113 bp, DROSOPHILA
gaagtattatttaacttattttaatttaacttatttcggttttataagccatatatgtataatctaatttaaattgaaaataatgttcgcaagtgtcattataatggcaatataagtgcttgaatgataaaataatattattttataatattagaaacatctgttattgatatttttagatattaaaatgtcttaaaaacccatattttattacattttttacatttaaacgttcttgcttgatatatccttaattcaatattaacttaattaaataaatcagggttatcttgaaaatatacgaaaaataagacaatttttaaagactttcatttgctgctgctatctgaacataacagtttattttattgttcccgtatctgaagtttgtttaaaatatttgaaccgagaccattgtcttcttatctaaacgctcatatgttgagctgatggtagttttcctcaccgctttccacacattttccgaaatctcagccagatctttgggtaacagtaaacaaaaacccaacacatggtttggtgccgtgggaatgtcccacatctttgaaggatctgcagacaggacctttcgcatctttacccaaaactggcccacatgttgagaatgccatgcatcgcaaatgataagaaattcaaatatgttttcaatgtatatttttagtttttgtttacaaatgtattttgaaaatccaaacaattgaaatccatttttgcactgcaaaaaggagcaattgctggaatatctcccgccacaatattctgtggatgcccaatcgctttttgggattttccagtgtgttagaaattccgcaaagcgctgcccaagatcgatgatcccaaagtcgaagtgcccaaactctggagtacccatcccgctggagaaccgagctccagtccagttgaagttatcccaatcgaaagttgaaaaaacccatttttcgttcaaggttgaagttgcagctccaggcgattacttcgttcaagcttgagcccaacggtccaggaagttccattcgatggcatagggttcgcaggctttgggttgcaccgatgtccagaagaaggtgccggcattggtgcgggcaaaatgcactggtacatagtaatcctcctggtcgatggtgtgcagctccccggatccgttctcattgtaaacgatgacggcatcttccttggcgcactggcggatttcctcgatgaggcgatgctccagatgctcgttggccatgttgtccatatcgttgctgagccactcgaactcggcctccttctcctcggaggcgatgtaggagctcctcttgggctgctccttcttcatgttgaagaattgaccgagcagcggcttcagcagattcttcaggcgacgcgaaggcgagactttcgatttgtacatggtgttgagggtcttctgcttgctgatggccgacattagatgaatttcgttcagatattttctggtggtgagtgcgtagaatgcgtgctgggatgttctcgcttcgacgttcggatgctgtgtgatgctgtcactaagattagaggcgctatttatactttcttgggagacaggagcgatgctacagcatctcagccaatcacgtcgctcggaaggcaggcaggtgcaaggatccgaaatttcacacgttagtcagtggcagcaggtaggtcctgcaggacctgagattcgagatcttgtgcgaagcgtgggaatctcgggcccattcctcctttcaagacaattatccccgggttccaaacgaatccttggcgtgggaacagcacattgccggccttctctcggagacccagttattgttttggatttcgactgggtttgttttgccagttcatcagaaatatgtcgatcctgtaaccgaaaaccagctacaatctaagccaaatttacacaaatcgtgcactttcattcttatgtttttcggttcggttgattagggatggcatcgcagaaagtcctttgaggcacgatcttgagaattctcacgttcagttggggagctcctcgtattttggttacttgggcagcgggcttcccaaatattttcgtgtcacgacagagggtttcatttttgaacatctctagtcctcacttttttggttcagacccctcaattaattgtagaatgggggttcattttttgtgaatgtatcgtattataactcatttattgtgggatgtggtgattgctcgccttacatttatatttacagcctgtgagaatttgtaacccgtgtttaaatggttgaaaagatcctaaagaaatataaaactgcagatgaggtctgtttagatgtttgggccctattgatatcaaattgtgtttgtagcaatcactaatataaatttacttgaggtttcattttttctattacttagggccacaaaagagctgaaatcctcagagacaaatattttgttttgaagaagtatgatgtctatggtttgttaagtaagtggtcttagaatctttaaataaataataataatgaatattaattaattagtcatatatatttgcatatatgatacatatcataaaatattgttgtttttaataaagcgacgacaacacattttttgcgactatcttataaacgaatttattgtaatgtttagtaatggtttaaatattgttatttgatttaccccaactcaaacaaaatcctacacataacagagtttgaatcacaaaaataaaaaataagagtttaataaaattaaattcaacgcccaaatctataaattattttaatatttatgtaattatcttgatttcaaacacaaatatttatttagatttattaatatcaattaaacttttgtttctttaataaaattatcatcatcatatcatcatatcattatctttgtattatatcattgcccatttaaaactccaacgggtcctgtaacctgtaacattatcccgaactgtacttggttgtatgctttcaataaggaatctgcatcgactttatgtaaaactatttacataacgcacacacgatcttatgtacgagaatgccccctttgaaatgccataaagatcgaaccgaaccgtgcggccttttcgcat

SEQ ID NO: 40490 - DNA, 858 bp, DROSOPHILA
atgttcaaaaatgaaaccctctgtcgtgacacgaaaatatttgggaagcccgctgcccaagtaaccaaaatacgaggagctccccaactgaacgatcgacatatttctgatgaactggcaaaacaaacccagtcgaaatccaaaacaataactgggtctccgagagaaggccggcaatgtgctgttcccacgccaaggattcgtttggaacccggggataattgtcttgaaaggaggaatgggcccgagattcccacgcttcgcacaagatctcgaatctcagaaagtataaatagcgcctctaatcttagtgacagcatcacacagcatccgaacgtcgaagcgagaacatcccagcacgcattctacgcactcaccaccagaaaatatctgaacgaaattcatctaatgtcggccatcagcaagcagaagaccctcaacaccatgtacaaatcgaaagtctcgccttcgcgtcgcctgaagaatctgctgaagccgctgctcggtcaattcttcaacatgaagaaggagcagcccaagaggagctcctacatcgcctccgaggagaaggaggccgagttcgagtggctcagcaacgatatggacaacatggccaacgagcatctggagcatcgcctcatcgaggaaatccgccagtgcgccaaggaagatgccgtcatcgtttacaatgagaacggatccggggagctgcacaccatcgaccaggaggattactatgtaccagtgcattttgcccgcaccaatgccggcaccttcttctggacatcggtgcaacccaaagcctgcgaaccctatgccatcgaatggaacttcctggaccgttgggctcaagcttga

SEQ ID NO: 40491 - protein, 285 aa, DROSOPHILA
MFKNETLCRDTKIFGKPAAQVTKIRGAPQLNDRHISDELAKQTQSKSKTITGSPREGRQCAVPTPRIRLEPGDNCLERRNGPEIPTLRTRSRISESINSASNLSDSITQHPNVEARTSQHAFYALTTRKYLNEIHLMSAISKQKTLNTMYKSKVSPSRRLKNLLKPLLGQFFNMKKEQPKRSSYIASEEKEAEFEWLSNDMDNMANEHLEHRLIEEIRQCAKEDAVIVYNENGSGELHTIDQEDYYVPVHFARTNAGTFFWTSVQPKACEPYAIEWNFLDRWAQA

SEQ ID NO: 40492 - DNA, 3607 bp, DROSOPHILA
gtccattgttctgcacggcatgcaattaaaacattgacagaggggctgcctttgttttattttctgtagtttctggtggcggatgccgatggttgcggatttgcatgcagcaggcagctggccttttgtggaaaatgttgggaatgagttggcttagtagtcggcagaacggggccgcagacaaattcattatgtaaagctaaccattactgtcgattcggtctgtttacataagtagcctgcaaattggtcaaatatgccgatgccatgaaacaattatgagacttttcacgcttttgcgcgccttgagcacacgaatctgcatctgaattgcattcattgtgctcagatttaagctcggggttgggtttggtgttcggtgttcggtgtttaaagtatggggtttaggccgaataccatatagtacacataatacccagatagccgggtctgagcaatgaacatgttcgtactaaaatgtcgcaataaataataatgaatgcgcaccaaaacggtgatgaaacctgttgtgaccatatgtgagccaaaggagccggagtccagatcgatcggctgccgcaaaaaaatgcaaaacgttccagttgtagttcacttgccgtctgcagccggcgaacatgaaatgtgtccaatgtgtccaacgtgtccgagtcggtagtgttagcttcacgtatcagtcgctgggatacatacatacaatgtatgctcttttggccacttgcaggtgcctctgcaaaaaattcggtttttatgtgggttaccataccagcaccactaatgctgctgaatgtgttaggagtgctaacaactttttcccatgttgttcaggatgccatatccatagattgtagatggcagtaaatggcggagaccttggtctacagtattcatgattaatgtgtcttattttgaacaggaaaaacaaattccttaagtcaactttaagtattcatttatatacacttttcaattacaattttagatgataagggcacgagatcttctgctcttggccctcttgggattcatctctagtgcacttggcctaaaagtttcctctggctatcacatagtccacaatcaaccgcaatcttcttttcccaactatcatggctttagttacctacaaggatcagctccatatgtgattgggtacgttttttggaatatttcttcttttatgctcttatgtaagccattaacttttaggaacagcctgccgacatctccggctccccaaaatccgttttcatcgcctgccagtccgccggtatcagcttatggttacagctttcccactgctggcagggtgtcatgtgctgctcctccggcagtttgcgaaaaaacggcctatcgcactttggatggatcctgcaatcatttggagcaaccgggcttaggagtggctaattccaagtaatttatcttaaatattattaagctatgcaagtgtttatatgattatgttcctatgttaggtatggtcgcttgctgactcctaaatatgccgacggtatttcggcacccaccagatccgtgacaggtgatgagctgcccagtgctcgtcttgtttccctggtggctttcggagaacaggatgtacccgatccggagttcacgctgcacaacatgcagtggggccagatcatgacccacgatatgagcatgcaggccggtggcactcagtccagtaagtagtacatctctagctagatatatccctggataaagtcgcttgattatccaacagaaaagcatcccacacgttgttgcaccgacgatggtcgcctgattggcctggacaccgcccacaagacctgtttcgccattattgtgccacctcacgatccggcttactcccaagtgggcactgagtgcctcaactttgtgcgcactctgacggatcgggactcgaactgtcagtaccagggtggaccggcagagcagttgacggtggtcacttcgtacttggatctctcgctggtatatggcaactccattcaacagaacagcgatatccgtgagttccaaggaggccggatgattgtggaggagcgtaacggagccaagtggctgccactctctcgaaatgtgaccggcgattgtgatgccgttgatgccagtgaggtgtgctaccgttccggagacgtgagggtcaatcagaatccgggactggccattctccagacgatcctgctgcgcgaacacaatcgcattgcggacgccctgtcggcactgaatccacactacgatgatcgcacgttgttccaggaggcgcgaaagatcaacattgcccagtatcagcagatcagttactacgaatggctgcccatcttcttgggtggcgagaacatgctgaagaaccggctgatctacaaggctccatccggaagctatatcaacgatttcgatcccaacattgatccatcggtgctgaatgagcacgcgacggccgctttcagatacttccattcccagattgaaggtcgtttggagtaagtgcctatttactattatgagttaagaacattttattaattttaaaatttttgtgcagtctactgtccgagctgcgtcaagttctcggctctctgaccctcagcgactggttcaatcgtcccggtattattgaggttggagataactttgattccctgaccagaggacacgccacgcagcccgaagagctaactgatatcaattttgaccgacaggtgggtacacaaataacaaaatgagaccacctttctaacctctcaacctttcctggcttagatcaagcacttcctgttcagaagaaacatgcccttcggttccgatctgcgttccctggacattcagcgtaatcgcgatcacggtctggcttcctacaatgacatgcgggaattctgcggactgagacgtgcccactcgtgggagggatacggtgatctaataagtccaccaattctggaaaaacttaagtcgctatacccgagccacgaagacgtggatctgactgtgggcgcctccttggaggcgcatgtggccggagctttggctggacccaccttcctgtgtatcctcacggaacaattctacagaaccagagtgggcgatcgcttcttcttcgaaaacggagacaagctcactggatttactcctggtaaaaagaacatttctcctctgactattttaaatattaatttatttatgtctaatttcgtagatcaactggaggagctgaggaaggccagtatggctcgtttgctgtgcgacaatggcaaccacatttcatccatgcagcccgaagctttccggactgtttcccattcgtaagtttaaattgattaaattggttatttggaaagtaactgagctctgaaattacaggaatccgattataccgtgctcaaatattccacaagtcgacctcaccaaatggattgatcaaaagctatatgccactgtagatccgtctcactacggaaagaagtaatccgctgctgtgggatctatgcttaactagttgaatcccccatacatttagcttaatcaataacataaacgtaaatgcaaagcccctccccccccccccccccttgtatga

SEQ ID NO: 40493 - DNA, 2071 bp, DROSOPHILA
atgataagggcacgagatcttctgctcttggccctcttgggattcatctctagtgcacttggcctaaaagtttcctctggctatcacatagtccacaatcaaccgcaatcttcttttcccaactatcatggctttagttacctacaaggatcagctccatatgtgattgggaacagcctgccgacatctccggctccccaaaatccgttttcatcgcctgccagtccgccggtatcagcttatggttacagctttcccactgctggcagggtgtcatgtgctgctcctccggcagtttgcgaaaaaacggcctatcgcactttggatggatcctgcaatcatttggagcaaccgggcttaggagtggctaattccaagtatggtcgcttgctgactcctaaatatgccgacggtatttcggcacccaccagatccgtgacaggtgatgagctgcccagtgctcgtcttgtttccctggtggctttcggagaacaggatgtacccgatccggagttcacgctgcacaacatgcagtggggccagatcatgacccacgatatgagcatgcaggccggtggcactcagtccaaaaagcatcccacacgttgttgcaccgacgatggtcgcctgattggcctggacaccgcccacaagacctgtttcgccattattgtgccacctcacgatccggcttactcccaagtgggcactgagtgcctcaactttgtgcgcactctgacggatcgggactcgaactgtcagtaccagggtggaccggcagagcagttgacggtggtcacttcgtacttggatctctcgctggtatatggcaactccattcaacagaacagcgatatccgtgagttccaaggaggccggatgattgtggaggagcgtaacggagccaagtggctgccactctctcgaaatgtgaccggcgattgtgatgccgttgatgccagtgaggtgtgctaccgttccggagacgtgagggtcaatcagaatccgggactggccattctccagacgatcctgctgcgcgaacacaatcgcattgcggacgccctgtcggcactgaatccacactacgatgatcgcacgttgttccaggaggcgcgaaagatcaacattgcccagtatcagcagatcagttactacgaatggctgcccatcttcttgggtggcgagaacatgctgaagaaccggctgatctacaaggctccatccggaagctatatcaacgatttcgatcccaacattgatccatcggtgctgaatgagcacgcgacggccgctttcagatacttccattcccagattgaaggtcgtttggatctactgtccgagctgcgtcaagttctcggctctctgaccctcagcgactggttcaatcgtcccggtattattgaggttggagataactttgattccctgaccagaggacacgccacgcagcccgaagagctaactgatatcaattttgaccgacagatcaagcacttcctgttcagaagaaacatgcccttcggttccgatctgcgttccctggacattcagcgtaatcgcgatcacggtctggcttcctacaatgacatgcgggaattctgcggactgagacgtgcccactcgtgggagggatacggtgatctaataagtccaccaattctggaaaaacttaagtcgctatacccgagccacgaagacgtggatctgactgtgggcgcctccttggaggcgcatgtggccggagctttggctggacccaccttcctgtgtatcctcacggaacaattctacagaaccagagtgggcgatcgcttcttcttcgaaaacggagacaagctcactggatttactcctgatcaactggaggagctgaggaaggccagtatggctcgtttgctgtgcgacaatggcaaccacatttcatccatgcagcccgaagctttccggactgtttcccattcgaatccgattataccgtgctcaaatattccacaagtcgacctcaccaaatggattgatcaaaagctatatgccactgtagatccgtctcactacggaaagaagt

SEQ ID NO: 40494 - protein, 690 aa, DROSOPHILA
MIRARDLLLLALLGFISSALGLKVSSGYHIVHNQPQSSFPNYHGFSYLQGSAPYVIGNSLPTSPAPQNPFSSPASPPVSAYGYSFPTAGRVSCAAPPAVCEKTAYRTLDGSCNHLEQPGLGVANSKYGRLLTPKYADGISAPTRSVTGDELPSARLVSLVAFGEQDVPDPEFTLHNMQWGQIMTHDMSMQAGGTQSKKHPTRCCTDDGRLIGLDTAHKTCFAIIVPPHDPAYSQVGTECLNFVRTLTDRDSNCQYQGGPAEQLTVVTSYLDLSLVYGNSIQQNSDIREFQGGRMIVEERNGAKWLPLSRNVTGDCDAVDASEVCYRSGDVRVNQNPGLAILQTILLREHNRIADALSALNPHYDDRTLFQEARKINIAQYQQISYYEWLPIFLGGENMLKNRLIYKAPSGSYINDFDPNIDPSVLNEHATAAFRYFHSQIEGRLDLLSELRQVLGSLTLSDWFNRPGIIEVGDNFDSLTRGHATQPEELTDINFDRQIKHFLFRRNMPFGSDLRSLDIQRNRDHGLASYNDMREFCGLRRAHSWEGYGDLISPPILEKLKSLYPSHEDVDLTVGASLEAHVAGALAGPTFLCILTEQFYRTRVGDRFFFENGDKLTGFTPDQLEELRKASMARLLCDNGNHISSMQPEAFRTVSHSNPIIPCSNIPQVDLTKWIDQKLYATVDPSHYGKK

SEQ ID NO: 40495 - DNA, 4877 bp, DROSOPHILA
gctttgaacttcatcacgcgcaggctgcccgggaactcgagggacagctgcttggtacacttggtggcgatgtcaaagcgagccgtatccaatgccgcgatgatcacctgctccaggatgagatgccgctcgttgccggtcttgtgcaccttgtcctctagcacagcaacccacagctggaccacctcctcgctgtggcgacccgtctcctcgcgccacgttctgaactgatcccgtacatctgaaaggatgatcatacgcttatgatacggcacttttcattcatggcaattgggagcaacccactgacgtggtctgcacctgtctggagccgggaaaagccgaaaacttacccgaccagctcatcttctcataatctagcgacatattcacttaggcggacttaaatatctcatcaatttaatttaatttcccaattgtaatcattaactagcgatttccttcttggcaaaataaaagtgtggcagcgtaatgagccgttagattataccaaataacactagcgtggcgctgccaacctgctttttgaatatcgtaaagtctagaaatgaagtcagaggtaattttttaaaactttttattataaagagacttctaaagttaagtttttctacatataccttgtttccgatatttgcaaagttaattaaactgttaatacttctgaaatacttgtaggtccttgaaaaggattctttaatgaattattttaccatgcattaatcttattttgtccaaactttgtgcattgcttatccattttaacagatttctaagtcaagtgcacatttgaaaagcgcgccaacgaaaacatgaaacatgatagtttttcttccagcgacggtcacactaacaaatcaaataattgtggtaccgtcaacaaaagccaagtctctcgtgctctccgggtattaaagccgtggaatcgggcagtgccgcatgcggtgctgtgtttaatttccccaactcccaacagatccggaagcagtttgaacatgggtccgccaaagcagctgaaacgaacctttcttggcttcgacttgagcacgcaaaaggtgagaactggaactgcctacgtagtatctttgcatctgagatgtggaggcgtctccaaatcgactacatctgggccaattgcgtgcgaatggtgttactggaaaaggtcaaacggtactcgggaacttgaaacacgaactactcttatcagttgcggtgaccggggctcgattttcgcttatctgctaaagacgcgagcgccaaccgatttaactattatggtttgattattgaaattcatgttcggaggtattggcccccgacattatcttaatagagccgcaataactttcacaatccctgaatgacgctggcggtgactcctagttgccctctatgtttgatcgttattttcgaggtgtgtctccatatcgctaattgctgccccatttactcctctcagctcaaagccgtcctgctgggctccagtttggaggtggttgccgcggctgaagtgaaattcgacaccgacttgccggagttccggaccaccggtggagccaacgctggatccatcaaaaatgagtgagtctgtttcaccactatccattactccaattgaagattttaatgggatgattgtttgcgtaaagcaaatagggggatatattttacgtttttatatcttgcgctgtggggtatttgtccgataatacttagggccctatttcatagcagttgttttattacaccacaatgggtctctatcacttcaagttttttttaaccttcctataacagggaccatatatacaatgggtactataaaatatatatgtgctaacctgactccacctttacttgttcttctttagatactttgtacaaccagtgatgtgggtgaaggccatggacattgtcctggaccgactggttatgcagcaagcggatcttagcaccgtagctgccatcagtggctccggacagcagcacggatcgctctactggtccaaacatggaatcaacacgctgcaaaacctcgattccgagaagttccttcacgcacaaatcgacgactccgcctttgtggtaaatcgtactccgatttggatggacgccaccaccaccaaacagtgcctagagatggagatggctgttggtggcaaacttaacatggtggaactgacgggctcgaagtgctacgaacgttttacgggtccccaaattagaaagatatatcagcaacgctgccacgcctacgaagaggccaaccgaatctcattggtcagcagttttatatcatcgctatttctgggctccgtcgctccaattgacttcagtgatggttccggcatgaatctgctggacatccgcaagaagaactggtccaaagaatgcctaaatgtttgtgcacccgatttggacaagcgcctggacattccggtcagtccaaattcgattttaggcaacgtctctccgtactttgtggagcgctttagtttttcgcccgattgcaaagtggctgctagcacgggggacaatccttcggcgctgtctggaatgttggtgggcagcagctggcttaccatttccatgggcacaagtgacaccctaatgatgagcttgaaggagccgctaaactgggaggagggtcatatactctgccatccaactgaaacggaagaattcatgggccttctatggtaaattattcctgggacattatatcttaaaattagtttatttaaatgtctttttcagttttagaaatgcttcattggtccgtgaggaaatgaacaagaagacaaccggcggcgattgggataaattcaatgagtatctcgactccacgccccgtggaaactttgggaacatggccgtgcactttaacgacatggaaatcattcccaaggcgcagggtattctgcgatggaacagggaaatggatcccagttccccggacgcggctaggggtgtaatcaagtaagtctgattgaaaatttagctgttttaggtccgacatgaaagcaatgactcataatcagttaacagacatctgtaaatagttatttttagaaatgactttttaccaacatgatcatgttttttgtcgtttatactttttcttaatgcctatttcccttctactgaattctttaaaatgtataaaatattcctgacctctttcgctttatagattcagctcgccccaaatcgaaattcgagccctagttgaaggtcagatgctgcatcaccgggctgtggctgaagaccttggctacaaattcggacccgagacacaaatccttgtcacaggaggcgcatctgttaacaaatcaatcctgcaaacaattgccgatgtgttcaatgctcccgtccatatccaggttagttcataccaactgtttctcaagtgcaagcaatttaagcaacatgtttcttgcaggatgaaggatttgaggctgccctactgggagccgcttatcgatccgcctacgctctgtaccttcaagaggcaggtgatggggtgacgcctctctgttaccgagattatatcctaagtctgacaagtaacaaactgagccttgtatgcgaaccacacaaggacagcgaggaaatctacgctccaatgctacaacgatatcgcgaaatggcgcgcgtcctgtccaatcctaacacataaactctccgaaagcccaacgtaacattccagtttatactccgtacattcacaaactgattccttcttaaacgtctcctgtaattgacagaacttaagtgcaattaacaaattctgtgattgacgatttattacaaatttatgcgaaaccatatacaaataaatttttatatatggcccactccttattgtgtctggtatgcctttaatctttgatccgcctactttttgcgtccaccacgctccttgacctgtaaatgcaccgtggttccgtttaccagattgtaaaaagccatggtattgctgtctttgaagaacattccctgaaggatagatgttattgaaataatagttttcgaaacattagttgtatttcttacctcataaaatatcttctgcttggccggtggcatgccagtttcgtcctgcagcttcgtcttcagattggcaatgggttcagaaagtgccatggtcacggctatcatctgtccattaagcttccactctgatttgtcggaattgggtaccaaaacctgaatggtcacagggctctgaaataatttaagatgggttatataccaatagatagccagatatcaaaatcaaacttaccttgtgggtggcaataaagtctgcttctggaatcaggttgtcctcgcttcgaatctttttagaaggcggctcctcctccattatatcaacaggtggagcaggtgcaatttgctgagggattccaccaggctgcatgttcatgtagcctccaccaccagctccaaaaggcggctctgcaaaataaaaacgctaagccctcgacgagatttgcatactatttgttacttacgcatcatggttggacgcagttgcatcagctgcatcaccggttgaggctgctgcggcgggtgatggtggtgcgactggtgaggtggcgcctgctgatgcggtggatggtgatgatgaggattatgatgcccgtggtgaccacctccgccaccttggtggtgttgactctggctggagtgactgtgctgcgacttggttgacggctgcggcggagctgaaagcgtcgccttgttgcccaccggtttggggccgattttctccttctcctcgtcgggcagcagtcccttaaccttgtggatttgatgaatttgttcctccagagtgatatttgcacgtgctg

SEQ ID NO: 40496 - DNA, 1852 bp, DROSOPHILA
cggaagcagtttgaacatgggtccgccaaagcagctgaaacgaacctttcttggcttcgacttgagcacgcaaaagctcaaagccgtcctgctgggctccagtttggaggtggttgccgcggctgaagtgaaattcgacaccgacttgccggagttccggaccaccggtggagccaacgctggatccatcaaaaatgaatactttgtacaaccagtgatgtgggtgaaggccatggacattgtcctggaccgactggttatgcagcaagcggatcttagcaccgtagctgccatcagtggctccggacagcagcacggatcgctctactggtccaaacatggaatcaacacgctgcaaaacctcgattccgagaagttccttcacgcacaaatcgacgactccgcctttgtggtaaatcgtactccgatttggatggacgccaccaccaccaaacagtgcctagagatggagatggctgttggtggcaaacttaacatggtggaactgacgggctcgaagtgctacgaacgttttacgggtccccaaattagaaagatatatcagcaacgctgccacgcctacgaagaggccaaccgaatctcattggtcagcagttttatatcatcgctatttctgggctccgtcgctccaattgacttcagtgatggttccggcatgaatctgctggacatccgcaagaagaactggtccaaagaatgcctaaatgtttgtgcacccgatttggacaagcgcctggacattccggtcagtccaaattcgattttaggcaacgtctctccgtactttgtggagcgctttagtttttcgcccgattgcaaagtggctgctagcacgggggacaatccttcggcgctgtctggaatgttggtgggcagcagctggcttaccatttccatgggcacaagtgacaccctaatgatgagcttgaaggagccgctaaactgggaggagggtcatatactctgccatccaactgaaacggaagaattcatgggccttctatgttttagaaatgcttcattggtccgtgaggaaatgaacaagaagacaaccggcggcgattgggataaattcaatgagtatctcgactccacgccccgtggaaactttgggaacatggccgtgcactttaacgacatggaaatcattcccaaggcgcagggtattctgcgatggaacagggaaatggatcccagttccccggacgcggctaggggtgtaatcaaattcagctcgccccaaatcgaaattcgagccctagttgaaggtcagatgctgcatcaccgggctgtggctgaagaccttggctacaaattcggacccgagacacaaatccttgtcacaggaggcgcatctgttaacaaatcaatcctgcaaacaattgccgatgtgttcaatgctcccgtccatatccaggatgaaggatttgaggctgccctactgggagccgcttatcgatccgcctacgctctgtaccttcaagaggcaggtgatggggtgacgcctctctgttaccgagattatatcctaagtctgacaagtaacaaactgagccttgtatgcgaaccacacaaggacagcgaggaaatctacgctccaatgctacaacgatatcgcgaaatggcgcgcgtcctgtccaatcctaacacataaactctccgaaagcccaacgtaacattccagtttatactccgtacattcacaaactgattccttcttaaacgtctcctgtaattgacagaacttaagtgcaattaacaaattctgtgattgacgatttattacaaatttatgcgaaaccatatacaaataaatttttatatatggccc

SEQ ID NO: 40497 - protein, 552 aa, DROSOPHILA
MGPPKQLKRTFLGFDLSTQKLKAVLLGSSLEVVAAAEVKFDTDLPEFRTTGGANAGSIKNEYFVQPVMWVKAMDIVLDRLVMQQADLSTVAAISGSGQQHGSLYWSKHGINTLQNLDSEKFLHAQIDDSAFVVNRTPIWMDATTTKQCLEMEMAVGGKLNMVELTGSKCYERFTGPQIRKIYQQRCHAYEEANRISLVSSFISSLFLGSVAPIDFSDGSGMNLLDIRKKNWSKECLNVCAPDLDKRLDIPVSPNSILGNVSPYFVERFSFSPDCKVAASTGDNPSALSGMLVGSSWLTISMGTSDTLMMSLKEPLNWEEGHILCHPTETEEFMGLLCFRNASLVREEMNKKTTGGDWDKFNEYLDSTPRGNFGNMAVHFNDMEIIPKAQGILRWNREMDPSSPDAARGVIKFSSPQIEIRALVEGQMLHHRAVAEDLGYKFGPETQILVTGGASVNKSILQTIADVFNAPVHIQDEGFEAALLGAAYRSAYALYLQEAGDGVTPLCYRDYILSLTSNKLSLVCEPHKDSEEIYAPMLQRYREMARVLSNPNT

SEQ ID NO: 40498 - DNA, 6733 bp, DROSOPHILA
gacaaattttcagttatgtataaaattaatcgcgttgcgttctagaccaacaaacaatgatattcgagaaaagcgccaagaatttttgtttaagcgcttaaaacttaatttatcaaaaatgaaatgacgcagtattctccacaattacactgcgaactaataggtgtggctcttggctagaaatgaaatttgcatattggcttaattccgaccaaaactagactggaactgaaaacgggaacaggttttgagctggcaattcgcctcgttgataagggagtgcagtgcagacgagctgcacctgacgatccacgtcccgaatgcgtgatcgtctaacccaatcggatctgtttatcgccaatctcgaccttgagctggccaggccatgtggtccagtttgggaagcggctctctgatggcttcagagcagatcgaatcgattgccttcccgtaagccaatgacgcacatctgagccgagcaatcgatctgcccagtcggatggtcgatatggttggtcagaccagccagctagattgcgtcgggcggccctgtggacggaacacgtgaggttcgagttaagggtaagacgacttgtggggtgaactttgcattccgcccggcaatgtcaattccaccaggaagcgcaacaacacaccgtgcgcaaacaattcaacaattcagtggtcaatacgaatgtgcgcaattgtcatggccaattctgagatgcagtagaacattgataacatgcacaatggtgctaaaaaagtgatagatttagtggacatttgtggtgcaacccactagtgttcggaactttctagttcttagctcggttacttgggtgggtaaacgttacatatttctgttgtattatgttaattaatttgggtttttcttttccatgctgaatttttaagcaccaatgatatttaccccaatagtaaacaaagaatccaattaatatttgaagttagaaaccatgttttcaaaaacgggttcctttcgagaaatctgactgtagctgcgcagttaagcaatgattcttcattttgaattggaaacccagccgtcgtcgtcgtcgtcgttacagttacatttcgtgcctatagctctattagctacatgctatatgctatatgctatatgccatatgccatatgccattagctatttgccattagcgccggcgtcgacgacgcttttctctgcccgccgacgatcggggttctcggaaatcggcactagtttttcagtgtttgagcgttcagcgcagtgtctgcttcaccttttgcgattcgttgtgttctctccggctcctcgacggatccacaagcctccgcccgccgtcttcgccagtcgatccaggtaaacaattcgacgcagaaattcacacattccacaaattattggtcaccataaacgctattatcaactcgtccagttcccacaaagccatgaggcttgagtcccccgccagtaatactagactatgatatccattgccagtgagatttgagtggaactcgtttttgtttgtggcccatttggtactaataaacataaacatcgaaccagcaacaactctcggccaatggccacataaattcagtttgctgtgacaacaaatgccaaagtcaaaaaatacgcatacgcagtgcagaatcagttgccttttagaaaatattaaacatctataagataaagatacatcccccaattaatagtatgatattaaaagttcgattataatcctattgtatcataattgatacttaattgattttttttagtgaattacagcgaccatgaaatttgttttgattgacttttaataagagtttccaaaagtatacatatgtaattattttgtaaatcaaataatatttacaaacttacaacttaccacgcagagcttggcaagtaaagttattatttatgatttggaacattgataatgtctatcttcagatcttaggcgacatggaaaaagtgcttagaagttagcattgttttgctatttttttattttgattatagtccatatatatgtatgtatatatctgtaaacatttaacgatcacactgcgggaacgtggtaaatgtgtttgagaacagaacagcgagagtgagaatttttgggagatattggatccgtgtgaggctttccatcccgaaagattgctcggtttgtggggtttgtggttagattactgggtttctgattgggccgcgattaagacggtcacggtgcctgtaatttctgccccgtctttatcattttcacggcccctgtggtaaatttccatcgaagttcccctggttttcaagccgatttcgacgaacccccggtcgttatgtttgcattgtattgttgatagtctggggcaataattaacagcggttccatataaaaatactcgatacggcgacaagtggacccataaatagtccacttgttaatgagcgcatttgaattccatttgtagtttgtgtgtgcgtgtttttggtttttgtttttttttttgcatttaatccagatcgtatcaaagatactaaatatttgaaagtaactgggaatttggcaataattccaggtagtcccgctataatcggctgagctggcaaccctgatgccatcgaactgcaccgagcaccaaactatcgataacgaacagtgtgagaagtagtcgattcaattcgattggactcgatacgattcgtcagctgttttcactggtttctttccgtttcgttttgtttttagtgtgtgcttccttcgttcgtttattatttgtgctaattccgcgtgctcacgctctctctctctcccgcccgatttctcacactgaaaaagagcgtcgcccacgcagcacgcacgttttgtgttcctcctctcctcctttcgtgtatgtttctgtttctgtttcgctttagtttcactttcattcgtcttcgatcgtcaagagcaaagaagtcaaatattagcacaaacacatttgtgcacatgcatacatacatatttgtatctacccacattgagtttttgtgcggattgtagctacctcgtaggtacccactttatttgcgacacattcttgattttttcaatctctaatccagatcctctcgaaattcggcaattcaaagtacccaaatattgttggattgcatctgaaagcagctcctcgcatctccacaaatcacaacattatcattccattcgacaatttaacaacccagtaaaacaaacatttatgttcgaatactccactaatttcatgtcttgccacgctacgaaaacaacaaacagcagcagaaggaacagctgatcagccccaaaaatcacagagagaaggcgaagtgaaaggagcatcatcagaagcccaacgaacaaaagcaaacccaaaccagatactttcagccagcaacagcagctcaatcgacgagcaagacgaggatcaagtaggaacattgccattgcccctgctgtccatcaatagaaggacacccaccctgctcccccgccccgttccaccatcatcgacccgattcacatcgtcctacaacgacgacctgtgcacgtgcagcaactgcgcgtactccagtttctcatcctcctcctcctccgcctcgtccacatcctcgtcatccacgagcgctacagcagcaggaacagcattagcatcagcagccgcatccgccgttgccaagaagctagcacgctccgtgaccgccaccagcatcatggacatgccgtacaacacctcgccgtcgctacgcgtgcgcaccacctcgctgaatcagctgaagaagaccgccgacctggccatcgagaatgagctgcacgtctgtccgtcggtgatgtccgaggagctgcgcaagctgctgccgcccacctcggagaccgtgatgaccaaacccttccccatccggggcgaacggaccattgccgactgtaccacgccgcatgtgatcgccatggttggcctgccggcgcgcggcaagacctttatctccaagaagctagcgcgctacctcaactggatcggaatctccacgcgtgttttcaatctgggcgagtacaggcgtcatgcaaccacagcatacaagtcgcacgagttcttccgcgccgacaacgaggaggcgatggccatccgcaaccggtgcgccaatcaggcgctgcacgactcgtgcgattggctgctgagcggccagggaagcatcgccgtgttcgatgctaccaactctacgcgcgaccgtcgccagctgatccacgacattgtcgtgaagcagcatggtttccgcctgttcttcgtcgagtccatttgcgacgatccgcagattatcgagcagaatattctggaggtaaaggtcagctcaccagattaccttaacatgaacacggagctggtggtgcgggacttcctgcagcgcatcgagcactacgaagagcgctaccagcccatcgacgaggttaccgagtcgcacctcagcttcatgaaggtgtacaacgccggcaagaaggtggtcgtctacaataacgagggtcacgtggagtcgcgcattgtctactacctgatgaacatccacattacgccgcgcaccatctacctgacgcgtcacggcgagagcgagtacaacctgagcgggctcatcggcggcgactcgaacctgagcgcccgtggccaccagtatgccaatgcgctatccactttcatcgcccagcagcagatcgacggtctgcgcgtgtggacgtcatggatgaagcgtgccattcagacggtggccgatgtgaaggcgccgcaggagcgctggaaggcgttaaacgagatcgatgccggtcattgcgaggaaatgacgtacgagcaaatcaaggagaagttccccgaggaattcaaggctcgcgacgttaacaagttcgcctatcgctatccgcgcggcgagagctacgaggatcttgtggctcgactggagccggtcatcatggagctggagcgacagggcaatgtgctggttgtttcgcaccaggcggtgctgcgctgcctctttgcctacttcctggacaagtccgccgacgagctgccctacctgtatgtgccgctgcacacggtcatcaagctgacgccggtggcctacggctgcaaggtggagcacatcaagttgcccatcgatgcggtggacacgcatcgtcccaagcctaagattcccggcgacgtcagtgagccaggactggatggcctcagcggcgagctggtggcacccgatggcgtcggcaaggtgctcattgtgggtgacgatgtggcgacggccacgaacggcaatggcgggcgcgtcgatgtccaggcgcaccaatgacggcgtcgcctgcaccccgtgcatccacatccacctccgaaatccaagacaatctaagcacggctgctggaacggctacggctgccccaacctccaagacacttgcccgccaaccccgcccccccaaatcccagaacagatcccgcactaattcttcccccagcgcatcccggacagcccaactgaaacggacaaagacacggacgtggtcatgcgagggcaacactgacaactgctcctgcacctgctccaaggatgtggtggcatctctacttaacgtggcgtcgaaggactgcgtatgaaattgtgattgatccattgtgctgttttattatgtactttaatgaacgattaaatatttttaaaattttctagaacatctatatactttgataaaagcaaaatacagacttaaacacctatctagatttacacaatacacaccttctcctgtaaatggagaagtcctggcttgattgattcaatgtgattagttacccctggcttcacatgcaggcggttggcataccgcatgctgagtgctccagccactaaaaacttgattgattctaacgctgtatacttaaatgtgctctaatctaattcgttgtctattttttataaccgttttgagcgaattttatagctaagcgagaggataaactcacggattccatttgccaactctgtttaactgaaaccacttgcccgacacactttttagcctatgtatatgttgcttgtaaatgtatgtgtggaataaatattgtaactacaatacataaatactatttcaaataatcaacaataaatacaatttatcaaaagaacccatgctcaaatgcatcaaatgtttcattcccgttagaagaaaaaaaaaaaattcaaattgatagaggaaaagtaatacgagggtaaatgtaaactttacatacgatattctttaaattattatttgaaattatttaataatacgttttaaatactaatagctaacataatttacaatcggttgacaataacaaagttaatttatttaaatacatacatatatgcatatgtatgtaagttaggatatctttcccaattaagtaccaaagttttctgttaagcacgtgtcattaaaaataccaaactgaaccaaagattccgatagataaaaatcggttccagacgcgatctagttagctcgcaaaatttgactttttcgctagttaaaattttcgcatgtcaggggacggaagtttctagcaaatttcttaattttcaattcattcaattgggtttcagctgccgggaagtgttttgtggtgtttcttcatcctcgtctgctaggattaattatatcactgagtgactacgcaccggcaattccag

SEQ ID NO: 40499 - DNA, 2788 bp, DROSOPHILA
ctttcgagaaatctgactgtagctgcgcagttaagcaatgattcttcattttgaattggaaacccagccgtcgtcgtcgtcgtcgttacagttacatttcgtgcctatagctctattagctacatgctatatgctatatgctatatgccatatgccatatgccattagctatttgccattagcgccggcgtcgacgacgcttttctctgcccgccgacgatcggggttctcggaaatcggcactagtttttcagtgtttgagcgttcagcgcagtgtctgcttcaccttttgcgattcgttgtgttctctccggctcctcgacggatccacaagcctccgcccgccgtcttcgccagtcgatccagcagcagaaggaacagctgatcagccccaaaaatcacagagagaaggcgaagtgaaaggagcatcatcagaagcccaacgaacaaaagcaaacccaaaccagatactttcagccagcaacagcagctcaatcgacgagcaagacgaggatcaagtaggaacattgccattgcccctgctgtccatcaatagaaggacacccaccctgctcccccgccccgttccaccatcatcgacccgattcacatcgtcctacaacgacgacctgtgcacgtgcagcaactgcgcgtactccagtttctcatcctcctcctcctccgcctcgtccacatcctcgtcatccacgagcgctacagcagcaggaacagcattagcatcagcagccgcatccgccgttgccaagaagctagcacgctccgtgaccgccaccagcatcatggacatgccgtacaacacctcgccgtcgctacgcgtgcgcaccacctcgctgaatcagctgaagaagaccgccgacctggccatcgagaatgagctgcacgtctgtccgtcggtgatgtccgaggagctgcgcaagctgctgccgcccacctcggagaccgtgatgaccaaacccttccccatccggggcgaacggaccattgccgactgtaccacgccgcatgtgatcgccatggttggcctgccggcgcgcggcaagacctttatctccaagaagctagcgcgctacctcaactggatcggaatctccacgcgtgttttcaatctgggcgagtacaggcgtcatgcaaccacagcatacaagtcgcacgagttcttccgcgccgacaacgaggaggcgatggccatccgcaaccggtgcgccaatcaggcgctgcacgactcgtgcgattggctgctgagcggccagggaagcatcgccgtgttcgatgctaccaactctacgcgcgaccgtcgccagctgatccacgacattgtcgtgaagcagcatggtttccgcctgttcttcgtcgagtccatttgcgacgatccgcagattatcgagcagaatattctggaggtaaaggtcagctcaccagattaccttaacatgaacacggagctggtggtgcgggacttcctgcagcgcatcgagcactacgaagagcgctaccagcccatcgacgaggttaccgagtcgcacctcagcttcatgaaggtgtacaacgccggcaagaaggtggtcgtctacaataacgagggtcacgtggagtcgcgcattgtctactacctgatgaacatccacattacgccgcgcaccatctacctgacgcgtcacggcgagagcgagtacaacctgagcgggctcatcggcggcgactcgaacctgagcgcccgtggccaccagtatgccaatgcgctatccactttcatcgcccagcagcagatcgacggtctgcgcgtgtggacgtcatggatgaagcgtgccattcagacggtggccgatgtgaaggcgccgcaggagcgctggaaggcgttaaacgagatcgatgccggtcattgcgaggaaatgacgtacgagcaaatcaaggagaagttccccgaggaattcaaggctcgcgacgttaacaagttcgcctatcgctatccgcgcggcgagagctacgaggatcttgtggctcgactggagccggtcatcatggagctggagcgacagggcaatgtgctggttgtttcgcaccaggcggtgctgcgctgcctctttgcctacttcctggacaagtccgccgacgagctgccctacctgtatgtgccgctgcacacggtcatcaagctgacgccggtggcctacggctgcaaggtggagcacatcaagttgcccatcgatgcggtggacacgcatcgtcccaagcctaagattcccggcgacgtcagtgagccaggactggatggcctcagcggcgagctggtggcacccgatggcgtcggcaaggtgctcattgtgggtgacgatgtggcgacggccacgaacggcaatggcgggcgcgtcgatgtccaggcgcaccaatgacggcgtcgcctgcaccccgtgcatccacatccacctccgaaatccaagacaatctaagcacggctgctggaacggctacggctgccccaacctccaagacacttgcccgccaaccccgcccccccaaatcccagaacagatcccgcactaattcttcccccagcgcatcccggacagcccaactgaaacggacaaagacacggacgtggtcatgcgagggcaacactgacaactgctcctgcacctgctccaaggatgtggtggcatctctacttaacgtggcgtcgaaggactgcgtatgaaattgtgattgatccattgtgctgttttattatgtactttaatgaacgattaaatatttttaaaattttctagaa

SEQ ID NO: 40500 - protein, 77 aa, DROSOPHILA
MPYAISYLPLAPASTTLFSARRRSGFSEIGTSFSVFERSAQCLLHLLRFVVFSPAPRRIHKPPPAVFASRSSSRRNS

SEQ ID NO: 40501 - DNA, 5521 bp, DROSOPHILA
catcaggttctgcacattctggttgtcgatgcgcacttggccgctgtaaacatagttgatcagactctccagggcacttggctctatggcgctctccttcatggtgatctccttgatccgactctctgccatgttgttggtgaacatcgcatagaaatacgggatggtggccgccagcacaacgcggtgcgctgagaaggtctgatcttcaacctgcaataattgggatggcattttatatttagacgctagataatgaacgtatctctgagctgcgggtgattgaatgccccagtctgcacgcaaacaacctttagggtgacatcgcacagcttgcccatcctgcggatttccttgaacagggggaaactctcgccgaatagcttatcatgcttgtaaacaaagtattgatcctccacttggctattatcactcaaatccatcactttaacggatcaagaaaatgataaacagtagagatgccaaatgttgcttgtactgcagagctagtggtggtcagtggtgagcggtcacattaatcgatagttgaggttccttcgatagttgaacaacaccaatagtagtgaaacaaatttattgaatcatattgtttaattttaaaggtaacgttcttggaccaaaatgtaatttcataatacttattaaaaagttgagccctttttatgcaacagtgataattaaatccttaaaaagcacatatttttaagacaatattattctttcatttaattttaattagtaatttttccgtttttgcgtcaccttcttaaaaaaagacgctcatcactaattgggcggtgatgacagccctatcagctgttagtgtggctggagtgttttcttcgctcggattgattaagggtccaaaaacattttcgagtaatctgggtcgcttgctaattggaaaaccactgatctgagttaagacataaatgtttggaccgctattaaatgcaaggatacgaaaatagcaagtaacatggaagccgcatcaccgagggaaacccaggtgagtaaaaaggtgtcgctagaattgatgatgacgtctcatcttgttatttgcatttgcagaagaacccgaatccgatcgaggcgctgagcaaagatgaaatcatcagcaaatacaaaggcctgctcaacatcgctaaaaaggcgaaacaggcaaaagatggtaagtttgatggagagtttcagggaatcttccagaataatgcaagccactctctttcagaactcaccgaggaaaatcaccgactcaaggatgcccttaaacgggcggcggagaagcagagcagcctgccagccatgcaggaaatggtccaggacttcaccgataagaacctcatcctcaccgaggaagtgaataatctgaaacgaaagaccaaagaggatgccgatcgactgacgcaattcgagatcgagaacgagagcctaaagcgccaacttgggcgactgagtgatgaaaacgatgccctccttgccaatgtggatcgcatggaaaaggctatgcaacaggtcaatgctctgggtaacgagcagcgcaagaatctggaacttttggaagtggacattgccaaaattaaggaagcggaggcggaaaacgctagtcttcgccagcaagtcgccacgatggaagaagagtcgagtgtgctgcagcaaaagtaccaaaacatcaaggaacttaactctgagcaacgcaagaagtttaattctctaaaggaccgcttcattgatgtacaccgcaagttgaagaacctcaaggagtgcaagtgcgtgctgctggaaacgcagcacgagtacgccgcatccgtttccaaatggcaggtggagattatcaaagcttcgcaactgttgtgcgcaaagatggcatccctgcaggccgagaatgaaaaactgaagctgaacaatggaaagtcagacaataatcctcaaacaattgacactggaattgaccgcaagcgcttgctgcaaagagttcaggaaatggatcggctagccaaaatagtgaagcagaagcaaaagaaccaaaggagcaatttgaatgtggagtacctacttaagaagataaccgctctcgaagagcttgcagtcattataaagcagcagcatagaattgacaaggaacaattgataagtgtaacgaaggagcaggaaaacaccaaaaatcacgccaggaaccttaatgtaagcttattccagaccaagcttgatcaaatgcaaaatctggtcaaagtcattgcaaaggagcgtgataatcagcagaggaagttgcaggagttggaagccatctgcatagaactgcgccaacacaacgaggatttgcttacgcgataccacctcaaggagcaagagcatggagagttgctaacggagatgcgggaactgaacgaggcgctcaaaggacgcggtgatgccatttcacgccttcaagaacagcacgaagcggaggtcaagcgacaacgagacttggaggctcaactatctaatagtcagcaggcggcgcaggagaagttacagaagatcaaacaactccagagccgtgttgaggaattggagcaggcgaatgctgatgcccagagtgatgttctgtcgacatccacaatatcacgagccgaagaactaagccgcctgcgtgaactggacgaaggctacgaggagaagtaccataagctcagagccatagctgccaagctgaaaaagaaactgcaggagcagacgcagcagctgaatgaaatggaacagagcggtgccctaaaggaggagttggaggcaatcaagttggcacaggcccaactgcaacaggatttaaatgcagctcgagctgaaaaccagaagctaaagtccaaggagaaagtaaagcactccagtgtccttaatttggaaattgaagcagctgaaaaatccctgagcgaagttagtgcgaagctgacagctaagtctagcgaactagaagccgttaaggaatcactggccagcaaggaaaacaccatcgtccagctgcgcaaggagatcgctatcctagaggaggccaaaaacggcgaagcggcccactccctagaacttaaggagcagattgatcgcatgcaggtccaggtcaaagacgcagttcacagcaagcaacaggcgctcactcagaacaaggatttggaacatggcgttgaacaggccaagctcgaggcggagcaattgcgtctccagctgtcggagagcgcccaacaatacgaatcgaagctaaacacggccacccaacaactactaagccaaacccaggagctggaaatgcacctggcagagcaaaagcgattggagacggcgcttcgaaatgcggaacgagctctggaggacctgcgagtagagtacaccgaatacaagttgaaggcacagtctgtgctgcgcaaaaaccaaaataagggctccaaccgcgaacaggagttggaagaagagttggttgcgcttcgagagagtgaacgcaatctgcgcgccagcaacgatggaagagctgcccgcctggcccagttggatagtcaaatagaggaattgcgacaggataacactgatctgcaaaagcgtagcaaagagctcgtctctctagttgacgaactgcgtcagcaaaacgacctgctgtcgctagaaaaccaacgccagttgcaattccaacacgacctgatgcagcagcatcgccagcaagttgatgagctggacgccgggcaccagttgcaattaacgcaggtgcaggagcaactggaggaagcgcaaaagatgcaagcaaacgtctctcagcataccactgcatccgccgcgagcgtggacaccagtccagagcaggcaaagatcgattacttgcttatggaccacgaaacaggcttggatggccacgctggagacgtctctctggcccaactggctgctcagcgaaagatatctactgcctcgagacgttcccacgacttcatgccgcttgacgagctgctcaacacatcaatgaaccaaataaccagcgataccgtgactaccatctctaatttcggacgcagcgtttcgcagcaggaggacgaggaagcggaaatggccgcacggggagacttttccgtccaaagtgcccagcttcaggccacaaaagaacgcctaagcatccaggaaagtcgtgtcaagcacttgactgccctgttggccgaaaacgaacaggatttggctaaactgacccaaatgaacgacatgctcaaggaagaattgcgccgccaagagcgctccgaggaacgtgaacaacacatgcacaactccgagtacttgaagaacgtcttcttaaaggtgagatcaggaacgcaataactatatccacgggcttaatctatttactttataaacttgcagttccttacgttaaacaatgtcgatgagcggcagcgcttggttcccgtgctaaataccattctccgcctgagtcgcaacgaaatggaaatgctgaactgtgtggccaagggacagaaaggtaactactagcagaaaaatttaaattttagtatggtttcttgtattaagatattgcttttagtttctgcagatggtagcagtcgcagctggacgggattcctcactgcgtggagtggaggaggcagtcccaataataacaactagcgaacatcataggatatataatatataaatattcgtcttgttggatgcggatagtcgtcagtcgttgggcagttgcatagcattcattctgtaaatcttgtacaatttcccttttatatataatgtattttaaaattgctcgttgctgtttggcacatcgtactttgtacactcttgtaatttgtccacacccgttgtgttgagtgccctatacagcaccaccggcaatatgcgcgttgtagattgaagaaagcctttgcatatatttaaaaacaatgtttttcaatggtttgtttaatttgaaattctattaccatatagatcagactataaatcagatgcattgtctataaattagtattccattatttgtattgtatgtactatatataaataggatcggtatttatgcttacatttacacttttaaacggtgtatattgtttacacacaatataaaatatcattaacataaatcttacataaatttcattaaaaccaaaagtgagtaatcaagttaaataaaaattctgtcttggcggaatacatatgcaggtgaacgatttgaatcgaaatgcgccaaaagattaaagatcacaagtcgaataactacttaaatactaatcagtattgtgagcccggatcggatcctatgccaatctattgccaaacgcccgcatagttgcccaccaaagtcgccggcagtggtcctcctgcagcgaagaggcgcatcctagtgctgtcatagcagtgggtgtagatggcgggcacatacttcacctgctggaagccatccatctcatcctccggatactgaaatgtacaaaacagttaggtgaattggtgtattttgtggaactgtaac

SEQ ID NO: 40502 - DNA, 3396 bp, DROSOPHILA
atggaagccgcatcaccgagggaaacccagaagaacccgaatccgatcgaggcgctgagcaaagatgaaatcatcagcaaatacaaaggcctgctcaacatcgctaaaaaggcgaaacaggcaaaagatggtaagtttgatggagagtttcagggaatcttccagaataatgcaagccactctctttcagaactcaccgaggaaaatcaccgactcaaggatgcccttaaacgggcggcggagaagcagagcagcctgccagccatgcaggaaatggtccaggacttcaccgataagaacctcatcctcaccgaggaagtgaataatctgaaacgaaagaccaaagaggatgccgatcgactgacgcaattcgagatcgagaacgagagcctaaagcgccaacttgggcgactgagtgatgaaaacgatgccctccttgccaatgtggatcgcatggaaaaggctatgcaacaggtcaatgctctgggtaacgagcagcgcaagaatctggaacttttggaagtggacattgccaaaattaaggaagcggaggcggaaaacgctagtcttcgccagcaagtcgccacgatggaagaagagtcgagtgtgctgcagcaaaagtaccaaaacatcaaggaacttaactctgagcaacgcaagaagtttaattctctaaaggaccgcttcattgatgtacaccgcaagttgaagaacctcaaggagtgcaagtgcgtgctgctggaaacgcagcacgagtacgccgcatccgtttccaaatggcaggtggagattatcaaagcttcgcaactgttgtgcgcaaagatggcatccctgcaggccgagaatgaaaaactgaagctgaacaatggaaagtcagacaataatcctcaaacaattgacactggaattgaccgcaagcgcttgctgcaaagagttcaggaaatggatcggctagccaaaatagtgaagcagaagcaaaagaaccaaaggagcaatttgaatgtggagtacctacttaagaagataaccgctctcgaagagcttgcagtcattataaagcagcagcatagaattgacaaggaacaattgataagtgtaacgaaggagcaggaaaacaccaaaaatcacgccaggaaccttaatgtaagcttattccagaccaagcttgatcaaatgcaaaatctggtcaaagtcattgcaaaggagcgtgataatcagcagaggaagttgcaggagttggaagccatctgcatagaactgcgccaacacaacgaggatttgcttacgcgataccacctcaaggagcaagagcatggagagttgctaacggagatgcgggaactgaacgaggcgctcaaaggacgcggtgatgccatttcacgccttcaagaacagcacgaagcggaggtcaagcgacaacgagacttggaggctcaactatctaatagtcagcaggcggcgcaggagaagttacagaagatcaaacaactccagagccgtgttgaggaattggagcaggcgaatgctgatgcccagagtgatgttctgtcgacatccacaatatcacgagccgaagaactaagccgcctgcgtgaactggacgaaggctacgaggagaagtaccataagctcagagccatagctgccaagctgaaaaagaaactgcaggagcagacgcagcagctgaatgaaatggaacagagcggtgccctaaaggaggagttggaggcaatcaagttggcacaggcccaactgcaacaggatttaaatgcagctcgagctgaaaaccagaagctaaagtccaaggagaaagtaaagcactccagtgtccttaatttggaaattgaagcagctgaaaaatccctgagcgaagttagtgcgaagctgacagctaagtctagcgaactagaagccgttaaggaatcactggccagcaaggaaaacaccatcgtccagctgcgcaaggagatcgctatcctagaggaggccaaaaacggcgaagcggcccactccctagaacttaaggagcagattgatcgcatgcaggtccaggtcaaagacgcagttcacagcaagcaacaggcgctcactcagaacaaggatttggaacatggcgttgaacaggccaagctcgaggcggagcaattgcgtctccagctgtcggagagcgcccaacaatacgaatcgaagctaaacacggccacccaacaactactaagccaaacccaggagctggaaatgcacctggcagagcaaaagcgattggagacggcgcttcgaaatgcggaacgagctctggaggacctgcgagtagagtacaccgaatacaagttgaaggcacagtctgtgctgcgcaaaaaccaaaataagggctccaaccgcgaacaggagttggaagaagagttggttgcgcttcgagagagtgaacgcaatctgcgcgccagcaacgatggaagagctgcccgcctggcccagttggatagtcaaatagaggaattgcgacaggataacactgatctgcaaaagcgtagcaaagagctcgtctctctagttgacgaactgcgtcagcaaaacgacctgctgtcgctagaaaaccaacgccagttgcaattccaacacgacctgatgcagcagcatcgccagcaagttgatgagctggacgccgggcaccagttgcaattaacgcaggtgcaggagcaactggaggaagcgcaaaagatgcaagcaaacgtctctcagcataccactgcatccgccgcgagcgtggacaccagtccagagcaggcaaagatcgattacttgcttatggaccacgaaacaggcttggatggccacgctggagacgtctctctggcccaactggctgctcagcgaaagatatctactgcctcgagacgttcccacgacttcatgccgcttgacgagctgctcaacacatcaatgaaccaaataaccagcgataccgtgactaccatctctaatttcggacgcagcgtttcgcagcaggaggacgaggaagcggaaatggccgcacggggagacttttccgtccaaagtgcccagcttcaggccacaaaagaacgcctaagcatccaggaaagtcgtgtcaagcacttgactgccctgttggccgaaaacgaacaggatttggctaaactgacccaaatgaacgacatgctcaaggaagaattgcgccgccaagagcgctccgaggaacgtgaacaacacatgcacaactccgagtacttgaagaacgtcttcttaaagttccttacgttaaacaatgtcgatgagcggcagcgcttggttcccgtgctaaataccattctccgcctgagtcgcaacgaaatggaaatgctgaactgtgtggccaagggacagaaaggtaactactag

SEQ ID NO: 40503 - protein, 1131 aa, DROSOPHILA
MEAASPRETQKNPNPIEALSKDEIISKYKGLLNIAKKAKQAKDGKFDGEFQGIFQNNASHSLSELTEENHRLKDALKRAAEKQSSLPAMQEMVQDFTDKNLILTEEVNNLKRKTKEDADRLTQFEIENESLKRQLGRLSDENDALLANVDRMEKAMQQVNALGNEQRKNLELLEVDIAKIKEAEAENASLRQQVATMEEESSVLQQKYQNIKELNSEQRKKFNSLKDRFIDVHRKLKNLKECKCVLLETQHEYAASVSKWQVEIIKASQLLCAKMASLQAENEKLKLNNGKSDNNPQTIDTGIDRKRLLQRVQEMDRLAKIVKQKQKNQRSNLNVEYLLKKITALEELAVIIKQQHRIDKEQLISVTKEQENTKNHARNLNVSLFQTKLDQMQNLVKVIAKERDNQQRKLQELEAICIELRQHNEDLLTRYHLKEQEHGELLTEMRELNEALKGRGDAISRLQEQHEAEVKRQRDLEAQLSNSQQAAQEKLQKIKQLQSRVEELEQANADAQSDVLSTSTISRAEELSRLRELDEGYEEKYHKLRAIAAKLKKKLQEQTQQLNEMEQSGALKEELEAIKLAQAQLQQDLNAARAENQKLKSKEKVKHSSVLNLEIEAAEKSLSEVSAKLTAKSSELEAVKESLASKENTIVQLRKEIAILEEAKNGEAAHSLELKEQIDRMQVQVKDAVHSKQQALTQNKDLEHGVEQAKLEAEQLRLQLSESAQQYESKLNTATQQLLSQTQELEMHLAEQKRLETALRNAERALEDLRVEYTEYKLKAQSVLRKNQNKGSNREQELEEELVALRESERNLRASNDGRAARLAQLDSQIEELRQDNTDLQKRSKELVSLVDELRQQNDLLSLENQRQLQFQHDLMQQHRQQVDELDAGHQLQLTQVQEQLEEAQKMQANVSQHTTASAASVDTSPEQAKIDYLLMDHETGLDGHAGDVSLAQLAAQRKISTASRRSHDFMPLDELLNTSMNQITSDTVTTISNFGRSVSQQEDEEAEMAARGDFSVQSAQLQATKERLSIQESRVKHLTALLAENEQDLAKLTQMNDMLKEELRRQERSEEREQHMHNSEYLKNVFLKFLTLNNVDERQRLVPVLNTILRLSRNEMEMLNCVAKGQKGNY

SEQ ID NO: 40504 - DNA, 3286 bp, DROSOPHILA
tggttttaaatcaaaatgaaaaacggaaaactttctgcccggcaaacgccgacattgttggccaaaagtgtgcgttttgttcggttggagagcgaaagttgagtgaagtgcacataaacaaaagggaaagttttcatgcatttgcaatgcgaaaagtttatccagggaagttcaaggcagcagccgtcatgaccatggtcaacatttcagcatttttcacttttctccaggtgagagaaatggctgcctctgggctgcctgaacgctttcccacattttcacttttccagctcaaagagaggtgttctcctaggtgggttgctcagccgcaagtgctgtgatgaagtgcgcccgagttatcgtcgggccgagctgctgcataagccagattaaatgtattttccattactgttgcatgccactttcggccaaagtagacacagacaccaacacaggtcacagctcttcgcagccggtttagttttccaagtggccaagagtgtgagtgggccaaatggatgcggccgtgtttgttcgagctaggtgtgtgtgtcccctaagagcaaactcaattttccgtcttaatataaggcagttgatatgacctcctcacttccccttattttcgagccattactttgggtaattaaaagtgaagttggtggaatttaaccagattcaattgaatgaacttctgattttaaaccttttattaaacatttgagctaccttaggtctggcagtaattttgtttaagagctatacttcttcgaaaaatttacttttgaaaggctcttaatcctttaatgataccatggctatgtggaacgaaaataaaagaaaccttgtttacagaaaagtacataaactagcttgagtacaactttaatgataaattgttgaagaacagctggaactgaaaattttgagaactgctttcctcaagagtaaagtaaaatttagaaatctagcaagcgccgattcgcaggatccttcaaacttaggtctcgccctcaccctcggtgatcgacggctgtttggtggccagtggagaaccgtttccttcatccggtatagtgggcaccgttttgccgccgagggcgaggagagcctccggcgacatttcctggtgggcttcctcctcctcctcgccctcgccctcatcgagcagcttctcctcaggctccggcggcagccagcaggttcccttgaccaggcggtcctcgatttcggcgatctcgttcttgtagtactgattgaagtccggccgctcccatatgctcttgacccactgcaagttgaagtccattttggtgcagcagcagaacttgcgcgacttgtggcacttggggcacttggccggctggcgagcagggtgtgtgtactgctgcttctgcttcttcttgcagcaatatggacacacgtgcttgggcttctttttgttggaagtgcagggagtcggttccttggcatagaccagatgtccccgcttcttggcacagaagcagcagttgcaatcgtcgccctccggctgcctcttgcgcgtctgcatgcgatcgtagaacttcttgaaggctattttgatcttggcctcgtatgccaactgttcggcgcaggagaggccatcgaagcgggcataggactcggctgacttcctggctgcgtggacccagacgcattcatcgttgtacgagggtctgccttgctcatcgtaggtcaagtccactttcggctcgtagtagaaggccttgaatcccctcttgatgatggcataggccaagtgggcctccaccttgttcatcagcgacttcttgcccagctcgtggaacaaatcctcctttctcagtcgcttcttgggcgtggtatcaatgcaatagcacacctgatcgtaatgcaagaaggcatatgtgataatgtccacggttgatttcgctttgcactcgtgcagtccacagatgatcatcacctgggccaaagtgttggccaggtccaggacattttctaggaaaatcgatgaggcatttacctcgcccaagcacttgcactgggtgtgctgatcgattatgcccaaaggagcatgcctctggcactccttgtgctggcaattattccggcatcggaaatcgggcatcgcatgatgggcctgcatcgcgaatcggtcttacctctattttgatgctgttcgctactccttgcagcatgaacaattttcgaattttttacctaaaagtttttttctaactagttgataaaacgagacaagccaaatgaatgttatgggcgaatgttcgcctgacaggatttaaaatgatcaattgctgctagatttcgagtttttcccatttggtaaactaaaacgggaatggaatatttcgttttttttaaaaataaccacaagtgcgaaatacaattgttgcaataaatcaaactacatccgcagtacattttcatttgtaagtctcttaacaatcaaatgcttttccgtttatcagagaataaaatattcactatttttgtttggaaagattgtcgtactgtaaaggtatgaaaacatacaacattttataaaaccaagtttttcttggccaaattgtgtttctattcccaaaataaacacaagtgtcagataacaaggcaaagcctcaggattttctccaaatttggttactttcttggcttttcatgttgtcgggggctaagcggcatttgatacggcatagattgtttgagttgtgttttcgtttgtttgcccattccttgtagacacacgtataagtttcgatgggtcaaatatttgttaagccaacagtggaaattttcaggcagccgccaagtaggcgacgcgacatttcatttctctttttgcggccttcgtaatggatgtcctttttttttttttgggcgggatacattcgtaattgttgatgacggcattgagtcagtttatgattcattggggagtgagaaatgcgtctggcagtggcataaataaagtacgacatcctgagctcgttcccaagggaaacgtcagcgtaaatacatcaaagaatttattagacaagctttgccatatccgtttcctgttgacaaatgtcacgggaaccgaagagtcatctaataacatttattctaatggaaaaggcgaacggaaaaaaatcgctgacgaatgtaaatcttcatttgctcaatgtccttccaacttgaccccttgcatatcagggaactttttggccataagtgtaagaaaactggctttaatcgcagagcacaaaagccccataatctg

SEQ ID NO: 40505 - DNA, 1286 bp, DROSOPHILA
attcgcccataacattcatttggcttgtctcgttttatcaactagttagaaaaaaacttttaggtaaaaaattcgaaaattgttcatgctgcaaggagtagcgaacagcatcaaaatagaggtaagaccgattcgcgatgcaggcccatcatgcgatgcccgatttccgatgccggaataattgccagcacaaggagtgccagaggcatgctcctttgggcataatcgatcagcacacccagtgcaagtgcttgggcgaggtaaatgcctcatcgattttcctagaaaatgtcctggacctggccaacactttggcccaggtgatgatcatctgtggactgcacgagtgcaaagcgaaatcaaccgtggacattatcacatatgccttcttgcattacgatcaggtgtgctattgcattgataccacgcccaagaagcgactgagaaaggaggatttgttccacgagctgggcaagaagtcgctgatgaacaaggtggaggcccacttggcctatgccatcatcaagaggggattcaaggccttctactacgagccgaaagtggacttgacctacgatgagcaaggcagaccctcgtacaacgatgaatgcgtctgggtccacgcagccaggaagtcagccgagtcctatgcccgcttcgatggcctctcctgcgccgaacagttggcatacgaggccaagatcaaaatagccttcaagaagttctacgatcgcatgcagacgcgcaagaggcagccggagggcgacgattgcaactgctgcttctgtgccaagaagcggggacatctggtctatgccaaggaaccgactccctgcacttccaacaaaaagaagcccaagcacgtgtgtccatattgctgcaagaagaagcagaagcagcagtacacacaccctgctcgccagccggccaagtgccccaagtgccacaagtcgcgcaagttctgctgctgcaccaaaatggacttcaacttgcagtgggtcaagagcatatgggagcggccggacttcaatcagtactacaagaacgagatcgccgaaatcgaggaccgcctggtcaagggaacctgctggctgccgccggagcctgaggagaagctgctcgatgagggcgagggcgaggaggaggaggaagcccaccaggaaatgtcgccggaggctctcctcgccctcggcggcaaaacggtgcccactataccggatgaaggaaacggttctccactggccaccaaacagccgtcgatcaccgagggtgagggcgagacctaa

SEQ ID NO: 40506 - protein, 382 aa, DROSOPHILA
MQAHHAMPDFRCRNNCQHKECQRHAPLGIIDQHTQCKCLGEVNASSIFLENVLDLANTLAQVMIICGLHECKAKSTVDIITYAFLHYDQVCYCIDTTPKKRLRKEDLFHELGKKSLMNKVEAHLAYAIIKRGFKAFYYEPKVDLTYDEQGRPSYNDECVWVHAARKSAESYARFDGLSCAEQLAYEAKIKIAFKKFYDRMQTRKRQPEGDDCNCCFCAKKRGHLVYAKEPTPCTSNKKKPKHVCPYCCKKKQKQQYTHPARQPAKCPKCHKSRKFCCCTKMDFNLQWVKSIWERPDFNQYYKNEIAEIEDRLVKGTCWLPPEPEEKLLDEGEGEEEEEAHQEMSPEALLALGGKTVPTIPDEGNGSPLATKQPSITEGEGET

SEQ ID NO: 40507 - DNA, 4275 bp, DROSOPHILA
aaagccttttcgcttgtgcaaatagccgtgccgctgcagagccacataaatatacatgtagccattggcaatcgggaacaggaccggatcgtatccggatcggcgataaggtcctccatcgctggaaccatctgataactgcgaaatatgtacgttaagtgtgcaattgattggattatgaccctttgctgtgcgtatggcattttatgggtcagtgatagacggcaaattgattttgttttggtttggtttcgttagcctctatttttggatgcgccattgccacctgttgctccgaattagttttgctgccgctgcactttgagcaggtggtgcaaatcgaatttaaaattgcattccgcgcgtgggaggtgtacaaatatcaagggaagagatactccgcatgttcaactgagatgcaacgagggaaggtacatttattcgttacaaaataagtagaaaattgtagatagacattgggacttgggtaataatatttaatcatttttaattaaaactgaaagtattttagggacaataaacaagtgcactgccttccataaaggcctgcttattgaccatcaactttttgcgctgccctcgccattttcgcctttttgtcgctcagattgctttgttatttgtcaaccatttattattgttcaaataaaacgtatccgccgcccatatggatcgtcgaaacacaattgatttatacgatgtgcaaaaggttgacagtcgtccctttactgtaaggaaattactgaactttaacaaccttctaaaacatttcaagattacaaatggcgagggtaatgactgaaaatgaatacaaagaatacgtctttagataactttaatgttaagagtctagttcaatttaaattaaattaaataaaatatgatttaaattggtgtgaaattgattttagttatacataggactattttacccgtcttacaaaaataaaccaaccattaataaatttttacataacatgcgttatacatgtttttatttggaggattaatattgtaatgagtatttaaggctaggcgtagtaactaaacaattacataactggaatgacaaaatctatagagctgtgagtagtatatgaacaattttgatagagctgcaagagctgagctgagttgcatacgaggcggccgcacgaggtgccactaaagcttggttaccctcaacaatcatatctaggctaaactatatcgattcaattcacataaattacctaagacgagtgtggctagagaaacgggtttggcaggcgaatcgagtgggttactcgatccgtatgaccccggctccgacaccaccactgtgtgcgcacatgggcggcataaaggtccatttgtcggtctccggatcgtacacctcgactgtagacaaatttgactcgccatcatagccgccgatggcccacagtttgcccatgttggcggccagagccacccgcgagcgtttgcaattcattggtgtcaccagcttccaggtgtccgtctgagggtcgtagcactctacggatcgaaggaatgagttgccgcagtagccgccgcacacgtatatctttccgttcagcgtggccacgcccagtctacagcgacgattcagcatgggcgacatcttaacccagacatcttcggcctggtcgtaccgctccaccgaatcgaatatggacaacccatcatgaccgccaagggcgtagacgtagccgttcaattgggtaactccaccagccgaacgatatttcatcatttgagcaaccttcgggtagtgaaattaaagttggatcagttttcttacccatctgggttacatagaatgtttgtttacttacagtcttccaagtgttagactttggatagtaaacttcaacggtgttgagcgacgtgacgccgtcgtagccgccgcacacatagatacaatcatccaatgcggccacgcccacggcgctgcgtttgcagagcatggcacagccctgggaccacttgtttttgcgcgggtcgtagacctcaacggtggacagacgttcggtgccattgaatccaccaaaggcgtacagcttgccattcagaacggccacacccacgcgagatctgtcgaaaaattggcaattagtatgggatagaatagaaataaatgctcctcgcacactcacctcatcatggacatttgttcgcccattttccattttttggtgagcggatcgtaaatctcgaccgtgctcacagattccccagtgctggccagtcctcccacggcgtatatttgtccggtaaagaactcaccggatctctggcgcgtgcgaaagctctgcagcagacccctgcgctcgggcatgaggtgaaagtccttggcctcgtctaggagatcacggcattggtgcgaggatcgaatgagttcctcgcgggccacacggtccgccaggaactgaggcgagagcaatggcaaacgcactgcagccaggacctgaggaaagagctcagagcgcttgtcttctgcgtacttgacccacttcatgcaggcctcgaagatgacctcctcggtgcgtacgttgagttcgtcccggcgcatcagctccagcaattgttcgcagtccagggcgagaaactcctccgactgcgagactttggcaaagttttgatcaatatacttgtcggcagcgtcgattagctgccggcagatcatggagtcggcgaaggtgcggattcccaggacattgtgcggatgaaagcgggagatcaggaaactggcacaggcatcccgcacgttggacaattgcaggaagctggcgcccaccatcaggttctgcacattctggttgtcgatgcgcacttggccgctgtaaacatagttgatcagactctccagggcacttggctctatggcgctctccttcatggtgatctccttgatccgactctctgccatgttgttggtgaacatcgcatagaaatacgggatggtggccgccagcacaacgcggtgcgctgagaaggtctgatcttcaacctgcaataattgggatggcattttatatttagacgctagataatgaacgtatctctgagctgcgggtgattgaatgccccagtctgcacgcaaacaacctttagggtgacatcgcacagcttgcccatcctgcggatttccttgaacagggggaaactctcgccgaatagcttatcatgcttgtaaacaaagtattgatcctccacttggctattatcactcaaatccatcactttaacggatcaagaaaatgataaacagtagagatgccaaatgttgcttgtactgcagagctagtggtggtcagtggtgagcggtcacattaatcgatagttgaggttccttcgatagttgaacaacaccaatagtagtgaaacaaatttattgaatcatattgtttaattttaaaggtaacgttcttggaccaaaatgtaatttcataatacttattaaaaagttgagccctttttatgcaacagtgataattaaatccttaaaaagcacatatttttaagacaatattattctttcatttaattttaattagtaatttttccgtttttgcgtcaccttcttaaaaaaagacgctcatcactaattgggcggtgatgacagccctatcagctgttagtgtggctggagtgttttcttcgctcggattgattaagggtccaaaaacattttcgagtaatctgggtcgcttgctaattggaaaaccactgatctgagttaagacataaatgtttggaccgctattaaatgcaaggatacgaaaatagcaagtaacatggaagccgcatcaccgagggaaacccaggtgagtaaaaaggtgtcgctagaattgatgatgacgtctcatcttgttatttgcatttgcagaagaacccgaatccgatcgaggcgctgagcaaagatgaaatcatcagcaaatacaaaggcctgctcaacatcgctaaaaaggcgaaacaggcaaaagatggtaagtttgatggagagtttcagggaatcttccagaataatgcaagccactctctttcagaactcaccgaggaaaatcaccgactcaaggatgcccttaaacgggcggcggagaagcagagcagcctgccagccatgcaggaaatggtccaggacttcaccgataagaacctcatcctcaccgaggaagtgaataatctgaaacgaaagaccaaagaggatgccgatcgactgacgcaattcgagatcgagaacgagagcct

SEQ ID NO: 40508 - DNA, 2042 bp, DROSOPHILA
ccgttaaagtgatggatttgagtgataatagccaagtggaggatcaatactttgtttacaagcatgataagctattcggcgagagtttccccctgttcaaggaaatccgcaggatgggcaagctgtgcgatgtcaccctaaaggttgaagatcagaccttctcagcgcaccgcgttgtgctggcggccaccatcccgtatttctatgcgatgttcaccaacaacatggcagagagtcggatcaaggagatcaccatgaaggagagcgccatagagccaagtgccctggagagtctgatcaactatgtttacagcggccaagtgcgcatcgacaaccagaatgtgcagaacctgatggtgggcgccagcttcctgcaattgtccaacgtgcgggatgcctgtgccagtttcctgatctcccgctttcatccgcacaatgtcctgggaatccgcaccttcgccgactccatgatctgccggcagctaatcgacgctgccgacaagtatattgatcaaaactttgccaaagtctcgcagtcggaggagtttctcgccctggactgcgaacaattgctggagctgatgcgccgggacgaactcaacgtacgcaccgaggaggtcatcttcgaggcctgcatgaagtgggtcaagtacgcagaagacaagcgctctgagctctttcctcaggtcctggctgcagtgcgtttgccattgctctcgcctcagttcctggcggaccgtgtggcccgcgaggaactcattcgatcctcgcaccaatgccgtgatctcctagacgaggccaaggactttcacctcatgcccgagcgcaggggtctgctgcagagctttcgcacgcgccagagatccggtgagttctttaccggacaaatatacgccgtgggaggactggccagcactggggaatctgtgagcacggtcgagatttacgatccgctcaccaaaaaatggaaaatgggcgaacaaatgtccatgatgagatctcgcgtgggtgtggccgttctgaatggcaagctgtacgcctttggtggattcaatggcaccgaacgtctgtccaccgttgaggtctacgacccgcgcaaaaacaagtggtcccagggctgtgccatgctctgcaaacgcagcgccgtgggcgtggccgcattggatgattgtatctatgtgtgcggcggctacgacggcgtcacgtcgctcaacaccgttgaagtttactatccaaagtctaacacttggaagactgttgctcaaatgatgaaatatcgttcggctggtggagttacccaattgaacggctacgtctacgcccttggcggtcatgatgggttgtccatattcgattcggtggagcggtacgaccaggccgaagatgtctgggttaagatgtcgcccatgctgaatcgtcgctgtagactgggcgtggccacgctgaacggaaagatatacgtgtgcggcggctactgcggcaactcattccttcgatccgtagagtgctacgaccctcagacggacacctggaagctggtgacaccaatgaattgcaaacgctcgcgggtggctctggccgccaacatgggcaaactgtgggccatcggcggctatgatggcgagtcaaatttgtctacagtcgaggtgtacgatccggagaccgacaaatggacctttatgccgcccatgtgcgcacacagtggtggtgtcggagccggggtcatacggatcgagtaacccactcgattcgcctgccaaacccgtttctctagccacactcgtcttaggtaatttatgtgaattgaatcgatatagtttagcctagatatgattgttgagggtaaccaagctttagtggcacctcgtgcggccgcctcgtatgcaactcagctcagctcttgcagctctatcaaaattgttcatatactactcacagctctatagattttgtcattccagttatgtaattgtttagttactacgcctagccttaaatactcattacaatattaatcctccaaataaaaacatgtataacgc

SEQ ID NO: 40509 - protein, 575 aa, DROSOPHILA
MDLSDNSQVEDQYFVYKHDKLFGESFPLFKEIRRMGKLCDVTLKVEDQTFSAHRVVLAATIPYFYAMFTNNMAESRIKEITMKESAIEPSALESLINYVYSGQVRIDNQNVQNLMVGASFLQLSNVRDACASFLISRFHPHNVLGIRTFADSMICRQLIDAADKYIDQNFAKVSQSEEFLALDCEQLLELMRRDELNVRTEEVIFEACMKWVKYAEDKRSELFPQVLAAVRLPLLSPQFLADRVAREELIRSSHQCRDLLDEAKDFHLMPERRGLLQSFRTRQRSGEFFTGQIYAVGGLASTGESVSTVEIYDPLTKKWKMGEQMSMMRSRVGVAVLNGKLYAFGGFNGTERLSTVEVYDPRKNKWSQGCAMLCKRSAVGVAALDDCIYVCGGYDGVTSLNTVEVYYPKSNTWKTVAQMMKYRSAGGVTQLNGYVYALGGHDGLSIFDSVERYDQAEDVWVKMSPMLNRRCRLGVATLNGKIYVCGGYCGNSFLRSVECYDPQTDTWKLVTPMNCKRSRVALAANMGKLWAIGGYDGESNLSTVEVYDPETDKWTFMPPMCAHSGGVGAGVIRIE

SEQ ID NO: 40510 - DNA, 5093 bp, DROSOPHILA
acgcaacgagggagcgagagagagagtgttatgtaaagtgaatgcgaattctaatgctgtgctcttttcgttttcgccggacggacagctgatgtcctggcgaaggaggtggtggcccccactgcggatcccggatggttccgtcgctgccgccgctgttatggaaccaacctggctcactgctggcgtcgcagtcaccgccggagcatcacgcgctgcaatcaaacccagttgattgagctgcaagtgttttgcgtaatgtgttgttgtcgttgggaatcgcggaatcgcagatcattgcatcggtggtttgcagggttggttagcgggcgtggagttggagggcaggagcgtcggacgagaaacaaaatcgcaatgttagtggtagttggccagtactttttggccagcacgtaatcaactgctgtcctgcagaattggtttggtcgctgtatggtggggttaagaggcgcgacgcggggcgggtcaagtcgcttaagcctaaacgggtcttacaattttctgtatgaatctagcagccattgcgttggatcggtttttgcactgattcctgccgtatattatatagaaaaaagtctgtctttttagtctgcgcccgccgtagtcgccaccttgcggaaaactggcgaatctgcggtatatcggtcgataggcatgcgggggcagcgtcgttgccacctggactgcgctcagatgggggtggaattacaaatcacccatatccccgtatttgtatgctctcgcttgcatcagtcacataattgctgtacgagcatcatatgtatggcgtaaaaccacattaaagttggctgtgaataaacagatgtcgaatatcgatgtcgtctgcccgaaattcagtacagcctgccgtgtggcatccctgtacagggcaaaagcgaaatatcggagcggcctaatcgatagtttgtgtatcccttgcaaccgtggctgctacagccacagtttaaattaatttgagcattcgctcagttttctgacgtatattctagaaaaagtgctgagagtgtccatcaaaaaggggcaagcgaagccgtttctcgatctccaacgaaaacggggataggataatccaaggggccgcctgtcgagaagccaggcgagggcaaaaaatcggatcaaccgacagacaaagctgaactgcggtcgtcggcgacaaagtgcgctgtgcccacggacgaccagagagaatcggtacgcgagtgagtttttttttccgcgtttcagtttggatttcagttacctgcgcgcaacaactccactgaccagccgttcgcagcgttccgtatctggagtttctggccaagagtactcctttccaagtagccccagctccgcgtccggcaggccgtactgcgtaagcgggcgaaaacggtacgtgcagtgagatccgtgtggcagcgtcttcggttgtgtgcttgtggggcaccagagtaccaggtaggcgtcctccgagtccctccgtgtccctccgtccagccagattcggattcctgcattcaaatccaaatgcattgccgtttccaaactcagctggcttggccctcacccatacacctatacacgcgtcgctagcacacgcaatacacgcgcatacgctcacacggacgcacgcacacttatgaatgtatctgtttgacagcgcacttctgcgctcgttgcgggaaaagtgcctcttgccaagcgcacactctcgccaaacgcggtgcagagtttctatttgctggatttttcagccggagagcagagtacggctgtcatccgtgtccgaatcagtcgttaacacatgtccccactgttcttgcagctccgcagtgctcgtgttcgctagtgctcgtgtttagccaaaactagcaccctggagaagcataacaagcgcgcccagctcatccgggacaagatggtgttggcggagcgcaacaccacggatgtggtgcgcaacgggcgccgttcgcgcggccccagtcccaatacgcacaccacgggcggcgtcaccaacagcgccagcctcgtgggcagcggcaacaacagcggccactccgggaacgccaatgcgaacgagaagaccaccacagctgtgccaggtgcaggcacgccggagagctccgacgacgacaactgtaagtgaaacgccccggaattaccttcctgccacttcagcccacttatctgtaccgtctcccttttccagccaccaaacggaacggcaagagcaaggccaagcagtctgagtacgaaggtgagtacctgtagtctttttccgcacgatgtggtctttaaacaaattttcatttcatagagaaaatccgcgttggacgcgactaccaggcggtttgtccgccgctcgttccggaagcggagcgccgcccggaacaaatgaacgaacgcgccctcctcgtatggtcgcccaccaaggagattcctgatctgaaatgtacgtattagtggcttacttgcccatttgatctctgggttgtgccagcgaatagaatactaagacacgtattgtaaccttgcagtggaggagtacatttcggtggccaaggaaaagtacggctacaacggcgaacaggcattgggcatgctgttctggcacaaacacgatctggagcgtgccgtaatggacctggccaacttcacgcccttcccggacgagtggaccatcgaggacaaggtgctgttcgaacaggccttccagttccacgggaagagcttccaccgcatccgccagatggtgagtgagccgcgcatattgttttgaaccgcctaaatgcaattgcaactccgaccacagctgccagacaaatccatagccagtttggtcaagtactactactcgtggaagaagacgcgtcaccgcagcagcgccatggatcgccaagaaaaggccatcaaggcggtggtcaaggatggctccgagaacggcagcgaggtgggcagcaacgaggagtctgataacgatgacaaggtaattatctgttagaactagctaagcgaaaagccaagagatcccttccacaatccccccacaaacacgcacacacatccatacacttcgctcatccacacacaatcgcttcgaattgttttaaacttcgaaaacacaaaccacatccaaaaagagacgactccttcgcctctccccgtagatccacgtcccctggcgcctccaggaatcgccaaagtaggcagcttttaccacaaagaatcgcatcacaaagagattgtagactacatttattagggctagtataacgtatgtaaatctaggctaaggctactggaattggttatcaatgtgccccaaagtagttgtgtaagattgtccacgacaaaggattgtgattaggctatgcaaatgtatattaaaatgtattctttactgtgccaaggggttacatgggtggcacaagccgaaatggggcgcgcgtctttaaaaggatattttcaagactactcattcactggacatattttcgctgatatcgaacgctgaaaccgaacaattagatttaaagtaatacaaaaccacacttgcacatagtcgatgaaaataaaacaatcagcattttgaatatgtgtaaaatctgattataacatttcgatttaatttcgctgtctacacaagtattgcttaggcattttattgtacttaaatgaaatgaatttttggataacccatgtgaccccttaagtgcaaacttttgagtgtatccaggcgcggggaaactgaggagccgcaacaatgcttctcaaatcctttcaatcagccatgtcttgcactggctgtcgatcaatcaaatttagctaagaagcttgttgaatcgcaaggctaaaagagaggcgggattgacagaatgtcaggttaatcctcgatttgccaatggttggtagtgtggactgtacctgttccccccagcgatcctcttcattttcagccagcgatgtatgtcgttttgaaagtctggttcgttatttttcagataatcgccgtgcctgcacacatctcataacattttcaatcactatccacacacacacacacaaacgaataccaaaaacaatatttgaccagcatccataagacttaaacgcagtaatgatacgattttcgttcacacaccgcaaagattgcgccacacacacttgagaattaatatgtattccgcgaaggttggcctgatttggttgatttggttgcctgcagaagtcctttgcatcgcgttggatcgccaaatcaggttgactggcactcgactaaggcatagcaacaaaaagaattgttctttgttcatacacggacacgtacacctttatataaatagtatatacaacttaaaatatttttttttaaattattataaatagaatcgtaaattattatacttaaaatagtaacttatataacgagattgattaatttaaagaaagcaaagtccaaaaaaattgtacattcatacatacatacatacattacatagttgtataccgtgagtggaaagaaaggagaaaagcaagcactcgtttctattcccaaactcatcctgccacagacgataatcataatggatcaccacacctaatgctaatcctaagaaatgcatatcttgtttgcgaagagattaaacaacaacccaaaaaccaacaatttatatgtgtttcttattcatagagattcgtttcgtttcgcttttccgtttctgttttcgtttccaattagaattttttgtttcccaaccgcacatcctcatccaacgacattaaccccacaacaatctatatatatctatctatcgctatgtacaacatgtatgccttaagtttccacctttatcactgcaccactttgaaacttgatcccactttccctgctcgaactaatcagccatgtccactgatctccggctaaatccaaccaaatgcttaatatacttttaaggacccacccaccctcacctaaacataagacacttgctagaaagcgaacccacgacataagtgcttgatggccccgatccacaggcatcctgtagaggaacctttggatctggcac

SEQ ID NO: 40511 - DNA, 1189 bp, DROSOPHILA
cattcgctcagttttctgacgtatattctagaaaaagtgctgagagtgtccatcaaaaaggggcaagcgaagccgtttctcgatctccaacgaaaacggggataggataatccaaggggccgcctgtcgagaagccaggcgagggcaaaaaatcggatcaaccgacagacaaagctgaactgcggtcgtcggcgacaaagtgcgctgtgcccacggacgaccagagagaatcgctccgcagtgctcgtgttcgctagtgctcgtgtttagccaaaactagcaccctggagaagcataacaagcgcgcccagctcatccgggacaagatggtgttggcggagcgcaacaccacggatgtggtgcgcaacgggcgccgttcgcgcggccccagtcccaatacgcacaccacgggcggcgtcaccaacagcgccagcctcgtgggcagcggcaacaacagcggccactccgggaacgccaatgcgaacgagaagaccaccacagctgtgccaggtgcaggcacgccggagagctccgacgacgacaactccaccaaacggaacggcaagagcaaggccaagcagtctgagtacgaagagaaaatccgcgttggacgcgactaccaggcggtttgtccgccgctcgttccggaagcggagcgccgcccggaacaaatgaacgaacgcgccctcctcgtatggtcgcccaccaaggagattcctgatctgaaattggaggagtacatttcggtggccaaggaaaagtacggctacaacggcgaacaggcattgggcatgctgttctggcacaaacacgatctggagcgtgccgtaatggacctggccaacttcacgcccttcccggacgagtggaccatcgaggacaaggtgctgttcgaacaggccttccagttccacgggaagagcttccaccgcatccgccagatgctgccagacaaatccatagccagtttggtcaagtactactactcgtggaagaagacgcgtcaccgcagcagcgccatggatcgccaagaaaaggccatcaaggcggtggtcaaggatggctccgagaacggcagcgaggtgggcagcaacgaggagtctgataacgatgacaagataatcgccgtgcctgcacacatctcataacattttcaatcactatccacacacacacacacaaacgaata

SEQ ID NO: 40512 - protein, 273 aa, DROSOPHILA
MVLAERNTTDVVRNGRRSRGPSPNTHTTGGVTNSASLVGSGNNSGHSGNANANEKTTTAVPGAGTPESSDDDNSTKRNGKSKAKQSEYEEKIRVGRDYQAVCPPLVPEAERRPEQMNERALLVWSPTKEIPDLKLEEYISVAKEKYGYNGEQALGMLFWHKHDLERAVMDLANFTPFPDEWTIEDKVLFEQAFQFHGKSFHRIRQMLPDKSIASLVKYYYSWKKTRHRSSAMDRQEKAIKAVVKDGSENGSEVGSNEESDNDDKIIAVPAHIS

SEQ ID NO: 40513 - DNA, 3711 bp, DROSOPHILA
aagcgcagttcggcccaccatttgtcctcgatgtcggcattgaagaagcagcagggtttttgagggggcttaaagggtcgtcctttgtcatggagtggcggctgaccccagacaattattggggagtacggttggaccggatagatgtactgatgcttcggcgtcattttccgttccagtggcgtggccaacttggcgaccttctcctgaaattcgtccggatcgattgcgcgtggttttctggcgcatggcaagaacttgtcaacacagggtatgggctgtttgaccggcaccggtagttcctttggcatggctctggaggctgcccactcgtagaactccctccactgtgcctttttcatcggtccgggaatttgccatctggttagatagcgcctctccttgatgagccgacgttcgatcggcttggcattccgctcgcaccattccacccaactcggtggcggctttaccacgctgattacgctggccttggtctcttcttgtatcatactcatggtgaaccgattattgatttaaaatcacttaaaatttagcaaggggtctgactgtatctaatgcaacaaaacaaatttttgtgctccaatggcaacggttttaaataaaatagtacttctcagtcgtttgacttgtaaaatcatactgaagactaaaaaaacgcctacttatgcagcctttgaaaatgaaaccgcatcgtacataaccagtacaattaataaataccctcggttttataaaatatataaaaaacggtctaaataaaaatggcaggagattaagtgattaggatcttctaaatgataggagatttattgattgggttgagcttttcacttaaaaaaaaatagtttacatagattctttagttaagaaacacacttcaaacaaaatacaagggtcaaaaactttaataaattcattttgtgttggacaaatataaagagcagcttggaagcatcaaggattgttagatgttacattagaagtatatcgtttcatttctagaaaccggcttggacaggtacaacagtcggatctggtgcaaccgccagccccgcttggtgaacttctttcgcggtggcggctgaacatccagcggatgcaacacttttttattaatgaggcagtgcggagtaggtgaatatacccgtggtttggccagagactggatgcggagcgttatctttgcgaagagggctgcctgccggacaggaaatctgagctgggcccagaaatccgcctccagttcgtcggttggaaaacaggcgggaacgtaaggaggtttgaagggtcgaccgggatcgcgatgcggtggcttgccccaagagatcgccggggagtacgctggcggtaggtcaggcgtattatacttctcggtgatctttcggggctttgccaacatcaacatcctttcccgcaactcatcctcgtccagttggctctttttcaaggcacatggcaagtaattggccgcacagaagggttttgcaggtctctgcagctgtggatttttaggccctgcccggaaagcagcccaggcaccaaagtgcttccaatccctaatggtcatcggaccatttttctgccacggggtcaactttcgggactcacgaggccgtacacgtttcacgggctttgagtttcgttcgcaccatgccgcccaagagggcggcggcccttgcaccttgggttttacgaacaatgtttcctgctcaacaaattcattagcggagtttatggcggctatcgatggctcagaagtctttattttgcccaagtgtgttccaaaagcttcactattcattttaatattttttaagaatttttatgtttactctttttaaattttgaaagtattgtcttacgactgtctggttactgtcggactttcgagggataactcctccgaaagattttggacgcctactttttatgattaataccatgttataccatattataccacgttttcttttggtcataacttgatttgcatttgaaatgaaacaattgcaagtgttatcaatccgattaattcttaactacaggtcaatctactttatttcgtaagtgatctgtacctaaggagtaatctttttggtccaatttagtgacagcagcacagtaaatcggccaaaacccgaggatttggttttgctaggaactctagtcgctgcagatgatgtcgccactcccgcggggtcattttccgaagtctgggcacctccccctcgttgctgctgggcaccgggcagtgggatttctgtggatattgtcgtggccgggccagttcatagatcttcttactgggacgggctgtgagtgctttccgcgacacaggaaaccgcaagttagaccaaaactcgttctcgagatccacgtgctgaaagcagcacggaaccactggcctttgaactggtctaccatgttccggacgtggaggagcactttgaccgatgatttgtggtcgatagggaaactgttccggtggcggtgggatatacttttggcgctgccagcgtggcatactcagacgatattggttttccgttagaggactaacttctggcaaggaaggcttctcaacaatgggtttgctaagaaaggatcgagttatggttgagaaaactaccatctctacgatcgattttatggcgttttacctatctcgcttttgctttccaccctgcaatctttggttataggccattgtatctacttggtaagttttgtggaagttggcccactcattccggctcatcggtcctggcttttgccatctagtaggttccggacgaacggcgggattgggtatcgatgacttgggtctcgagtttcgatcgcaccactccatcgtcgaagttcggagtttttgtgtggccgtcattttttgattttattttacagattttgtcgtatgtccaaaaagtttactcttaaattatttttttttttaaatctgaattttgcttttttttacaactttctagtaccatcttggcattacatcttatccggtttattttgtattcgtgggtagttaaccagaatttttacatttctcacatttttattgccgagtgtaaaatctaggactactaaaaagttaatattaagctcttaatattttggcatgcctgataagcgggatgtaagtcgttttaaaatgggtatatttcctgtgacatgaaagacaattgaattgtggattcgaaaaaaaaagacatgccagaggctaaatcttccagtcattttcctcgatctcggggcttggcacggtgcttgaaaaatgctgaagatactttcagcttttaactgccgcgcactgaaatccgaacggctcaatcacgagcccatggttcgatgaaagccagtgggtccagccagaggcattgtggcattgcccgtggcgacacgcattcgaggtcataacccaattcctttcgtggccagctggtgatggtgatggccaactgcaggctgcaagctgctaacagcagtggcaactgtattccccacttggagtccaagatcgatggggtagactcctgcagccaattgaaattcggtgcgcattgcaatcgatcgcactttttatccaatgattgtcgtatgcctacaatacccgttctggcctttctaacgttgcgtctgccttctggccacgttggttttggttttaagcggtgg

SEQ ID NO: 40514 - DNA, 1318 bp, DROSOPHILA
gcagggtggaaagcaaaagcgagatagcaaacccattgttgagaagccttccttgccagaagttagtcctctaacggaaaaccaatatcgtctgagtatgccacgctggcagcgccaaaagtatatcccaccgccaccggaacagtttccctatcgaccacaaatcatcggtcaaagtgctcctccacgtccggaacatggtagaccagttcaaaggccagtggttccgtgctgctttcagcacgtggatctcgagaacgagttttggtctaacttgcggtttcctgtgtcgcggaaagcactcacagcccgtcccagtaagaagatctatgaactggcccggccacgacaatatccacagaaatcccactgcccggtgcccagcagcaacgagggggaggtgcccagacttcggaaaatgaccccgcgggagtggcgacatcatctgcagcgactagagttcctagcaaaaccaaatcctcgggttttggccgatttacttgaagcttttggaacacacttgggcaaaataaagacttctgagccatcgatagccgccataaactccgctaatgaatttgttgagcaggaaacattgttcgtaaaacccaaggtgcaagggccgccgccctcttgggcggcatggtgcgaacgaaactcaaagcccgtgaaacgtgtacggcctcgtgagtcccgaaagttgaccccgtggcagaaaaatggtccgatgaccattagggattggaagcactttggtgcctgggctgctttccgggcagggcctaaaaatccacagctgcagagacctgcaaaacccttctgtgcggccaattacttgccatgtgccttgaaaaagagccaactggacgaggatgagttgcgggaaaggatgttgatgttggcaaagccccgaaagatcaccgagaagtataatacgcctgacctaccgccagcgtactccccggcgatctcttggggcaagccaccgcatcgcgatcccggtcgacccttcaaacctccttacgttcccgcctgttttccaaccgacgaactggaggcggatttctgggcccagctcagatttcctgtccggcaggcagccctcttcgcaaagataacgctccgcatccagtctctggccaaaccacgggtatattcacctactccgcactgcctcattaataaaaaagtgttgcatccgctggatgttcagccgccaccgcgaaagaagttcaccaagcggggctggcggttgcaccagatccgactgttgtacctgtccaagccggtttctagaaatgaaacgatatacttctaa

SEQ ID NO: 40515 - protein, 406 aa, DROSOPHILA
MPRWQRQKYIPPPPEQFPYRPQIIGQSAPPRPEHGRPVQRPVVPCCFQHVDLENEFWSNLRFPVSRKALTARPSKKIYELARPRQYPQKSHCPVPSSNEGEVPRLRKMTPREWRHHLQRLEFLAKPNPRVLADLLEAFGTHLGKIKTSEPSIAAINSANEFVEQETLFVKPKVQGPPPSWAAWCERNSKPVKRVRPRESRKLTPWQKNGPMTIRDWKHFGAWAAFRAGPKNPQLQRPAKPFCAANYLPCALKKSQLDEDELRERMLMLAKPRKITEKYNTPDLPPAYSPAISWGKPPHRDPGRPFKPPYVPACFPTDELEADFWAQLRFPVRQAALFAKITLRIQSLAKPRVYSPTPHCLINKKVLHPLDVQPPPRKKFTKRGWRLHQIRLLYLSKPVSRNETIYF

SEQ ID NO: 40516 - DNA, 2826 bp, DROSOPHILA
tattaaatctttttgtaataacactatttaaatgcacaaaaatgtttgcactacaacaaaaaaatatatttaagaataatagtatatcaagcacaatgatgtaaattaatattattatgcataacaatccgttaacattacttccttctgccgcccaacaaacttcagttcatattttcgatagtaagtattcctttcgctccagttgtatttatgattgcaataaatatgttcgcttttgtttgatttgctgctgcttgctggtgatatttgtatggtctgggccctcttcatattgccaattgacacgaaaggcccaaagaaataacaacaatggaattgcaccaagcaaaatatgacaaaaaaaaaaaaaaaaacgagagagacgggaagtaaaaaaataaaaaaaaataaaaatgcagcagagaatgaagctcagcagcagacggcgaataagaatccggcgagcataatcggatttcacaaatcattcattcaattatctaattgatttgactgatgatcatttgtgaaccttgatcctagctccctgggcccggtgccaaagtcaatgtgacgcatgtttgctacgcccgataagcgaagtgaaagaagagaatctcggctcgaaaggcctcacctttgactgtaatgcgccggccatgactaagtggctcttgggatctttggctccctggccaccgggctcttctcgtccttctcagattcgcaggcttagattacatttcgcttttgtcgctgttgttattgccggctactgtaagccataaaaagtcatataaattgcgattcttatctgcgtgaaattgttaatttttttacggatttgcaaatgttatttgcaagggtccagctgcagttagctgtttagttgggatttaagttagaggtaaaagcatatatcagtatggaagattcagtcttcttcagatatttgttttcattcaaaaaatattaattttgaaaatattaaattttgaaaacagattacatcaaacacaaactttagatcaaaaacattatgggcgctatatgacacgatattacatataaaaatactcgtattcgggccgggacacaggcttcgaaagatatagcaatctgatctggtggagacgccatccctggggagtaaacttcttcctccgtggcggtttgacattaagcacgtcatatatatgctccggatgatagcaatgcggtgggaactgaggcgtgatctttggtttcgacaggctaaggatgcgcggagttatcctggctttgagagcagccttgcggatgggaaagcgcagttcggcccaccatttgtcctcgatgtcggcattgaagaagcagcagggtttttgagggggcttaaagggtcgtcctttgtcatggagtggcggctgaccccagacaattattggggagtacggttggaccggatagatgtactgatgcttcggcgtcattttccgttccagtggcgtggccaacttggcgaccttctcctgaaattcgtccggatcgattgcgcgtggttttctggcgcatggcaagaacttgtcaacacagggtatgggctgtttgaccggcaccggtagttcctttggcatggctctggaggctgcccactcgtagaactccctccactgtgcctttttcatcggtccgggaatttgccatctggttagatagcgcctctccttgatgagccgacgttcgatcggcttggcattccgctcgcaccattccacccaactcggtggcggctttaccacgctgattacgctggccttggtctcttcttgtatcatactcatggtgaaccgattattgatttaaaatcacttaaaatttagcaaggggtctgactgtatctaatgcaacaaaacaaatttttgtgctccaatggcaacggttttaaataaaatagtacttctcagtcgtttgacttgtaaaatcatactgaagactaaaaaaacgcctacttatgcagcctttgaaaatgaaaccgcatcgtacataaccagtacaattaataaataccctcggttttataaaatatataaaaaacggtctaaataaaaatggcaggagattaagtgattaggatcttctaaatgataggagatttattgattgggttgagcttttcacttaaaaaaaaatagtttacatagattctttagttaagaaacacacttcaaacaaaatacaagggtcaaaaactttaataaattcattttgtgttggacaaatataaagagcagcttggaagcatcaaggattgttagatgttacattagaagtatatcgtttcatttctagaaaccggcttggacaggtacaacagtcggatctggtgcaaccgccagccccgcttggtgaacttctttcgcggtggcggctgaacatccagcggatgcaacacttttttattaatgaggcagtgcggagtaggtgaatatacccgtggtttggccagagactggatgcggagcgttatctttgcgaagagggctgcctgccggacaggaaatctgagctgggcccagaaatccgcctccagttcgtcggttggaaaacaggcgggaacgtaaggaggtttgaagggtcgaccgggatcgcgatgcggtggcttgccccaagagatcgccggggagtacgctggcggtaggtcaggcgtattatacttctcggtgatctttcggggctttgccaacatcaacatcctttcccgcaactcatcctcgtccagttggctctttttcaaggcacatggcaagtaattggccgcacagaagggttttgcaggtctct

SEQ ID NO: 40517 - DNA, 826 bp, DROSOPHILA
atgagtatgatacaagaagagaccaaggccagcgtaatcagcgtggtaaagccgccaccgagttgggtggaatggtgcgagcggaatgccaagccgatcgaacgtcggctcatcaaggagaggcgctatctaaccagatggcaaattcccggaccgatgaaaaaggcacagtggagggagttctacgagtgggcagcctccagagccatgccaaaggaactaccggtgccggtcaaacagcccataccctgtgttgacaagttcttgccatgcgccagaaaaccacgcgcaatcgatccggacgaatttcaggagaaggtcgccaagttggccacgccactggaacggaaaatgacgccgaagcatcagtacatctatccggtccaaccgtactccccaataattgtctggggtcagccgccactccatgacaaaggacgaccctttaagccccctcaaaaaccctgctgcttcttcaatgccgacatcgaggacaaatggtgggccgaactgcgctttcccatccgcaaggctgctctcaaagccaggataactccgcgcatccttagcctgtcgaaaccaaagatcacgcctcagttcccaccgcattgctatcatccggagcatatatatgacgtgcttaatgtcaaaccgccacggaggaagaagtttactccccagggatggcgtctccaccagatcagattgctatatctttcgaagcctgtgtcccggcccgaatacgagtatttttatatgtaatatcgtgtcatatagcgcccataatgtttttgatctaaagtttgtgtttgatgtaatctgtttt

SEQ ID NO: 40518 - protein, 253 aa, DROSOPHILA
MSMIQEETKASVISVVKPPPSWVEWCERNAKPIERRLIKERRYLTRWQIPGPMKKAQWREFYEWAASRAMPKELPVPVKQPIPCVDKFLPCARKPRAIDPDEFQEKVAKLATPLERKMTPKHQYIYPVQPYSPIIVWGQPPLHDKGRPFKPPQKPCCFFNADIEDKWWAELRFPIRKAALKARITPRILSLSKPKITPQFPPHCYHPEHIYDVLNVKPPRRKKFTPQGWRLHQIRLLYLSKPVSRPEYEYFYM

SEQ ID NO: 40519 - DNA, 3527 bp, DROSOPHILA
gttgtcgtcgtgttgattaaaatgttatggctaccaaatgcagacaagcaaatctattagcagctaataaaacaagcttgaaaagctaattttagctgtttccgtagtgattggaattgcttttcaatagattttcacccatttaaactaagtttactttccctgcttaactatcagatcataaagtttgcaagccatttataaaatgtaaaattattacacaagttgcatagtttttgacctatacgacttaatatttatattatatttcatattcatttacatagttcaaccgttgagttaataaacccattgcaatctgatctgatctgaatgcagtcaattaaatgtgataatccatttagcaacagcgagacattgctggttagcaaaccagtacacttcgtacacttacttttatgggctcgtatacttttattgtgatatgatatttcatttttcattaaaaacaatcttaattatggaaacaagatcaaaagcataagatattcggctgcttaaagccagtagcaactgtttaagaaatgcgctcgctaagaaaattctcagcactgttatgttttatatgtagtataatataattaaaagtaaagcaagcggcatgagacccgaagacccactgtgccgtggcagcattggagtcgtgatatgtcagcccgagtggcgaacgggaaaggcacaggcggcaaatatgtgtatatgtttactcggatcaagaacgtcgactcgagttcgattcgaggcttgtggttttgtttttcgattttagcctttaattgtaaataagctggcaaaaatacaaaaacagaaagacaaatcacgccgggggtctgcttgccatcgacccaatgagtctaaaaggtgataacgtcgactgcatccagtggctgacgcagttgattgggtgcgaatgtgtgtgtgtgtgtattttacaaaatcaaattcagtgattaaaacagggcaacataatgggctagatctagatgttcagtttgacgtcttgaacgttcttcagggcttcggagtagcgtgccagcacgggttccacttcctccttgacgaactcgcccacttggtcgctggcacgtccagtaaaggttttggcatccagtatggtgtccagttgctccaggatgggcgaaaagtagggatcctttcgcactcgaaccacgaggtcgttgtccttgccatgctgcttcacctgggctccggcctcctgggacagcacgcgaatcttctcgtggcacacctggcgatctcctcccgccttcaccatggccatgattatgttctctgtggacatgaacggcagctcttgggaaatgtgccgttcaatcacctttgggtaaacgaccagtccctgcgagatgttcagcagagtaagcagggcggcatctgcagccaggaaggcctcggatagggtcaacctcctgttggcagagtcatccagagtgcgttccagccactgagtggcatgtgtattagcagcactgctgaacaaggtgatgaggtgacgggccagggcgcaacaacgctccgagcgcatagggttcctcttgtacggcatggccgaggagccaatctgagtgctctcgaagggctcctccagctctttgcgagaagcgaggatgcgcagatcggagcacatcttgtggatggtggtgccgagactggcaagcgcggccacgatctccacatccacctttcgggagtatgtttgaccggttaccgcataggccttcttgaagccagccagttcggtgaccaactgatccagctgcttcaccttctcgccatccccattgaaaagttgcaggaacgaggcctgggtaccagtagttcccttgactccacggaagcgcaggtcctctaaacagcgggacagcgcgcgttcgtccatgatcagatcctggatccacaggcacgcccgcttgccaaccgtggtcaactgcgcaggctggagatgggtgaatcccaacgtgggctgatccttgtagctctgggcaaactggcttagacgagctatcacgctggcgactcgtggaaggagcagtttaagagcgtccctcagtacaatcagatcagtgttgtcgcccacatagcacgaggttgctcccaaatggatcaccggcgcagcagagggacactgtttggcaaagacatggacgtgggccattacgtcgtggcgcgtaagtcgctcctcggcggcggccgcctcaaagtcgatgttgctgatctggagctccatctcggcaatctgggcatcgctgatctctagtcccagcctgctctccgccttcgccagccacacccacaaccggcgccaggtggagaacttgttctggtcactgaagaggaactgcatctctttgctggcgtaccgggtgctcagcggcgacttgtagccctcgtagttgctagccatttttgggtatactatgtaggagattatggactataaatcacaaaaacactgggccaatagtgcgtaatcacaagggaagagtcggaaaacaactgttgcttaattgagcgatgttctcacatgtggcggggcagtgtgaccgccttgcgatagggcaataagaaataccatacgcacacactaatataccaagttctaagtggaccgttatatttatattcaaacagcggaaccggaaatgagctaattcgaatttattcaatggtctatatatattatatttagcccaggtttaaggttgttagggcataaatataatagtaatcttttttcatagtatgaatttctaggttaaatttaaaagattttcgaaaaaaatttccaagcgatgtaaccgtgccatcatttacaattaaatattattatttgcgatctctttagctgtaagctttatgattttagttggcggaaagaacacacattctataaagtttatgtggtagccacaacataggcttttaagtaacagttaaatccaaaaccaaaagccaataaaaatctgcttagtattgactcacgtttattgtgctatacgattaaatgacaacgtcataaaaactagaaataaagtcaccatctataaccagatagcaataaatcaaaaacacaacttttggtacgcacaaatgtaaaataaaaagcttttaaatacgaactagttttaaacatagatatcgcggtctgtagactgaaatgcaaaaatcgaactgaccataagataaaaatcagatctcaaagtttgtcaacgtagtcatattaatggacaggccgtaaaaagtaattaaaatcgaaaaatgtcaagcactttgtggacaattttaatttgcattagccagagccaaaacatacacaaaatgactaaccaaaaatagtgactacttggaacagaactggttcgacgaaatcggtgcagtacagttaagaatcaattagtgcatcgcatctaaggcgattgcaaattgcatttggcacgtgtgaaaatatccaaatagcttccaaattcagaagacagaaaaattcg

SEQ ID NO: 40520 - DNA, 1527 bp, DROSOPHILA
ctcttcccttgtgattacgcactattggcccagtgtttttgtgatttatagtccataatctcctacatagtatacccaaaaatggctagcaactacgagggctacaagtcgccgctgagcacccggtacgccagcaaagagatgcagttcctcttcagtgaccagaacaagttctccacctggcgccggttgtgggtgtggctggcgaaggcggagagcaggctgggactagagatcagcgatgcccagattgccgagatggagctccagatcagcaacatcgactttgaggcggccgccgccgaggagcgacttacgcgccacgacgtaatggcccacgtccatgtctttgccaaacagtgtccctctgctgcgccggtgatccatttgggagcaacctcgtgctatgtgggcgacaacactgatctgattgtactgagggacgctcttaaactgctccttccacgagtcgccagcgtgatagctcgtctaagccagtttgcccagagctacaaggatcagcccacgttgggattcacccatctccagcctgcgcagttgaccacggttggcaagcgggcgtgcctgtggatccaggatctgatcatggacgaacgcgcgctgtcccgctgtttagaggacctgcgcttccgtggagtcaagggaactactggtacccaggcctcgttcctgcaacttttcaatggggatggcgagaaggtgaagcagctggatcagttggtcaccgaactggctggcttcaagaaggcctatgcggtaaccggtcaaacatactcccgaaaggtggatgtggagatcgtggccgcgcttgccagtctcggcaccaccatccacaagatgtgctccgatctgcgcatcctcgcttctcgcaaagagctggaggagcccttcgagagcactcagattggctcctcggccatgccgtacaagaggaaccctatgcgctcggagcgttgttgcgccctggcccgtcacctcatcaccttgttcagcagtgctgctaatacacatgccactcagtggctggaacgcactctggatgactctgccaacaggaggttgaccctatccgaggccttcctggctgcagatgccgccctgcttactctgctgaacatctcgcagggactggtcgtttacccaaaggtgattgaacggcacatttcccaagagctgccgttcatgtccacagagaacataatcatggccatggtgaaggcgggaggagatcgccaggtgtgccacgagaagattcgcgtgctgtcccaggaggccggagcccaggtgaagcagcatggcaaggacaacgacctcgtggttcgagtgcgaaaggatccctacttttcgcccatcctggagcaactggacaccatactggatgccaaaacctttactggacgtgccagcgaccaagtgggcgagttcgtcaaggaggaagtggaacccgtgctggcacgctactccgaagccctgaagaacgttcaagacgtcaaactgaacatctag

SEQ ID NO: 40521 - protein, 481 aa, DROSOPHILA
MASNYEGYKSPLSTRYASKEMQFLFSDQNKFSTWRRLWVWLAKAESRLGLEISDAQIAEMELQISNIDFEAAAAEERLTRHDVMAHVHVFAKQCPSAAPVIHLGATSCYVGDNTDLIVLRDALKLLLPRVASVIARLSQFAQSYKDQPTLGFTHLQPAQLTTVGKRACLWIQDLIMDERALSRCLEDLRFRGVKGTTGTQASFLQLFNGDGEKVKQLDQLVTELAGFKKAYAVTGQTYSRKVDVEIVAALASLGTTIHKMCSDLRILASRKELEEPFESTQIGSSAMPYKRNPMRSERCCALARHLITLFSSAANTHATQWLERTLDDSANRRLTLSEAFLAADAALLTLLNISQGLVVYPKVIERHISQELPFMSTENIIMAMVKAGGDRQVCHEKIRVLSQEAGAQVKQHGKDNDLVVRVRKDPYFSPILEQLDTILDAKTFTGRASDQVGEFVKEEVEPVLARYSEALKNVQDVKLNI

SEQ ID NO: 40522 - DNA, 4183 bp, DROSOPHILA
tcgatggttagatactcttagataaatacagttcaaatgattagcattaaaacgaatttgacaaacgtaagtgatatgcgaatgcaacctgtatattacagtatatacaataattatatcattttcttgtattataatcctataatgacgaattctaaatggatactatttatgcctccttttaatttcacccattcctcgtataaaagtatttattctataatttcaatgctgtttaaattataacaaaagcacgtcaagcaggaaaagcttgattttatctgtgttaatttttgtatttttgtctgcgcagaagcgtgtcctgtttagtttataagactgttgtcgtaatataagtccgcggttattaaactgagatatgtatacttttaatacagatcgtaaactgttggctggagaaaccttttgtagcgggaatcacaaggcgtaactaattgccgaatgacaatgatttcggcgcccttatgagcttggtcttctcacagagttttcccattttccttaatttaattaccagttttatttggctgcgtatgcttgaatgttgcgctaatttcgacgcgtcggcggtgttgattacaactaaaatttgtttgacttggaacaaatttttattacacctctcatttgatggttttgtttccgcggtctgcaattattttgatggctgatgcgtgaatacccttgtaccatagtcttggccaacgaacttgacgcgatcacaagtcagattaacgtgtcgagtgtcaacggaagcgctccaacagttttacaagtttattaatttatgaatgcaacagtcattattttttgtactaattattaaaacgatagaatgcaagaggtgccaaatgaaaaaaaaaaagaattcgtttggtgaccttttattagagctttataccgaatttcaggatgtttgcacttgcagtctttttaaagaatgaatccttggaatgaatattatacaatattaataattacattgatttgttttattatcttttgacattgaaatacaaatttaactgttttgggtaactactctggaccgacggcaccatgagatcccgataaaggactgggcgcccgactggtagccgggctgctgctgggcggcgtgtcatctggacttcgccccagaggcaccagcaatggacccatgggtcggcgggcacgtggagctccgcgggttccccgactgattggtgtggcggttttggagcgaggtcgtcctggtccgcgtttgcaggacactccaggcgattgtccggaggggcttgttctgtactctgcaaaaagtaaaatatgtaagttatttattattattattttaataataattaaactatatttaagcggaatgaaggaatagataatatatatcttttaaagctgaatgttagaattgcagttttatgtatttatgtaattttccctatactctatgatcgcaataccatttataattaaacaaattaaaggtttagcagtacaaaagttgcatctgcccttgaaaactgcgcaaactgtacgttagctcctatcagattccattagaaaaatgaaaaacgagcagatcgagctgaacaaaggataagcaactttcttgctaattccactggcattttccaccgcacgtttcatcgcatcctggcatttacttgcttgccccggcaatgcatgcaattgtggtttttttaattgtcgaaagtcccccgaaacattctgtcccttcgcattctacagccaagttaaatttatgcaacgttgcgtatttgccattgcgattatgtctccattttgggccaacagctacggaacgtgttcctgtcacgtggaatccctctccactcgtctggtgtctgggactttaagcggatttattcaattatcatttgtcgtgcgcctgaaaatccaactgaaaattgccacattgtagaaggatttatctcctcttaaacgaatttgtttgactataaattggggaaatttaccatttcacagatgcgaattactttgctgagttatgaatcaaattggcaacaatctgtgagaaccgtaacgtattcttgtaaatgggtaaggaattaatactcaaataagttgtattttccacaagtttacttgataagccagaaagtaagaagtggaaaagataatgcagccagatgtgaatctctgaacaaatatttggcttgacttgcaatcaactgaagggggggaactttcaagaatgttttatctggatttaggtatttacttaaagggggcaatattgaatatgttatgtaatgtacaaacgcctggcgctgcgttaaaattgtcacgtaccacaaagtggaggtacgtctgcgggctgtaatcgagacatatccgaaaaaatggaataaaacgaaagggggacccaccggtagatcaaccacaaagcaatatggagataaaaccaccacagggggaggggcctgagtacccgaaaatacttgttccggaaaaggcagcgataaacgtgattatgacaagcgattagcgacaagtgacactctattcaactgagggggaaatccttgcggaggggtgacttcttgaggagtgagagttgcgtgacggaaggaatgttactttcactgaaaaaattagttcgcatcttagttgatttaaaaacttatctcaatttatactgctgtatggtaaatattgtattaattactttagtaactaagcttacgaacatgaaatttttgaccatatatttactgcaagtatataatttacagattaccaaagctagcattccttcgctcagaacacaatttttgtttttcaaattatattctcctgaagtttctcctttagctcatattttttgctaggtgtacttaccttcttcgtggagcgggacgccggcattgtcgccaccgccgcttacttcctgctgcggtaggggtgaagacgttcccgctgccgctcctgttcccgccgccgctgcctgagacgccgtggccggtaccgctggcgtcgccgcttgcgtcggcgtcagcacgcgcgggatcgagccgtgtccgccgccacgccgcgtgctgcccctcggacgtccgcgtcttgtgccgcgcgggtggtgccgtcgccgcatcggcgaaatgccgctcaggtcatcgaggaagtctgcaaggaggatggggaaaaatttataggtgactcggtattgattaattgcggttggacgaaatccacaagcatctggcccaatatatatgtataacgaaaaacaaacattaaaatgggagtttcgttacatttaccacaattttatggctcgcaacccaaatgcctaattaatggggatggcctggggtactttgacggctgcttgacggggataccttcttaggtttcctggccataattctttgccagcacctaactatcgatatgtgtgccatgaccatatttgcgcattcaacgtgttactttttatgccccaaagacaatggcggaatggtggcagcaacaaacaagttcaacttttatcgtggccaaggctccaccgaaatgccaaaggaaaaatatgcggagtgccatatttccatattataattcttaacccgccagtacacgtaacagaaaaccacaatatgctcaataccacaaaatatcaatttaagatttaaaatttataaagcaactaaaaggatagaacgattttagaacaagtagttgtgcccaacttattttacttaaaaaggatttgtctagggttaaacttaaatatttcattggttatatgccagcgacttagacggctaactgtaagttgtataaataaaacaaagacaacaaataaataaacaacgacgacaacgacgacaggctcaaaaaagttgcgatcagcgggcagacaacaatgttgttgttccactggttctatttccccagttgtctgttgttcgcaacgagtgtatctgtatcttgtctggtgtttggcgacaatacctggcgctccgctatttcggtatgcaacgcacacaagtggcggcagcatcatcatagccgatccgatgatcatcactccatgatcgacattattgtctagtcggtgcagtgatcatcgccatcgacagtcgccagaggaattgtctacaagattgtggctatgtcccccagc

SEQ ID NO: 40523 - DNA, 592 bp, DROSOPHILA
acttcctcgatgacctgagcggcatttcgccgatgcggcgacggcaccacccgcgcggcacaagacgcggacgtccgaggggcagcacgcggcgtggcggcggacacggctcgatcccgcgcgtgctgacgccgacgcaagcggcgacgccagcggtaccggccacggcgtctcaggcagcggcggcgggaacaggagcggcagcgggaacgtcttcacccctaccgcagcaggaagtaagcggcggtggcgacaatgccggcgtcccgctccacgaagaagagtacagaacaagcccctccggacaatcgcctggagtgtcctgcaaacgcggaccaggacgacctcgctccaaaaccgccacaccaatcagtcggggaacccgcggagctccacgtgcccgccgacccatgggtccattgctggtgcctctggggcgaagtccagatgacacgccgcccagcagcagcccggctaccagtcgggcgcccagtcctttatcgggatctcatggtgccgtcggtccagagtagttacccaaaacagttaaatttgtatttcaatgtcaaaagataataaaacaaatcaatgt

SEQ ID NO: 40524 - protein, 166 aa, DROSOPHILA
MRRRHHPRGTRRGRPRGSTRRGGGHGSIPRVLTPTQAATPAVPATASQAAAAGTGAAAGTSSPLPQQEVSGGGDNAGVPLHEEEYRTSPSGQSPGVSCKRGPGRPRSKTATPISRGTRGAPRARRPMGPLLVPLGRSPDDTPPSSSPATSRAPSPLSGSHGAVGPE

SEQ ID NO: 40525 - DNA, 5311 bp, DROSOPHILA
agtatttaatgcgctttacttatggcagccggcaacaacagagtgacggctaaaaatagcaaaagataaacacattggaaacacatagacgatgatcatcactcatccaaaaccaacagaaaataaatcgtggaaaaatcagtctgctgaggggcttaagaacccgaaaaaaagctgctaaaggaaaagggtggaaaattaattaaagaacgtgaaaatgcaacaggctgaccctcagttcaagttattaaacattctatggttcatgttacattttttttttactttttttgggaatacttttaagcaggcattacaaattacacaactccaaaaagaactggtttacctttcctcaaccgaagccaaagaaaaaacgatctacctgccgctgttaaccatcttttgtgagctgcgggcaggtagaatgcgggctcgtcgcccttctctccttcttctcgttattcctggcctgccaaggacctcctgctgttttccctggtggttggaaattgttttctcggcgcaacaggatttgcatttttccctacttctacgctgctctacaaattgagtctggagttcaaatgaagacataaaaaaatcattgacctacatgggaccaacccaaatgtggcatattaagttccagaaataaacgaaatactcactaaaaggcttggggtacttaaagcatacatttagtcaagaaagcgctaaatacattcgctaaacagatgttagtacccaaaatttatttgtgcaacttcgtttttagtttggacatggttaaaagtttgtgctcacccgacggatgattatagaacttgtttttaacttttgtcataatcataacatgtttaatcataaaattaaatgcataaataatagaaaactaatgttttaaaaggtatacagtatgcgcctataaccccctatttttatatgatgcttatttttcggcgctttttagtgaatttattttcattaaagaacttacctttccgccaacttttagttcgtagcccattcccagaggcgttttcagttgcacggggcacacgaatccaatgtttcggtgcggactttctacgcccgtctggtgtttacgggtagtgaccttagccacactccttgtgggcgtggccgccgtggaggccgatgatgtggtattctccgccacgcacaaatcctcgcctccatggacgggaaatttggagcactccagattttccggccagttaaagttgtaggttttcattaacttttcacatacccgcgccgattcgcacagagatcgacaaggcggaatgggtcgctccaaaattgtgcagaccggaacgtacagggaacagaggaacaactggaggtcatcactgcagccgatcttcacgagcggagcaaactgatggacctccagacccgcctcctcctgcttggtatggccaataagatttggcataatggtcatgttatatggtatattcttgcagatcgatatggtgatgggttcacagcgattgtgatgtggcagtccatctagttcggtcccagaactggccattaatcccccgccgctgcgataatacggactcgcatcgagggggctctgatcgtagcgctggaccccctgtatcagggtgggtaaaataaacaggatttgacgccacattttggaatttttcgatatcgctgtcaaataacttttggggctttttctcgatctctttaaacactttaaaacacacacatgttgctcatctacttgcactcacttatacaccattgaatacttatttgatttattttccctgtttaaaaacttcactcccacgaaacacttaacaccttttaaatatttgccggcggcaaatatttagtttggccttataagcaaataataaatatttctctctattctcttatttgcgtttgcttttgctctttattttgtttagactttttttgttattttccgacttcaatttggtttaaccgtttgaattcgactttgctatttgttgttggcaaaatattattgtgtcaaaatttaatttttgggggtctttaggacttagtagcgttggcttttatctggcacagtaccgggctttacttttctagcagccacatttttatcttgctgtatgcacatacataagtaccgttagctgtatatcatttatgcctcccccgctttttgaatttccttatttctttcactttttcgaaaaccgcgcaaaaaaataactgaacaaacacggagtcgaattcaactttttcgcacgggacttacgttaaaagacgaaaacggagccggagttcgagtcgaaatcaatccgcgagcacatccgcatggtagggcatacgctgacaaactgttcatatttcagtctttaacaataaaataaagttttatttttgcattttccgtttgtgtgtttgccattgaatgcttcaatgatgttctgcatgtttttatttgttttatacacttataattgttcgcttgccgctgggcattcgctatgttacaccgactatcgataattgctataattaatatgcatttccatcagcttaaatgctacacaaatctggcttggacataatttcacgtattactagtgccaatttaaattgaggactcaattaaatgcgcagaaaacaaatgctcaacagttggcaaacatcgcatcctttcttcctttcggtgatttctcatgtgtctacaaatatttaaatggcagtttcaactcttatttagttggggtgaagggaaaaatttccataaagtggcaacaaaattttgcgtgttttgtttgtttgttcgcttaagtgctatgactacaacgtcatttaaaaattgaattaaaaattattccattacgcgtttagaattaattagttcaacaaatatacaattacagttaaaattacaaatacagttagagttatagttaaaattataataatcgtatttgcagtaagtttagcacatggaggacatttattgctacataatacatttatatagtttatggtttccttttttgtttatacatacatagatgaagcatagatgtgagcaccaacctgcttgggtatatgtacggattgtgtgctctatatgcatatgcattattatgtctgggttgaaaataatttcttctgtgactaatgaatgaaattttaagccttggcttataaaatctactgcagagcagccggggctcacatcctttgaatgcctgacgttcatatcgttatcgtaatactctatttatagctacattctcattaattgtagggcacatttaaagctttcaaaaaatcggaacctaacttaaaacttgcgtcaaaaatgaaatatcataggtgctacaggttcgtataccgcgatagcaatgaaatcctacaaaatacaactcgacttagagctagagtctcaacttatacgcatagttttggttcaacaagcttgctttcgtatcaactaatgtacttttaattcaaacaatagcctagggtcaacttttgattttctcttttcatggattttcggggacatatgtagatgatgaactttatacaaagccactaagaactacgactgcgtgttattttttttttttttttctgggcatagggaacgtctatgtgctaaactctaagtaactttcgttagccgcctccggatcgggagtaaggggcgtggacttggccccgcccgccggacccgtctcatactagacgtacgcctgcgcccgggtccggggctccttgccctgcaacctctccacgaagttccgccagctgaccatcgtcttgctggaatacagccaaacgctggaagtgacccccaccagcatggagcaaaggtacttgaccataaagatctgaaagatggggcgggcttctggagatcccggcgccctggctgccgggcacggaattgagaagggcttgcagatatccctgtgccattggatcatccactcgtcaaagttgtagtactcgtagaacaagcagcccagtaatcccacggcgggcagaatgaaaagtccagagaagaaacctattcgcaacatcaggcgctccagtttgtctgtcctctttccgtccgttttcataactgtccggatccggaaaagcgaaataaatccggccagcaggaatagtgctccgatcgagagataaatgcagagtggaaggatcaggaacgcgcccagggagtgcgtgtccagctggcccacgaaacaaacgccagaaaggatgtcacctgaaagttgaataaaacgaaaaaatttactatagcatttgatgtatctaaataaaagtatcgtattttaaggtattgtattaaaaattattgaaagttataagtcaatatgaattagtcacttatatagctttcaaatccttttttacctttgcatattttcaaatgttgtaagacaaagtgataattcattatttattaagacaacatgtaaactcacttattgggacacttccaacgaaacccattgaccttttaagctaaacattaattaatgtcaacaattgcgagggatatgagttgaaaatacccgtttattgccaaagggggaaaagcgggagataaacaatgtttaattttaccatttcatgtacctctttcggggtaaatatttactcaacgattaccccaaacagcagcgtctgtggggccactccaccccttttttttagttcaaagtcaatgcgccgcttgtttaaacattttacgagcggttaggttgcaccacctcttgccaccaaccgatctcccccgctcattagcgttatttataaacatgttacaatatacccaactcacacctgcccccccgattcccgtaccacaaattaatccatcattcgttaggcgtgccatatttccgctcataaattatcgattagcccctcgtcgaagcttctgccttttcgctctttttctccttataggtgacatgttaatttcggtttccctgtgaaaactggtcgcgcctttccacgctgcggccgctgggaaatttgccacgcttcgttgagttggaaatgctttcaattaatgcgtctcgcactcttgttttttatgtattagtaatcaacatttttttttgatatgtttcatatagacaatttttaactaattaaaaacccttcaaccagttgcaaccaatttttacatttgtggtttttaaattttttgtttaacttttctaaggggattccgtgccaaggaatcgcttcccaagccccaaacattataatcccgatttaatgg

SEQ ID NO: 40526 - DNA, 3847 bp, DROSOPHILA
cagtttgtcagcgtatgccctaccatgcggatgtgctcgcggattgatttcgactcgaactccggctccgttttcgtcttttaacgtaagtcccgtgcgaaaaagttgaattcgactccgtgtttgttcagttatttttttgcgcggttttcgaaaaagtgaaagaaataaggaaattcaaaaagcgggggaggcataaatgatatacagctaacggtacttatgtatgtgcatacagcaagataaaaatgtggctgctagaaaagtaaagcccggtactgtgccagataaaagccaacgctactaagtcctaaagacccccaaaaattaaattttgacacaataatattttgccaacaacaaatagcaaagtcgaattcaaacggttaaaccaaattgaagtcggaaaataacaaaaaaagtctaaacaaaataaagagcaaaagcaaacgcaaataagagaatagagagaaatatttattatttgcttataaggccaaactaaatatttgccgccggcaaatatttaaaaggtgttaagtgtttcgtgggagtgaagtttttaaacagggaaaataaatcaaataagtattcaatggtgtataagtgagtgcaagtagatgagcaacatgtgtgtgttttaaagtgtttaaagagatcgagaaaaagccccaaaagttatttgacagcgatatcgaaaaattccaaaatgtggcgtcaaatcctgtttattttacccaccctgatacagggggtccagcgctacgatcagagccccctcgatgcgagtccgtattatcgcagcggcgggggattaatggccagttctgggaccgaactagatggactgccacatcacaatcgctgtgaacccatcaccatatcgatctgcaagaatataccatataacatgaccattatgccaaatcttattggccataccaagcaggaggaggcgggtctggaggtccatcagtttgctccgctcgtgaagatcggctgcagtgatgacctccagttgttcctctgttccctgtacgttccggtctgcacaattttggagcgacccattccgccttgtcgatctctgtgcgaatcggcgcgggtatgtgaaaagttaatgaaaacctacaactttaactggccggaaaatctggagtgctccaaatttcccgtccatggaggcgaggatttgtgcgtggcggagaataccacatcatcggcctccacggcggccacgcccacaaggagtgtggctaaggtcactacccgtaaacaccagacgggcgtagaaagtccgcaccgaaacattggattcgtgtgccccgtgcaactgaaaacgcctctgggaatgggctacgaactaaaagttggcggaaagcaggatctgcatgactgtggagccccatgtcatgccatgttcttcccggagagagaaaggactgtgcttcgatactgggttggatcctgggcagcggtctgtgtagccagctgcttgtttacggtgctcaccttcttgattgactcgtcgcgttttcgctacccggagagggccattgtcttcttggccgtttgctacttggtagttggatgtgcctacgtggcgggactgggagcgggcgactctgtgtcgtgccgcgaaccatttccgccgcccgtcaaactcggccgcctgcagatgatgtccaccatcacccagggccaccgacaaaccacgtcctgcacggttttattcatggcactctacttctgctgcatgcggccttcgcgtggtggtcgtgtctggcattcgcctggtttttggccgctggcctcaaatggggccacgaggcgattgagaacaagtcgcacttattccacctggttgcctgggcggtgcccgcccttcagaccatctccgttctggccctggctaaataaattttttcgttttattcaactttcaggtgacatcctttctggcgtttgtttcgtgggccagctggacacgcactccctgggcgcgttcctgatccttccactctgcatttatctctcgatcggagcactattcctgctggccggatttatttcgcttttccggatccggacagttatgaaaacggacggaaagaggacagacaaactggagcgcctgatgttgcgaataggtttcttctctggacttttcattctgcccgccgtgggattactgggctgcttgttctacgagtactacaactttgacgagtggatgatccaatggcacagggatatctgcaagcccttctcaattccgtgcccggcagccagggcgccgggatctccagaagcccgccccatctttcagatctttatggtcaagtacctttgctccatgctggtgggggtcacttccagcgtttggctgtattccagcaagacgatggtcagctggcggaacttcgtggagaggttgcagggcaaggagccccggacccgggcgcaggcgtacgtctagtatgagacgggtccggcgggcggggccaagtccacgccccttactcccgatccggaggcggctaacgaaagttacttagagtttagcacatagacgttccctatgcccagaaaaaaaaaaaaaaaataacacgcagtcgtagttcttagtggctttgtataaagttcatcatctacatatgtccccgaaaatccatgaaaagagaaaatcaaaagttgaccctaggctattgtttgaattaaaagtacattagttgatacgaaagcaagcttgttgaaccaaaactatgcgtataagttgagactctagctctaagtcgagttgtattttgtaggatttcattgctatcgcggtatacgaacctgtagcacctatgatatttcatttttgacgcaagttttaagttaggttccgattttttgaaagctttaaatgtgccctacaattaatgagaatgtagctataaatagagtattacgataacgatatgaacgtcaggcattcaaaggatgtgagccccggctgctctgcagtagattttataagccaaggcttaaaatttcattcattagtcacagaagaaattattttcaacccagacataataatgcatatgcatatagagcacacaatccgtacatatacccaagcaggttggtgctcacatctatgcttcatctatgtatgtataaacaaaaaaggaaaccataaactatataaatgtattatgtagcaataaatgtcctccatgtgctaaacttactgcaaatacgattattataattttaactataactctaactgtatttgtaattttaactgtaattgtatatttgttgaactaattaattctaaacgcgtaatggaataatttttaattcaatttttaaatgacgttgtagtcatagcacttaagcgaacaaacaaacaaaacacgcaaaattttgttgccactttatggaaatttttcccttcaccccaactaaataagagttgaaactgccatttaaatatttgtagacacatgagaaatcaccgaaaggaagaaaggatgcgatgtttgccaactgttgagcatttgttttctgcgcatttaattgagtcctcaatttaaattggcactagtaatacgtgaaattatgtccaagccagatttgtgtagcatttaagctgatggaaatgcatattaattatagcaattatcgatagtcggtgtaacatagcgaatgcccagcggcaagcgaacaattataagtgtataaaacaaataaaaacatgcagaacatcattgaagcattcaatggcaaacacacaaacggaaaatgcaaaaataaaactttattttattgttaaagactgaaatatgaa

SEQ ID NO: 40527 - protein, 589 aa, DROSOPHILA
MWRQILFILPTLIQGVQRYDQSPLDASPYYRSGGGLMASSGTELDGLPHHNRCEPITISICKNIPYNMTIMPNLIGHTKQEEAGLEVHQFAPLVKIGCSDDLQLFLCSLYVPVCTILERPIPPCRSLCESARVCEKLMKTYNFNWPENLECSKFPVHGGEDLCVAENTTSSASTAATPTRSVAKVTTRKHQTGVESPHRNIGFVCPVQLKTPLGMGYELKVGGKQDLHDCGAPCHAMFFPERERTVLRYWVGSWAAVCVASCLFTVLTFLIDSSRFRYPERAIVFLAVCYLVVGCAYVAGLGAGDSVSCREPFPPPVKLGRLQMMSTITQGHRQTTSCTVLFMALYFCCMRPSRGGRVWHSPGFWPLASNGATRRLRTSRTYSTWLPGRCPPFRPSPFWPWLNKFFRFIQLSGDILSGVCFVGQLDTHSLGAFLILPLCIYLSIGALFLLAGFISLFRIRTVMKTDGKRTDKLERLMLRIGFFSGLFILPAVGLLGCLFYEYYNFDEWMIQWHRDICKPFSIPCPAARAPGSPEARPIFQIFMVKYLCSMLVGVTSSVWLYSSKTMVSWRNFVERLQGKEPRTRAQAYV

SEQ ID NO: 40528 - DNA, 4675 bp, DROSOPHILA
tgactacgtggtggcctctgatgattgtagcttcgagactaactatgccaaattgggtcagctgcccgagggctatgctctgtggcatggtcaccaaagagtttccagtgaagtggtaaatattcagtcttttataaagcttatctacagctcatcccatgtatcgttcagcactcgcgtttgtttcttatgggtgaaagactgttcgcaacggaacttttggaatcgaatagtttcgttgacaagatctgcaaggccagaaatgtcaacgaaatggctctggccaaagccaaacagatatccactagctctgcggaggtaaagcgtaacatctagtgttattattagttaacttatattgaaaatcccacagatgtatcgtacactaaagaaactcaaccactccgccgtcaatgtcacgaaattcccgcgtctggatgaggaactaaaggttataggagagcaatgggttactgccgattgcttagccaatttcaaacgctatcttaacgacgttgatttttagagcattgatttatagttactgtataccatttgggaatggtagacattcatccatacaaaccatataaagattaattcatacatttagttgagtccttttaggagttttattctggaccatgagactatcgccctaagaatttttttactcctaccccattgtaaagtacgaacgctgtgtaaattgtaagaaattcggaggcaggagttatatcctgttctattaggattttaaaggtaactcgattagttgaacgtgctgggattggaaagtttgcaaattaaattatcgcttacacgttttaaattcgaaattttattttccgtcatccgaaattcccaaatagttcacttttcaatcaaacaatggagtttaagatcccatgcaatatatcttgtgttatatgaaaaaaatgttaagcctcataataaataaaataagatgaacagctcccataaacggaacttatcaattgaaatctatttgtcgactaatttattatgggaggctagaaaaggtttttaatgtacaatgtaatgcacgcaactagtttaaactactatttatgatcgacagcacgcttctgctggctaaatgctctataactcaactcagttcctgatcgccatctgaatgcccatctagttgttcttgtggtcctcgaagtaggaaggtagctctgcttggaggcgcaacaaacggacgtaggtcagcagtttccattcgctcagcggctgatcctcgggatgcacgaaggtggacatgtatgtgactagctcctgagatccgtcctggtcgagatctgcgacaagcatcgagtggtcctggttgttcagatccggttggcacaccacctccttgcggtcgtgacggcaaaactggacgatgttgcttcgcgaggtgttctcaatgtgggtatcggcccccacgaaaaccactagcagcacggtttctgtaatcatgttcattttgtagcttccgccgggagagattccactcgatttggtcaggttcatagttgaagatggcagtccgaatgattccctcttctgcttcacatgctcgaagaaatcgaactcctggtgagccggttgaaactcttgatctttcgcctccgtgcttcttcttagacgttggtgctgctgttgtttctttgcctgagcctgagacttttctttatccttgatggcattcatgttcttggtgtgattgttgctgccactcttctgcacattgttgctgttactgctggcggaagtctgtttggaaggcttagccaagccatgccacttccagaacttcatcacaaagccggacatttgcgacttggtattcttgaagtgccattcggcgggcttcatcccgtacattctgctcgtgatgaagttttccaccacatggggtttgccatcgcggacttcactgagaacaaaggtaacattgcaatcctccggacagcgtcctcggttctccaccacgagttcccgtccacttaaagaatatatgttcctctgggcatccagttcccgccgctggccatggttcctatgctgggagatctttgaggtgcctagtcgttggcttacaatagatttgttggtgatcagggcatacagctcggccagactcttggaacgctgctgctctgtgtcattgactcgctgacaggtgaagctcacgttgcccgcctcgagcttcaagttgctgagagtgtcgcagtcgtgaatggtgaagccatcaccaataggtgctcctcttctgcccgacagcatgcgcagcacattgcgagcctctagtttttccggagattcatgtttgagctgggcaagcgatttagtgcgctgtaccagtgacaaactagtcacgagcaggaggtccagcactccatctgcatccagatcaggcaggataactgggaagtcataggcatcaacttttcgggctgatcgctccttatgccaccagatccattcaccagagacgggatgaatggctccaagttcgccatactcatccagtaccaagcaagctggtttcccattgccatctatgtctatgagggtgcagtccagggccacaggctcatcaaccatctccacaaaccaagccacagctcccgaggagccaatcaaacagatgatgccattacgccgctcgttacctggtcggaattccgggaaaaaggcatccccgcggtacataaatatcaggttgttctcccaggctcttagaccaccgaccacattgattcctcccttaagttccgcctttgtgtaattattgaaccagttgtgggtctttatccggtctccgacggctggacaggatccagtgccatcaggattaccgcagggcaccagccatacaaaggatacgacggcgaggaagcacaggagcaggctgcctatgaaacagcatttccttgccggtgacatgggggttcttttggacaaatcctcgccggtctgattatggtcccccaagatggctacattgtctgcattcgcatcgaaatcactgttgaagtgggacaactccgatcccactccaccattatcgctcaacatgacggaacggaaagtattctgcatattggtagcgtagctactgccctccagttggaatttctgggtactcccggaaggttttcgagtcacaatcctggtggccgtgggagatgctctcgtatgtggtgatttcagggctagagtgttcggcgggatgcgtatcctttgggcttggagctgctccggcggactgggctgatgagcttgcttaagtttctgttgcaatttttgtcgatgattggcggcgttgtggatctcaatttcctcgtcggattcagaatcgctcattgcctgacttagtggagcatagatgccctggtggccagcggggggcaataattcggagtgcagcattttagctgtcaaaaacagagaacaagtccggaaaaatcaataccaaccggacaaaaccaatggtaaatagtccgaaaaagagggaaatcccaagtaaacccacctccgttgattggctcaaacacgctttgacatctaacatccacattgctactgcttttatctttattggattaggcgaaacattaattccaacgaacgaaaacaccctagaaaaagctcttcttaccgcaatttaaattcggtcgattgttatgcacaaaagatgttatcgataagcagtgttgcgcaaagtgaaacctatcgatatgaacgtgaccatatcagacgctcaccactgcatgcagcccaaaaaaaacaacaacgtttgacgtgcgtgaaaattggttaagttttatgaaaataacttagttaactgactttccgacagccatcgatcaatccatatgctgcgggggagtgcggggctaagggcattaatcattaggacattgcaaagaggtccggaaacgtaaattttgtcaagtgaaaacggggttgtgctgtgtgtgtggaaaacggaacaaaacggtgccaaaaacgcaaggaaaagctgcgaaagcggtgcacagcaaacgggttgataaagcagcaggcttagatttaaattatcagtgcttttaaccgatttgccagcgaaacaataaccgacattcaataaccacccacacaaacgtattgtgtacataatatatacatccatacctacatacgtatattttgcgtagtgcggcgcttgaaagctgtttccccatcaccatatcatcactgccattcattgcaaacccactctggaatccatcccacctccaccgtaccacatgtcctacatgatggccaaaacgctggaggagcagagcctgcgggagtgcgaacactacatccagacgcatgggatccagcgagtcctcaaggactgcatcgtccagctgtgcgtctgcagacccgagaatcccgtgcagttcctgcgacagtactttcagaaactcgagagggtgagtccaaaaccaaaattataaataataccatatatattggtagataaaatatgggtagaaatttgatcagacataaaacctttatttctaaacagtacaaccgcttatcgttgccttgaggatcaatgcttgggccttcctgtgttatgtccttggtttatcagatccgtatgatcgatttcttaatttcc

SEQ ID NO: 40529 - DNA, 2572 bp, DROSOPHILA
taagaagagctttttctagggtgttttcgttcgttggaattaatgtttcgcctaatccaataaagataaaagcagtagcaatgtggatgttagatgtcaaagcgtgtttgagccaatcaacggagatgctgcactccgaattattgccccccgctggccaccagggcatctatgctccactaagtcaggcaatgagcgattctgaatccgacgaggaaattgagatccacaacgccgccaatcatcgacaaaaattgcaacagaaacttaagcaagctcatcagcccagtccgccggagcagctccaagcccaaaggatacgcatcccgccgaacactctagccctgaaatcaccacatacgagagcatctcccacggccaccaggattgtgactcgaaaaccttccgggagtacccagaaattccaactggagggcagtagctacgctaccaatatgcagaatactttccgttccgtcatgttgagcgataatggtggagtgggatcggagttgtcccacttcaacagtgatttcgatgcgaatgcagacaatgtagccatcttgggggaccataatcagaccggcgaggatttgtccaaaagaacccccatgtcaccggcaaggaaatgctgtttcataggcagcctgctcctgtgcttcctcgccgtcgtatcctttgtatggctggtgccctgcggtaatcctgatggcactggatcctgtccagccgtcggagaccggataaagacccacaactggttcaataattacacaaaggcggaacttaagggaggaatcaatgtggtcggtggtctaagagcctgggagaacaacctgatatttatgtaccgcggggatgcctttttcccggaattccgaccaggtaacgagcggcgtaatggcatcatctgtttgattggctcctcgggagctgtggcttggtttgtggagatggttgatgagcctgtggccctggactgcaccctcatagacatagatggcaatgggaaaccagcttgcttggtactggatgagtatggcgaacttggagccattcatcccgtctctggtgaatggatctggtggcataaggagcgatcagcccgaaaagttgatgcctatgacttcccagttatcctgcctgatctggatgcagatggagtgctggacctcctgctcgtgactagtttgtcactggtacagcgcactaaatcgcttgcccagctcaaacatgaatctccggaaaaactagaggctcgcaatgtgctgcgcatgctgtcgggcagaagaggagcacctattggtgatggcttcaccattcacgactgcgacactctcagcaacttgaagctcgaggcgggcaacgtgagcttcacctgtcagcgagtcaatgacacagagcagcagcgttccaagagtctggccgagctgtatgccctgatcaccaacaaatctattgtaagccaacgactaggcacctcaaagatctcccagcataggaaccatggccagcggcgggaactggatgcccagaggaacatatattctttaagtggacgggaactcgtggtggagaaccgaggacgctgtccggaggattgcaatgttacctttgttctcagtgaagtccgcgatggcaaaccccatgtggtggaaaacttcatcacgagcagaatgtacgggatgaagcccgccgaatggcacttcaagaataccaagtcgcaaatgtccggctttgtgatgaagttctggaagtggcatggcttggctaagccttccaaacagacttccgccagcagtaacagcaacaatgtgcagaagagtggcagcaacaatcacaccaagaacatgaatgccatcaaggataaagaaaagtctcaggctcaggcaaagaaacaacagcagcaccaacgtctaagaagaagcacggaggcgaaagatcaagagtttcaaccggctcaccaggagttcgatttcttcgagcatgtgaagcagaagagggaatcattcggactgccatcttcaactatgaacctgaccaaatcgagtggaatctctcccggcggaagctacaaaatgaacatgattacagaaaccgtgctgctagtggttttcgtgggggccgatacccacattgagaacacctcgcgaagcaacatcgtccagttttgccgtcacgaccgcaaggaggtggtgtgccaaccggatctgaacaaccaggaccactcgatgcttgtcgcagatctcgaccaggacggatctcaggagctagtcacatacatgtccaccttcgtgcatcccgaggatcagccgctgagcgaatggaaactgctgacctacgtccgtttgttgcgcctccaagcagagctaccttcctacttcgaggaccacaagaacaactagatgggcattcagatggcgatcaggaactgagttgagttatagagcatttagccagcagaagcgtgctgtcgatcataaatagtagtttaaactagttgcgtgcattacattgtacattaaaaaccttttctagcctcccataataaattagtcgacaaatagatttc

SEQ ID NO: 40530 - protein, 759 aa, DROSOPHILA
MLHSELLPPAGHQGIYAPLSQAMSDSESDEEIEIHNAANHRQKLQQKLKQAHQPSPPEQLQAQRIRIPPNTLALKSPHTRASPTATRIVTRKPSGSTQKFQLEGSSYATNMQNTFRSVMLSDNGGVGSELSHFNSDFDANADNVAILGDHNQTGEDLSKRTPMSPARKCCFIGSLLLCFLAVVSFVWLVPCGNPDGTGSCPAVGDRIKTHNWFNNYTKAELKGGINVVGGLRAWENNLIFMYRGDAFFPEFRPGNERRNGIICLIGSSGAVAWFVEMVDEPVALDCTLIDIDGNGKPACLVLDEYGELGAIHPVSGEWIWWHKERSARKVDAYDFPVILPDLDADGVLDLLLVTSLSLVQRTKSLAQLKHESPEKLEARNVLRMLSGRRGAPIGDGFTIHDCDTLSNLKLEAGNVSFTCQRVNDTEQQRSKSLAELYALITNKSIVSQRLGTSKISQHRNHGQRRELDAQRNIYSLSGRELVVENRGRCPEDCNVTFVLSEVRDGKPHVVENFITSRMYGMKPAEWHFKNTKSQMSGFVMKFWKWHGLAKPSKQTSASSNSNNVQKSGSNNHTKNMNAIKDKEKSQAQAKKQQQHQRLRRSTEAKDQEFQPAHQEFDFFEHVKQKRESFGLPSSTMNLTKSSGISPGGSYKMNMITETVLLVVFVGADTHIENTSRSNIVQFCRHDRKEVVCQPDLNNQDHSMLVADLDQDGSQELVTYMSTFVHPEDQPLSEWKLLTYVRLLRLQAELPSYFEDHKNN

SEQ ID NO: 40531 - DNA, 25461 bp, DROSOPHILA
ggcggccaggcaacttcattaacagcctctcggccgggccgtttaaaaagtagaaataacctattatttatgattattgtgagaatttcacaatggcatgcgagaatttattgttaatgttctgcagctccactcgccacgcagcgcgcgttgagtgcggagtgcgaaatgttgtaatttctattagatgcagcaccgtggtggtattttatgcacattattttctagttacagtggccgcatatgctgattatggtttgtatgataggacattaaattttaaattggtgttaaaatctagcactccaggccaaagaaatgtaagagtaaactaagagtaaagaaatatttcaaatgcaaatggcctacttttaagtgcaaaccattcaaataccatttttaataaaatgtgattgaaggttttagatagctgcccccatttctaaatgtagcctttttattttagggaaatactcaccgcgtgggttccactgtacttctatatcaacagactccaacaataacagttaaaagacagcggagacaaaccaactttgatgttttttggctttacatatcccgcttagtttggatttttggctccgcggggcaacagccgtaaattcttttactagcatgtacttagctttctttcttggctgattattatttatatgctatgaagttgcaattaaaatagcactttgaatgcaatgatgtagcagtcaaagaaaaagccacttattgtatccatttttatttcaagacgaataattgtgaggcaataattgatcgtttcccaagaaattcgaaaaaacatgctcattcatcagagaaaatttctgcaatacccataccacgttctattcaagtaagaaaacatttgtgtttagaattcattcataaaaattttttattttttttttcatattttttcctttgcatttttttttgctcgtttttttttgtggctttttgcttgcttggtttttttttgtttaattcattttttctttaattgctaaaaaatttcataaaattgtttagactaaatcgtaagtacaacactaaattacaattgtatgcaagtaactactatttttatgggttttttcatttttgtttcttctggtataaatatttgctttctaaggtcgtatcaactttttacaattttctcttgagtgtgtttgtctaatttttttgtttccttgttcggctttttatatgcaataaaaatataaattactaaaaacgactatttaaaaattagatatttataaaaaatatatgtgtgtgtggctataggctgtaaaagcttatatcggagaactttatgtacaaaattggatgagagagctgtggagcaaacatataaaaatatatactgcgtaggatttatcagataattagctgcacagtttgtttctagcacttttacaactagttttcatttctttacactaacgaggaaccatttgcaattttagtgtagttttattgatttaattttgacattttggaatttcgcaaacagtttttgcgtcttcgtgctgcacaaggtctggttgtcttcggttttgagatcaaaattaaattgtataaaccttttatgctttactaacaaaagattataataataagactatttggagactttgaaaaacacgaattttcatttgttctttagtagtgtgtatattgtttgtatatttcattcactttttgcttataattttttgttcttttttttccaattcagtttttgagttttcatgacagttgattgtatctgtatcttacaatttataaattcaatacatttcgtttacagttaggcgctaactacaaatattattgacttcatcgctgataaatgctccaaatcggaataggccaaaaaaaatataatagggtttgtagatggacaaatttaaaaaataaaatttaaaataataagtttaaaaatcgaaaaaaataattgggtgtagggtaaattagaagtacttaaaatagaatcactaaatgttttgcttgtcttcgcatgtttgtttgtttgtttgtttgtttgtgtagggtatttaaattaacattaagctagagtcgagttaagtttagtgtcttcgtttactacatttacatatacatagttagaaactaaatagtcgagatagtgtcaatttatgtagtttttttgtgtggcttttcatctttttctcttatccatttcgtatatcgatgtgacctatgagtactatatacaaatcgcccgattcagccaactgccttgccttagaaaagcaccgacatctcgggcggcgtcaatgaggaggtttctttcaatcgttttgtcattagtttacacatacgcgttggctacggctagcattaatatttacaatttatatcgaactaaatgaaaaatagattaaattgaagcagatttttcagtaacatgcaaaacgtcaaaacgtatggagagtcgtctcttcgactctgtcgtccagtggttcttggtcttggtctaaattctagtaagcaattggtcaagtcatttttcctttgagcgatatgaggttgtcataaacaaaaggttttcaattttgattggttgactttatatggtatacaactttaggcttaggtcagtccattggaataatcaagggtgcaaggtcagtttcccatttgcggtttcgatcgagtgtttcatttgctttttttttttttttaagaattttcagtattttttaaaatgtatatttcaagtgtatagttttcaattgaataattcctaagattgcattttgtaaaatctataaaaatgttcctgctggatacaatgatgtctcaatcgatcgaaacggctgggtcacagctttgctaattactatacaaattttttagggagtttacgagttatgcctgttacagatttttcatttttcgtgacgactaaactgcttcaatcaacaacaacattttggcgtctctctcacattttgaacccaacccagtcttttctttgtgtgtgtgctgtcagctcctccatgcggatttctccggatttcccaggagcccttccggatttttggagttacatatgcggagtgccgcagaccacggatcgctgctgttgcgccgtccccgctccgctgcccgctaccgaagctgcagccattagttgggatgaacaggctccggccactcccgccgccgccaacgagggccaacgctggctacagtaggaaccctcgcctaaaacagagatcctcttgccctccgccgctcccggtcctccgccagacgctcccttggctgagctgcctgccggcgaaccgcggtgcatgagcgtgggatcggtgttgagttgcttttgcgacttggctctttgtagcggagccacacaaaagtctgagttggcattgttgttatccgccaccgaggccacatatccgccgtacatgagacactcgtccgccgctgctgccgccgccgccgctgctgctgctgaggcacaaatgttgttgaccgacttgtcccaggtgtttttgatgatattcgggttgccgccatcgaaggtgagaccgctgttgctgccagttttgccgcccagagaggctgaagccaaagctacacccaccccactgccattgtgatgcattgtggccaccgcattctgttcgttctgcttcctggcctccgcgtcgtccttttcctgagcacgcttacgcttgcgcttcatgcagaagaccacgcacgccgcaataaccgccaccaaaggcatcgcaacggagaaaacagcaattaggactacctgggcattggtcaaaccatcggctctcgcttgtgtggttgctccatattggtgggcatcgaaggtcaccgaatcgtaggactcctcatcgcactgcttgcccctgaaaccattggcacacacgcattcgaacgaattgacacggttcatgcaggtgccgccgttatgacagggtccactgctgcactcatcgatgtccacggagcaatccttgccagtaaatcccgcacgacaggtgcactggtaatcgttgttgagattcaagcaggttcctccattggcacacggtctgatgaggcacaagtcaactttgctactacagtgggtgccatggaaaccgggaacgcattggcagcgatattggttgaccatatctatgcaggtgcctccgttctcgcactggtggccaagacaatcgtcaatgttggtctcgcatctcgttcccgaaaatcccgctgggcaaatacactttccgctcggctgacagcttccaccgttaatgcagggattcggactgcagttgtccagctggagatcgcagttgggtccgctgtagccaatgggacattcgcactggtagccctgacccttgcttcccaaaccaggacgaacgttgcggcagattccctgatgacagggtttgtccgaacacgtgagcactttctcctcgcacatctttccgctccagccgttggcgcaatgacacttgtagccggtttttgtgtgcggctcatcgatgcaggtaccaccattctggcagggattgacatcggcatcgcaggagtagatctcattttcgcaatcatcaccactgtatcctggagcgcatttgcatgtgtacaatccctcgccggtgttgaagcaggttccgccattcttgcagggtctgtggttggtgcagtagttcagatcctggttgcagtacaagcctccccaaccctcgttgcagatgcaagtccagggtttgttgcaggtgccatggatgcagttcggttccagaacgcactcgttgcacaaggctcccttccagcccagttggcaactgtaaataaatgaaggtaacagcgggtggttagtgtgaccgtaggtgaatttgaaattatattaaggactgaagtgtgcccatgcctttatgtgaatcatatctaaaaataaaaattgggtatcgctaatttcattccattctctaaaaactgcacaaatgcacttaaagatctttgactctgtttattgaagcgccgcgggcgctggcttacttttgacttttgaaatgcgagcgaataggacggaagaccggtgctccatcacctgttccacgcatccctgcatcccgctccctgccccaccgtacacttgtttgcatgccacgcttgattgcagtcgaaaaacgcagaagatgggcaagaaaagagcaaaaagatgaagagagacagggaaaggaagaaggcttgtcaacttgaaaaagtctcgttcgcaattgaagtaaaacgaatgtctctgtaagaagtcatatccgcacacttgaaaatgaagaagagaaagggggcagagcagagagcttcgagggagtcacaaaatttttgcatttctcacgatcataaattgatttcaagccaaaagaaaaaagtgtttcctctgcaacaacaaataacgcaggcaggcaggcacgcacgagcacgcattgccagatgcaactgttggctaaaactgtatggctaaaaagccttcacccacaaagatttcaatagttaataattcaaaccaagacagctaacctgttgaaaccggcgggcggagtggcagtgggtggaagtgccggagttcgagttcggttcggatcggagagacaagtaacagacagaaagacaagcagacagactgactgactgggagacaagtagtaattgatatgcgtcagccagtgtgtacacaaagaaatgtcgaaaaaaaaaaacaagcaagcgtcgcgttgccaactagcaaatgtgtgctgtatgcgcttagaattattaaaatattcccaccatcaaacaacctggctaagtggcacgcatacccgggcgtatctgcggtttccagctaacaattcgattcacaaaacagttccaccaatcactttactttactactactccaagccacacaatgatgtgttgattttggtgctcctttttatttggcacaattatcggcggaccacaaaatgtttgatttccgcctggcagtgagaggtttattggccaacataatgccaaagtaatgagcaacatcctctacgatcgacgtttgaaaatcaatttggcagatcgctcttggagtgccagcatcggcacaaacctattttcataatacaaaacaaaatatatagcaaacgagttatgtaaaaaacgtaatgtctggctggctggcagtattgaactttgtgttctcgtgcagctgtttctttttttgttgaaattgtatgctgctaatatctgcaaatatttgcgagcgtcgtcaaaagtgttcgcttacaccttgatgggcagaaatgtgggaaaaacttcggtacttgtaattcaatttggcctgctggattttacttcgcttcaaaattgtaatgcaaaaccccagccaaatcaaatgacatcgcgccaaacagaaagaatttctgcggtcgccgaacgaacaaacgagcaaataaaaaaacgtgcattaaaatccaaacaaaaacgaagaacaaaaaacaaagaaaataataaaaaataaaataaaagagcagcaaagtgttttctgcccttttcgcaaagctcacggtagcagtcaaacattcagcattacattgaaaaggtgtgccccatcatgatagttgttgcgattttcctcgttgtttttcactgggtggtgggcaagtaaaaaaccaagcagagaacaaacacaagcaaataaaacgtgcaaacacaaggaggacagaaatcatcattaaattgaaggcaaactaacccgttagttgcagttggcaacagttggcttaattaacataattctagaagtttgaaagacgatttggtaaatattttcataagctatctacaagcagcaaactaaacttaacgagctatttcctgatatgttcacaaaaggcctaatcaaataaatacgatcaaataaaatacttacacgcattgattgggcttgtcgcaatgtccatgttcacagcctttggcgcatttggctgcaaataaaaaaggtgaaatttaaatataaattaattgaaatgtaaactataggggtgctggtggtggtggttgcagtggtgggggcaaaacactttcccaaaaatttaaatgcctttgaaatggactccccacctgttcgagaaaaaaaaaacaacaacacaatcccaattccaagcccaaacccaggggacacccactcgacaacgaactgctcaacccactcacagacatcgagatccatcaaattgaggcaattccgaagcagaagtgccgaaaaaactttctttttcacgcgtctggcaatgaaaaacataaaagatgtctctgggaaataaaacaaaagccgctcgctaaacaataggaaaacgtttaaaaagttttagcacagactaagctaaacaaaaaaactaaaaaaaaaaaatgaagaagaaaacccataaaaaatgaatcatggccagtggctctcaaactctcggcaatcggcagtgtgtgagtgctttaagccaagcaggaataacttgtttctaaggccaaaaaggaaacacacaaaatgaaataatcccatggccaggagaagaagaagcagcagcagcagcagcctgagcagctgaggcggaggccgtggcccaaaacagaaaacagattcccaagctcaaaaggttcgacgaaaacttcgattggaagctgggctggagttggagctgcagttggagatggagctggagctggagctgggatctctccgaagaatgtggcaaacatgtttcggccggcaagagaagcaacggcggcagcagcatcagcagcagcggcagcaggaagttggggagttgccacaagggcctagagaaggggtaaaagtcgtgaacaaaactaaaaaaggcaatgccaaaaggagcccagaacgtggaaggagccgccgatgatgatgatgatgctcctctttaaaccgagtgagtttcattcagaagcaagcggcggcggcatcgggaaaattgctagaaaatcacaaaaacgtgttctctcaacgtagaagaggcttcatgctcctgcccccttttaatatatacatatatatatagctatggataaaaagcgtaatattggcaattgccaatgatttttattaccatcgcccgcagaagacgaagtcgggctagaaatagattttcctgaaagtgaaaaagaagttcacacgccccagggcacagataattcgcgctaatcgaatgatatatatatccgaatcttgcacttactttcacttctggccaaagggttctcgaaactcttcttgaaaaacatctagcatatgtttctttttagcacccactgaccgaccagccagctgcctgtcattcattaactttagccgaaatagctcatttccttgaaattaacttcattcatatacgcacttggcccaaagaaagacagagggggatgaaggagccagaagaaataaccttttgggccaatttactcggtttcgcatgttttgtttttgcagcctgcacgttttgcctttttatttgctgctttatttgctgctcctgctgctggaaaataattttcgcacatgtgtgcgagtgtgtgccttaatttaagctcatttctgcgcatttaagttgaaaataaaatatagcaagcaggagcagctgcctcttccgctggcaacttgctaaaccggcagcaggacacaaaaattatctggcccgaaaaaaggcagcaaataaaaaaaaaaaaacaaaacgaaaactgaaggaacggaaaggaacggaaagaaacggggcaagaagggggaagaatcgaggcgaagaagcgtcttcaggagactacgacatttaaggtgtaatcagacgttgccacaacagccctaaaggaagtttgttcttgggtcgacccttcttctcgggtcctcagaaatgctcggcatgcagacgacgacgacgacggcggtgaagcaaaccaacccgagctcaaactcaaaccttgatcgtcatctgtatctgtatctgtgcgagtggaccccttacgcagacacagatacagatacagcaccgatacagacacagatacagatacagatacaccggcaccacacctttttggtccaaaaacctgggcccttgcacttggcgtgggaagatttttgtatgccctgctcctcatcatcatcaccaccatcatcatcaggggcatggtgtggcatggtgtggcatggtgtgtctgctctgattcacagtttaaaatgttggtaaagcaaaggtagctaacaacgatcgactaccaaacaaactacaaagagctgcccgaattcctgctctcggcagttcgttagacgttttgttcttccaatgacaaatgacttttctccaatatcttgcattttgcttttcgtttcccgaacttcattgatttttaatttatttgtttgactttgatttcttcctccccacttgatggccattttcagtattcaaatttttagtttcatttttgtcaattcatcgccggtacgcactcgaaaataattatactttaattcgttgggccagcaagcagcattcgattttctttatttttgggcattgtgtacaatcatctcatttgatttgacaagcaagtgattttcaataataatgagagctggcaggcaaaaaaaaaaaaaaaacacaaaaacttaggttttgagccacttgaattgggagatcggcagaagcaacaacaaacagagcgggccaagtgtttttggcgtaaagaatgcttatgggagtaccgatggcgatggaggctattgatccgtgtggttagctaaggctgagcttatgctttgtaaatgtttcaaccaatcacgaaataatcataggggagaaaggcttacaaagaactctagttagtcggaaaattctatatctattgaaacgtaaaccagctattctagatatattcccagtttacaaaaagtaccctttgctatttaaccttcttctttaagacaacccctcccacgcagagtattgcgtatttaaaaaccattttctacttacgtatgtgacagtaatcgccctgccatccggtcaaacagataatttcgcccgtctccgagcaagtcgagtgtccaaatgaatcgtcgcggggccggcagaacttggcacagccggatccgtagtagttgagatcgcaggtgacacggaaatcgtactccagcgacgtgtactgcgattccgacttgttcgtcttccattcggaggacacttccagtacctgctgcaccaagagtcgctggatgaggagctctgcaagtgaaaaagacggcgattagatcgagaccatgataagtgtgtgagaacaagccgacgagcccggcgatagactaatgaagattaattgggttaaagatgatccgatgagatggcgcttggggcagagacagaaagattgaaaaatctctgtttggaatgcagtaaatgggaaatggaaaaaccaaaaatcgaaatcaaacgtggcaaggcaaggcaaggcgaagcgaagcgaagcaacttgaaacacccgaaatgcaattgcttgtcacagagtcaagtgctcaagccgaggtatgcagtttggccagggcacggagtgcagtacttggtatttggcgatgagagaggcacacacaaactggcagccagacacggggcatggctaagatacaaaaagtaagtaagaaaaaataaaagaaggcagcaggcatcagaccgaccgccagccaagctcgtcgaggcatttttcagctgttcgccgaccggtctcgactttggatttgggatggctgtcgctgtggctggtaaggcaactggcaactcgtttgtgtgcgtcgcctatctacaggcacatttacacagatgcagatactctggcagcgatgcagatacagatacatgtgcagccacattatgccatggtctataaagtaaattgcaggtgcatgactattcgaattgcatgcagacaagctgaagttaaagctgaatcctaagccaagccatagccaagtttttagttggaaaatccagcgctaatccgtctggaatttattgttcgaaactaaaaagtctaagaacaaagcaaaaccgagaaggcccccattttaatagcgcctggaaaattagagcagagaaagtgaagctaatagcgataatggaaaggaaactgtctcacttttcaattaagtattttgactattgagcaaccgaccaaaaattgtggcccaaatatgtatatgtgtagccatattgtcaaagctatatattttgcacagactcacatatggagcgaaaccattgacaagcgacccaactggttgaccaataaaaatatgaaataaaaaattcggcaactccaaaaactcactaattaattaccaaaaatatgcacaactcaaatgcggcaacaagaattcttggcccgttgctcgagccactagctgttggcttagcggttggcaattgcatttttttttttttttggccaaaaactcgtgtgtgcttgtgtgtacttcacctgccgacgaacggggccgacaacatggaaaagcattcaatgcaaaaatcgcaccagccaacagcattcccaaaaacaaaatccaaaaaaaaaaaaataaataaataaataaaaaacaaggaaaaaaattcgaattgtactttgtggttttatttacatttgcaacaccgacacacacgttagcttcggcagtgcgataaagcgcatggatttgtggcatgacaggttattagacaagccggcaagagacgcacaatttctggccagtttggccagtttgcaaaaaacgtgcaataatatatagcaagcgaattttgtgaaaagttgaattttcataattatctgtggaaaagccaaactagctgacgatcgcggaaaagtggaaatttctcatggaagataattaggcacaaaaagtaaaacttagagaaatatctgaaatggaaaactatttggcacaaacgttgcttatttctaagccacttttgcaaccgctttgtcaacccatttgctgcgctcaacaaatgagtgaaatttgtgtgcaacaaatttgcaacaagaaatccaaacttgactctgactccctcctccccaatactttttttttttgtatttgcagcatccgcctccccaagtatcgctgacttggacttgaggaattttttcgaaaataccattttatcaagacacacgacgacaacaaaaacgaatacaacaacgacaagttttgtggcagacagtcagacacacagacagacggaccagccagaaaagatcgaaggaagccaagtcgaaaagagaagttgggctcttgttgccgggctgccgcttcttgatccaatgagttaaaattaaaagataaccattttaacaacatcgaaccaggagagcagagagcagcggccacaacaacgtgcaactaacaactttggcattggcagagattaattggtaggtagggataggtgaggaagccgaagaggctgccacagtgcggcgaaaatctcgaaaaccatgagttgaaagatttctgaacgcatcaagccaagaggccagagaatcaccttgcaaagccacttacacagtacgaaaagtgccatcatattgatgctaaccgattaaaaacaaagtggattcacaaaggatttacttctaattactaattctaattacgtttgtcattaagttattaggccagaaataaataaatattcttagtacggtcagtatcaagtttgcagttttctcccagtgcctcagccttcgaacttcagtttcagattcctttgcccagcaggtccggttcctttggctcttggccatttaagttggcctccggctctgggcgaaaacctggcgaaaaggtcgccatgtgcgttgcaccacccctcctccgcccgctgctatatgtaatttatgttaaatgaatataacaaaaaaagagctaaactcgttggcaaaatgctgcggcgtaaactcgctatgcaagtccaagtatgcgggagatcgtcattcagcgcaagaaaaaaaaaaggaggaaaatgaaactaagttgcatacttttaaataatgaaattaatccttgacaggcggcgagactaggaaatctcggtgtgcagaaattgaaattgcaattgccggcggagttggggagttcgaaatgtgctcatggggatggactcggcgatacttgtgtaccgataaagatctattagcctgggaccgcctcggaaattagcctgtagttgaggcggcacagcgggatgccgagtgaaaatcggttaaggagctcccagcaaaacaattaaaattccttgaaggaataggccaagctatatatagaaaaatcgaaaaggaaaaaaaagggcctggcgagacgaaaaacaaagagaacaacatgctagaaattcctatgaaaactccataaatctcgaaagcaaaagaaagtgcaggtagctaagccccaagcaggtagcttctccttctccgcacttcaatcaaattgtgtgggaaaatcagccacaaaaaagtgtttttaaaaatcggagctaaggaattctgctttttgggctgttgaaagaaaaatcgttcggctttgtcaaggatttgtgagctgactagagctggatccttgtgtggtccttatcgctggaagacaatcagttactacacagagattcatgtagcattgtttccaagatggattacacacgatctcggttctctcgatcgttacaatcggaatcgcattggactagtacagcgtttagttcgtgagcccgagcttaattgcacatttcaggcaaatgagggatggccaaacctcaacttcgagcacacttccgttccaaaacaggcagacaacaaaaggcgacaaagtctggccctcgattatcccccatgtgtgtgtgtgtgtgtgtgtgtgtgtgtgtttagctggatggatggttggttggttggatatttaaaaccactcaataccccggaaatcttacactgagcgaagagcagcaaaagctagagcctgccaaggtatcaagttgcgggtctgtgcgatcgcttgccgctttttttgacagctttcgatcacaggaagcaggatgatgagctcataacttttgcccatgtttcaaggaagtaatttcacagcctaaaagatttttgttattgaatatgtattataggttaaacttactgttggtgcgcgcattgccgctgttgttcgtatcatgccaggcctcgacgatcagcgagaaggtaccctgtaaatcggaaagaagaaaaggaaatggttaaagaaagttcaaatctaaacgggaaatgacaggcactaatgccatccacacttatcaaatcgtatcgactataactaattccgagctaatggaaagctccctagagctccatcgcccccacagtgagcactcattataaggagattatgacaggcggctaggcaagttggtcgcccacacgataccccaaacgcccgaatgcctccccggaccgccgaatctaatgcaatgcgaatgcatttcaaatgcaaatcggcaaaatgcaacttcgaatgcaaccggcaggcagcgccctcaattcacacttgatttcaaatgcagcgctgctggaaaaaccggcagagatgacacaaaatccaaatccgaatccaaagcaaggcgaaaaccagccgattgaaacttttgcagaggtgtctctactgctactactgctggctgcagcgcttggttttccatgggtgtgtgttttttcttggcttgcgtagagctacgagtttggagctccgcgtttcgattcgcttgtaaatgactaatttttcgaccaactttcgattttgcgtgggcctagggcaaccggagatgtagaattcatttggttgataagccacagttgccgattgattgcataacgattacattgccatttggtttttgtgtgcttgtcgtaatcagacattgaaattgcgctctgcgcgaatctcttctttttgtcgctgcgaataaacgtaaaatttatatgggcacgacaggaagcaaatcagacatagatgatcggctttaaccagcggcatacaatgggaaatgagcaggaaaggtaataacaaacgaatggctaaaatgaaatgaagcgctgcgatggtttattggttttattgtgcagagaaataaagttttcaacagtggctacgtgctggccccgctcgtctgaatgaagtttcccattattatgtgaatttttacaagtccaatttatggagctttagttgaggatctcaagttggatgctattctttagttctggcgaatatttggtgtatgaatctataggaaagtccctctatttcacttcccttagtgggcatatatagcgtataaattgcgagtacctatagacactcgctgcactggcgtatgccacatccaaaaataaatgaggcaacatgcatcagcggccgcttagtgaatatcgcgtgcgtcggtgctgtatatcaacgtcaatatccagcatatagcatacagaatgtagcatagggatatctggatagggtgaagtgcacggcggcaggagtaggagtggtagccagacacgtagcaacagccacagggggactgactgactctcagaagacacagcccgaagacccaatactcaagaccgaagacgcaagacgcaaggcacaagacaagacagtacagcccgtcagacgggggacaaaagtagcaaagttcaatacgaacaagaggagcatgaatgctgcctgccatcgcttgactatttttagtcgctgggcgggcgaagggcggaaagggggagtggcagccccctatccctacatgcaacatcggttgctatatcttctggcgtgtcgtcaggcatgcgtggctcgtctttcgttgttttaattaagtgcaacattaaattagttggtgcagcagcggcagcagacagagtcatactataattaaatttatagtttgacctagaaatgttttgaagttgaaagtgcgcggaaacggaccgaaataaagtctagaacgctctaggagcaccgattgaaacagcaaactaattttagagggcaaaacaaaggattgaagttcttgccccagtaaagataaaatagatcacaagaagcaatttaccaaaataaagtctagcattttcttgaaaagtctaaaaataaaaaacactccaaaaaacattgacgatagaatgcgacgtgaatttcccttttcactatatttaacttataccgaagatcaacaatttggcgcgtgcgttttaacttaattatgctagcccatagttcgctaattgtttatttatgcctgcccgcagcttaatcgctaaaaatgtattcagcttacacatttcacgtgccaaaacatctttcgctacctggcccggtggtaatagccccctccccaccctttccctagcttcctccccctttttcggaccatgactttgcacacttaagatacatgtgtgtaatgataataatagtgacgctgcacatgcgcagaccgctcaacaattaggaagtaaagtgtctacgcaaagagaaatagctaagtgtacactaggaaaagagggagagggatcgagatagaggaatactatgttatatggggagagaagtaaaaacaccccttagaaactgcgggcgcactgacacaaaaatacgttacaaactccagttattgctactggcataaatactttgaagcttgagtaacttcttcgtttctagggtggacccatcatcatgtagagcctcctgtcgtaataataattaagaaatgcacggcatgccgagctgagctgagctgggccacaaccacgatacatatttttcttggccagtcgagctgaacagaataaagactcagcgtcagtggcggtatttcaaaatttcagcaatttattgagcacacgtgcgctttaaggaggggctataaaataacaggggtaaaagtcctaaaaagtaaatcaccaaaaggtgacttcactggatcagtgaacaaccctaactcaaaccaccaccatcatccgagatacaaaagctatagcaagtttaagttggaaattaattctatttcgaaatgtatgtttcaatatttctgcctgttttataaagaacttttttagacagtttgttagaaagaagaatggatttcggagttagttctatggaagctgtgacttcgggaaattcaacttaatataatttttttccaaaaagacaaaccggaaaagtgtagggcaaaaagtaacggaaacttcggcaacccaagggtgggttgttgccttgcgttgcagcgatctggaaattgtcgctcgccagttcgtacagtatagtatactatcgtatcgcactggatcgcaccaatggcggtggtgctgaatatggtggtgacggtgatagagcggtggtgtgccgtggtgcggttcgcgcacgcgttttcagcgcatttttaatagtcgacagatgtttggtgcggcgtgtgcgccacagccaacaaccctcgacaaggacgcccggcggaaataaatgaatgcggcatcaggggagttgttctcccgcgggagcagacgcaggcgatcgggggctataaaaagcccaaacaaattagcaaagatgccgcacgaataagttttctggcgaaaaactacgctcaacgtataaagaagacaacatggaaatatttattgactgactgaatgagtgactggcgtcgacgcagggcaaatctaaatataaaagccatctgcacaggccatttatatacggaaacagtgacagcgaaaagtgtgtggctaaggccttagttttatagctgctgtaatcacagtaaatgtgtagcctgttttatgatttttaaagttgaattgatttcttttgattatctacatatgttattttttttttttatagctcagatttttcccacatgaatctatatttatattatccagtgctttacttaccggccatgagaacgagaaggggaactggatgggattcgtgaagcccttgttctggaagcgctgggcgtcggtcagattgaccgagttctcgccgagaatgggcgtgatcacgtccccgtaggtgcactgggaggtggtgtcgatggtggcctggtagtgctttaggcagacgcgaaaccgcgtcttgcagctgcccaggcacttgcccgtcgctccgtccgactccccgctgcagcagcgaccctcgttgtcccgcccgtgatcgttgctgaagtacttcaggcgcaactcaaagctgccggaactgtgaacctgcaacggatgcaacacaagaagggggtattttattagtcaaatcaaattaaaaagcaattcattaaggcacacacgaaaccaaaaataaaaacgagaggcacaaatcggagaacaaagaatgcagctcccaacaagacgataaatctttcagcatggtatttgaacaaaaactgaaattgcagaggaatttttagcggcaacagcagcagaggcaaacattcagcattcagagacccatgcaaaggacaaaacgaatacaggcttatgaaatattaagcgagaaccgaactgaaaccgaatccgaatccgcgaccaaaccgatctggaaccgaaaaagcccggccgccacatgacaaatgctcagcaagcggtcgttttcttcagtttgggtccgcttcggtccgattcggtttgcaataaattccacttggcttggctttccgctcgactttcgttttgaagcgccgacagaatttgcatatttggatttgcaaatttgtttgatagccgtcgtctcataaatttctcaattaattcgatgccgctgagcgaggtgtgagggaaattagctatatgggtcaagcatgtgtttttaattgattttctaaaattggccatgtagggaaacttacttggatatgcatattgaaagcttgaaattgccatatgcagtgtttcactgagtagaaatacaatatttcataacaaagttattaaaaggttgaaaaataacttctttaaaacctcttcaactaggaaattcgaagggaaattgacattacacctcattttggacttggcacttaaaacttaattatgacttcatcatctgggcccataaatgggcgagacaagcgaccaatgaccaaaaataggcgcactgcggagttattgctccgttttctataactgttcgttcggcaattaacatttcagccacaacaagtgaagcttgttaaaacgacaatttaattgttaacaagacatgagcacagcagtgagtcgccgccgtcttccctccttctcacttatttattgtcgagtgctccacatgtggcttgggaagttttgtgggttttcctcttcgcctttgtaggaacacgggtgtttaattgctcaattaagcagaagtgcggtccaaagatgctgtgtcgaatcacaggtgtaatcgtatgcccagccggaaaagtagagccaaagctggcgctaacattgttcaaaggcttttccaattgtaattgtaagggaatttggagcgaaagagagggcgcattcaacgaatgtaagcggccaaacgaaagacttaggcaacgaacgcggcgcaaacacattgtacggaaagaaatattgatctgatataaccatacttttatttgtattactactttaagtgtaaaatcaaagttctaatattttagcttcttattaaacagattaattaatatttgtatttaagtacaacaagtgaacagttcacctatcaaaatgttatacaaaggcatgctaatacttaatctactctttttcctgtgtatgtattaataagcagccaacaaaaacaaaacggacgcaaaagagcagcaaaacaaaaagaaacacacacaacaaaaaacttaaataaaagaagcagcagcaacaggcagcgacgccgacgtcgacgtcaacgtcggagaaaaacgatgaaaaaatgtacaagtaaaaccgaattgtttcccacggcatacgattttgccggtcaacattgatggttaaaacgaggaaaagagacagcgcgagagggtgagaaggggagcgcttgggcgaagagcgagagagcagaagtaaaaaggtgtaagcgaataaacgccaggtgaagaagagcagtgcatgcagccatattgaaagatcgccaaaagagagagagagagagaggccccaagctataacagtttagcgcagagcgagagagagctaaagcggtagttgttgttgtcagctgagcgcaaaaagagcaaagcgtgacttaaaagtgaattggagtcgcgtgtttgctggtgtgtgtgtgcaagcttacaagctgcagctgccagctgctccaaagagagagagagagcacgagagcgaggctctcccagagcaaaaacttgttttcaacggcgctttgaagaggagcataaatatgcgcaaaaaagcacagaataagaagcaggcaaaatgaattaatagacaatcaagccaaacgatgcgtctgaattaataaaagaaatacaataaaaaagggaaagagaaagagggagaaaaaccattgagtggaaggaaggttagaaaggtgggaggcggcgggcaggggggcgtgtccagtggaaagccaaactaaactagactataaacaacaaaatgggacaaacgaaaagcgcacacacaaacaaaggcgcagaagttgacacaacatatacaacacaaaaaaagcaagacaaaacaacaagcaaatcaatttgcataacaccaaacaaacattcacacacactctaaagatggtgggaagcacaagcaaaacaaaacaaaaagtgcaatcgttaaaaccacaatagttttgtccaccatttgacaccaattttggttatagtttctcacactgttttaaagtccctccaagtatgcggttagtattagcaagctcttaaagggacaagtagtagataatatgatgaattagcatttaaaaaacataactttcgttctaataacgtaaaatatataatatatttctctttgatctaacttttccgactgtttttatcgtaattccaaaatgttgaatgctcagttacaccttgcacaatccgcctcataactttggcatatgtacactggtaatggttctccttccgctttttgtttgcctttgccttcaactatgaactccacagcggctgaataaccgaaaggtaaaacttgtgggggggatctacgagggggtttcgccaggtggaacttgaaagctggagctgccaacctctcaaatggaagacagacacttgttaaagtgttagaaaatagtgcgttgcattgtttaccttttgcttgagccattctttgtctccgtttctcgttttctttctctttactggccactactcctatttttactgcgatcactgaggcttgaagcgactagttagttagttcttcgtttcttttcattttttgccatttccacgtcaacttgccttgactgacagacagttgttgtagaaaaaaaagcagggaagaagttaaaacaacacaaggggacataaaaatgtatgaaagcacgcatttttattataattttccccgacttttcctcgactttcctacaggtgtttgctttggtgcccctaccctgcatgttgtttattaatcatttaaattcatcatcataatcaaccgttaacaacgggcttgggaaacagttacaagcgcaagtgaatcatccatcgcattgtgtgggagtagtcgtcgtcttcctctttggcttctaaattgcaattaattatgttatgcgaagaaagagcagagccgagaagactacgagtgctcccccacgagtcccagtcttcattcattcattcattcattcactcactcgctcactcactcacttcttcgacgctcaatgttaatatgaaaattgcataaatgcgaaaacaaggcgactacggttatttgatagttaaattgaaatttaaacgcagcatgggacaagaaagggccaagaaattgtgagaataataccttatagaatgggcagaaaattgaattaaattgcattgctaatggcaagctaattgcccgagatattattttaaatgacaaattaaactattccacctttccctgtaagtaagtaaggaaatgagtcagaattattgggcagatgtttctgcctacatacggggagcattttcagcagtcccaagaccccaggaggttggcgtcgagacacttttttgggacgttgttaaaattagcgactaaatagcagactgcaaaaagaagctggtcgaagagtgaagtttaagcacgcaacgtgccaaagttgggagaaaatcaagaagtgcggagagcggtagaggattggagcacatgcagggtgcacggtgagtaaatgggtactattatcaataaagagctccctatcagcttaatattgtggatctaagttgtaatttcttcgtagctaaatagttctgaactatgaaatgtatactatgtacacatactatgtatggtcaagatttattataatttaatattttcttatctttgaaactaacccacacattaacaacaaaatatttagtgttattttctagagatcgcactgtttggaaaccctgcacaactcttttttttatccgtgtaaccaggggatgctggcgttaaagatcaatgaaagcatgacagaagagaaacaacgcaaggaggggagagcaagtgaggctgagcatgtgtcgcgttgacctacgcagagcgaaaagtaaaccgaaaaaaatcgcatgtaaaaagcgcatgcaaagcggagggacagaggaggagatgacggcgaaaacggcagatgttgcccagcatcatcaactttttagcatgggcttgtagcacagcattactatatagcctcatattgaaatcgagcagttttatcattttttgctgctgctctggatgcatacgccgttggtggtaaattttgacgttgaggcagacttggatcatctctgtttttacacggagaacaattagtacacatagtaggatttctaagaagttgaactgatctgcatgtcaaaaattatcttgaaggtatttcttctaacgtatgcctcatatttttccgctgtgtactagaattaaaccattttttggggatggacctgtttgggcattggcctcgcatgtttccaaactagttttgctctatgaaatatgtatgcatgttccgaaaagggtgatacgatccgatccacaatttccacccctaaaagccaacccgcttaaaatatcaactcagctgtttctacccaaaagttctcgggttaccagcttgaaaaataagtttggaagcaaacgcgatgttggagtggtttcaaaatagatattttgagatgatcatacggaaccccaaaagttttaaaatatttagtaacctggcaacccttcaatcgtttcttcccttttggccccacacacacacatgcgcgcacaacacaccagctgcaaaattcagcggtgagtgcacgcgtgcgcgtagaaataaagaaaataaattgccaaaaaatacaacttgttggatggaaaatgagcgcttttcctgggactgaaactcacctgcacgatgactgtgaagcaaatgaatgctgttaataaacatttaatccaatgcatgtttattgatgtttttgttgctgattttttggattgagtgtcgcttttagtgtaataatccacgggctgtgtgtgtgtgtgtgtgtgtgcggcaactactcaaattgtttattgtgtttatgttttgaattttttttttggttacttgtcgcacatggttttgcaattcgcttttagcattttcgttgttttcttgttgtcgttgttgcaagctacacgtgcacgcgccacattttttgttgcaatttcctcgactgtgtttatttttaagtgtcgcgaaataaaagctcttttcgcgaactgcggagtcttctccttttcacgcagaaaagcgcaaaagggaaaagcgagagagggaactaacggtgccgcgattcttaatcattcgcgattttttaatctttcggaggaaacacttcttgttattctgttagaagatcttttattttgatttctggttctggcacttttcttttggtacattcaaatatcgaatgagaactgcccagagtcgcggtaatctgcaattcttaagtgaactattgcattggcagttcgcgtcacacaccgaatatttggtcgcgtttcgagtcggggacttgtgtttttcaaaatgccttggctgcggagctgcctttttcgagttattcgcgcggccgagttgaaaaacgtaatgccgttcatgtccacgaccaaaacactattcaccttcaccgccgcgaatcgtactaaaaaataccacgaaacgtactcgctctctcatttctctctttcgctctcaaaacgagttccgtggcaaaattagtgcatttcagcagatgcaatgcaacaaaccgttttgaataaatagtcaacttacacattttaaaaactatttaaaatttcaatatacattaccaagtttattttgatataagaatttattatattgtttaacttcaaccggacgggtgtttatttgtacaaatttccaagattgtctctaaataatcttcaaaattcggattttttatttctagatattctacttttatttttatatctaaaataaaacaaatcaattcaattcgtttacgttagcaacatttgattccccgttttgctagcagtttcagataccagttggataccggcttgtaagcatttcgttagcaacatttgattcccggttcgctcaatttaccgattcagctcacgcgaaagttgaaagcaaaatgcttagcaacatttattgttgccaagatgagaaccaaaaataaaattaaagatggatatttgtatttaatataaatatttgaattttattatattgggtgcttataacttattgaattggcatgcaagtatatctccatcatcttcattagcaggtacgtcatcagtcttagggtcttggtatttatattccaccaaactgccgatccaagcatccaatgtcgttagtatgatcaaaatcgaatgagtttcacttcgctaaaaacaacttctgctgaagacgttttcagagacggaaaatgcatcatcatatgaatttttttggctctgataacttctccaggactgtcgctcttatggaggtgaaactccttcgagtttgggcatactaaattcattgaaagaggatccataaactacatattaattgtccaagct

SEQ ID NO: 40532 - DNA, 5252 bp, DROSOPHILA
cgcgaataactcgaaaaaggcagctccgcagccaaggcattttgaaaaacacaagtccccgactcgaaacgcgaccaaatattcggtgtgtgacgcgaactgccaatgcaatagttcacttaagaattgcagattaccgcgactctgggcagttctcattcgatatttgaatgtaccaaaagaaaagtgccagaaccagaaatcaaaataaaagatcttctaacagaataacaagaagtgtttcctccgaaagattaaaaaatcgcgaatgattaagaatcgcggcaccgttagttccctctctcgcttttcccttttgcgcttttctgcgtgaaaaggagaagactccgcagttcgcgaaaagagcttttatttcgcgacacttaaaaataaacacagtcgaggaaattgcaacaaaaaatgtggcgcgtgcacgtgtagcttgcaacaacgacaacaagaaaacaacgaaaatgctaaaagcgaattgcaaaaccatgtgcgacaagtaaccaaaaaaaaaattcaaaacataaacacaataaacaatttgagtagttgccgcacacacacacacacacacacagcccgtggattattacactaaaagcgacactcaatccaaaaaatcagcaacaaaaacatcaataaacatgcattggattaaatgtttattaacagcattcatttgcttcacagtcatcgtgcaggttcacagttccggcagctttgagttgcgcctgaagtacttcagcaacgatcacgggcgggacaacgagggtcgctgctgcagcggggagtcggacggagcgacgggcaagtgcctgggcagctgcaagacgcggtttcgcgtctgcctaaagcactaccaggccaccatcgacaccacctcccagtgcacctacggggacgtgatcacgcccattctcggcgagaactcggtcaatctgaccgacgcccagcgcttccagaacaagggcttcacgaatcccatccagttccccttctcgttctcatggccgggtaccttctcgctgatcgtcgaggcctggcatgatacgaacaacagcggcaatgcgcgcaccaacaagctcctcatccagcgactcttggtgcagcaggtactggaagtgtcctccgaatggaagacgaacaagtcggaatcgcagtacacgtcgctggagtacgatttccgtgtcacctgcgatctcaactactacggatccggctgtgccaagttctgccggccccgcgacgattcatttggacactcgacttgctcggagacgggcgaaattatctgtttgaccggatggcagggcgattactgtcacatacccaaatgcgccaaaggctgtgaacatggacattgcgacaagcccaatcaatgcgtttgccaactgggctggaagggagccttgtgcaacgagtgcgttctggaaccgaactgcatccatggcacctgcaacaaaccctggacttgcatctgcaacgagggttggggaggcttgtactgcaaccaggatctgaactactgcaccaaccacagaccctgcaagaatggcggaacctgcttcaacaccggcgagggattgtacacatgcaaatgcgctccaggatacagtggtgatgattgcgaaaatgagatctactcctgcgatgccgatgtcaatccctgccagaatggtggtacctgcatcgatgagccgcacacaaaaaccggctacaagtgtcattgcgccaacggctggagcggaaagatgtgcgaggagaaagtgctcacgtgttcggacaaaccctgtcatcagggaatctgccgcaacgttcgtcctggtttgggaagcaagggtcagggctaccagtgcgaatgtcccattggctacagcggacccaactgcgatctccagctggacaactgcagtccgaatccctgcattaacggtggaagctgtcagccgagcggaaagtgtatttgcccagcgggattttcgggaacgagatgcgagaccaacattgacgattgtcttggccaccagtgcgagaacggaggcacctgcatagatatggtcaaccaatatcgctgccaatgcgttcccggtttccatggcacccactgtagtagcaaagttgacttgtgcctcatcagaccgtgtgccaatggaggaacctgcttgaatctcaacaacgattaccagtgcacctgtcgtgcgggatttactggcaaggattgctccgtggacatcgatgagtgcagcagtggaccctgtcataacggcggcacctgcatgaaccgtgtcaattcgttcgaatgcgtgtgtgccaatggtttcaggggcaagcagtgcgatgaggagtcctacgattcggtgaccttcgatgcccaccaatatggagcaaccacacaagcgagagccgatggtttgaccaatgcccaggtagtcctaattgctgttttctccgttgcgatgcctttggtggcggttattgcggcgtgcgtggtcttctgcatgaagcgcaagcgtaagcgtgctcaggaaaaggacgacgcggaggccaggaagcagaacgaacagaatgcggtggccacaatgcatcacaatggcagtggggtgggtgtagctttggcttcagcctctctgggcggcaaaactggcagcaacagcggtctcaccttcgatggcggcaacccgaatatcatcaaaaacacctgggacaagtcggtcaacaacatttgtgcctcagcagcagcagcggcggcggcggcagcagcggcggacgagtgtctcatgtacggcggatatgtggcctcggtggcggataacaacaatgccaactcagacttttgtgtggctccgctacaaagagccaagtcgcaaaagcaactcaacaccgatcccacgctcatgcaccgcggttcgccggcaggcagctcagccaagggagcgtctggcggaggaccgggagcggcggagggcaagaggatctctgttttaggcgagggttcctactgtagccagcgttggccctcgttggcggcggcgggagtggccggagcctgttcatcccaactaatggctgcagcttcggtagcgggcagcggagcggggacggcgcaacagcagcgatccgtggtctgcggcactccgcatatgtaactccaaaaatccggaagggctcctgggaaatccggagaaatccgcatggaggagctgacagcacacacacaaagaaaagactgggttgggttcaaaatgtgagagagacgccaaaatgttgttgttgattgaagcagtttagtcgtcacgaaaaatgaaaaatctgtaacaggcataactcgtaaactccctaaaaaatttgtatagtaattagcaaagctgtgacccagccgtttcgatcgattgagacatcattgtatccagcaggaacatttttatagattttacaaaatgcaatcttaggaattattcaattgaaaactatacacttgaaatatacattttaaaaaatactgaaaattcttaaaaaaaaaaaaaaagcaaatgaaacactcgatcgaaaccgcaaatgggaaactgaccttgcacccttgattattccaatggactgacctaagcctaaagttgtataccatataaagtcaaccaatcaaaattgaaaaccttttgtttatgacaacctcatatcgctcaaaggaaaaatgacttgaccaattgcttactagaatttagaccaagaccaagaaccactggacgacagagtcgaagagacgactctccatacgttttgacgttttgcatgttactgaaaaatctgcttcaatttaatctatttttcatttagttcgatataaattgtaaatattaatgctagccgtagccaacgcgtatgtgtaaactaatgacaaaacgattgaaagaaacctcctcattgacgccgcccgagatgtcggtgcttttctaaggcaaggcagttggctgaatcgggcgatttgtatatagtactcataggtcacatcgatatacgaaatggataagagaaaaagatgaaaagccacacaaaaaaactacataaattgacactatctcgactatttagtttctaactatgtatatgtaaatgtagtaaacgaagacactaaacttaactcgactctagcttaatgttaatttaaataccctacacaaacaaacaaacaaacaaacaaacatgcgaagacaagcaaaacatttagtgattctattttaagtacttctaatttaccctacacccaattatttttttcgatttttaaacttattattttaaattttattttttaaatttgtccatctacaaaccctattatattttttttggcctattccgatttggagcatttatcagcgatgaagtcaataatatttgtagttagcgcctaactgtaaacgaaatgtattgaatttataaattgtaagatacagatacaatcaactgtcatgaaaactcaaaaactgaattggaaaaaaaagaacaaaaaattataagcaaaaagtgaatgaaatatacaaacaatatacacactactaaagaacaaatgaaaattcgtgtttttcaaagtctccaaatagtcttattattataatcttttgttagtaaagcataaaaggtttatacaatttaattttgatctcaaaaccgaagacaaccagaccttgtgcagcacgaagacgcaaaaactgtttgcgaaattccaaaatgtcaaaattaaatcaataaaactacactaaaattgcaaatggttcctcgttagtgtaaagaaatgaaaactagttgtaaaagtgctagaaacaaactgtgcagctaattatctgataaatcctacgcagtatatatttttatatgtttgctccacagctctctcatccaattttgtacataaagttctccgatataagcttttacagcctatagccacacacacatatattttttataaatatctaatttttaaatagtcgtttttagtaatttatatttttattgcatataaaaagccgaacaaggaaacaaaaaaattagacaaacacactcaagagaaaattgtaaaaagttgatacgaccttagaaagcaaatatttataccagaagaaacaaaaatgaaaaaacccataaaaatagtagttacttgcatacaattgtaatttagtgttgtacttacgatttagtctaaacaattttatgaaattttttagcaattaaagaaaaaatgaatt

SEQ ID NO: 40533 - protein, 833 aa, DROSOPHILA
MHWIKCLLTAFICFTVIVQVHSSGSFELRLKYFSNDHGRDNEGRCCSGESDGATGKCLGSCKTRFRVCLKHYQATIDTTSQCTYGDVITPILGENSVNLTDAQRFQNKGFTNPIQFPFSFSWPGTFSLIVEAWHDTNNSGNARTNKLLIQRLLVQQVLEVSSEWKTNKSESQYTSLEYDFRVTCDLNYYGSGCAKFCRPRDDSFGHSTCSETGEIICLTGWQGDYCHIPKCAKGCEHGHCDKPNQCVCQLGWKGALCNECVLEPNCIHGTCNKPWTCICNEGWGGLYCNQDLNYCTNHRPCKNGGTCFNTGEGLYTCKCAPGYSGDDCENEIYSCDADVNPCQNGGTCIDEPHTKTGYKCHCANGWSGKMCEEKVLTCSDKPCHQGICRNVRPGLGSKGQGYQCECPIGYSGPNCDLQLDNCSPNPCINGGSCQPSGKCICPAGFSGTRCETNIDDCLGHQCENGGTCIDMVNQYRCQCVPGFHGTHCSSKVDLCLIRPCANGGTCLNLNNDYQCTCRAGFTGKDCSVDIDECSSGPCHNGGTCMNRVNSFECVCANGFRGKQCDEESYDSVTFDAHQYGATTQARADGLTNAQVVLIAVFSVAMPLVAVIAACVVFCMKRKRKRAQEKDDAEARKQNEQNAVATMHHNGSGVGVALASASLGGKTGSNSGLTFDGGNPNIIKNTWDKSVNNICASAAAAAAAAAAADECLMYGGYVASVADNNNANSDFCVAPLQRAKSQKQLNTDPTLMHRGSPAGSSAKGASGGGPGAAEGKRISVLGEGSYCSQRWPSLAAAGVAGACSSQLMAAASVAGSGAGTAQQQRSVVCGTPHM

SEQ ID NO: 40534 - DNA, 3091 bp, DROSOPHILA
ttttgtgttaaggtttgtgttttgagtggttccgtggccttctgcccgcttgcttctcagccacatggagatggatgcgtgtgagtatgtgtggtgttcttagttttgtgtgagtgtgtgtgacgtcattcgagggtggaaagtggaggagtgtgtgacctccggcttagacgcgagacaactgctgcagcagattgcacggccagaacgcctcgatacgctccttgagcagctgaaatggatacgatatccaggtaagtacggtctgtgccaaatgacccatgggctccggatactggtgggtggccaaggccagcagggcggtaatggagcacagtcccgccgtgaacaggatgaagaagggcagctccttcttaggataaacagacacctcgtggaacgccggcagcagttcgcgatccgcgcactctgtgcatgttggatatggatagaagaggtggccacgctccagcggatacggcagcatgcgaaacgtgccctcccaggtgcagtgcagcaggttcagggcgccctccacctgcttccagtgcttcagatggaagaacgcgtaggccaacgcctccgaatcgccgcgcttcaaaatgtgctctggcggtagaataagtcgctttgtctcaagcagatacttgggcacatgcggattgaactccaccgcccgatgaatggcctcaacggcgctcatttcagcttgacttagacctcgcttggatgctatgtctggcgaaaacttgtcggctacggcgcgcgccttcagcagagcagctgtatagcagatagtcgccgatttcggcagcgagatgtcatcgtacttggccagaatggcatggcaatcggcgtaggcctgcatctccagcagcgtttcgattagattctcgtgaatgttcagtacgctcatgatcgagggtatctccttggtgagatcgcgaaacattttagccgcctccttcagcttgcccagcttgcgggcgcacatggcaagccgtcgcttgatatagatcagcacattggtgtcgcgccgatgcatgccatccgcaatggcgccctggtgttgggtggcctgcgacttgcggtagttgatctcggcgacctttagggccgtcttcaggatcttctccgcctccataatggtcatggcttcctcctcggccagcagtatataggcaggtgcacattccgcattgatttccagagcactgtgagcggacttgatgcgctgcatgggattgcgttcgcgccaggccgtctgcatgatctcatactcctccttgcgggcatcgccttcgcaggtaaaaaatgtttgatggtcctgggcacttaagttcatgtcgtagtaggtcaacggctccttgctggtggcccaaaagaatctctggtactcggcgccgcgaaatagattaagtggatttcgccagaccttacactcgggcatttgggtgcccgtacttgtggtggcgctgccactgcctgatgcccctgctccacccgatcctcctccgcctgctccgccattgctgctgctgctggagccactgctgctgctgctgccactgccattgctggactctgattggccatcgctgccatttatccaggggctaatgtggttgatagagacttgctctgcgaaacagggacagtgaaacagaataagaaggaagcggaggaaggggaaccccactactcacctataaacgaagtgccatacttccggaaataccaccactcaaagatcaggatcaggcccgagatcaggctggaggtccctgtgagcgccacgtagaacttaggcgtcagagtgctgagaaacatggacgaatcccacatcctgctgcctgctgccccctgcctgcgaagttctgtattcgacgctcgtttcgctttggccccagctccgtccggattttgccgctctccgggattagcttgtgcctgggggttcgcggatactctgtgctctggcactgaccaccgccgaggggttagatcaattaacggttgcctttcttggcgctatccttgcgcgtatccttgctgctgatgagacttttttcaatcaagtattcgaaaggggatgagcggggggtaaataccagcgcaacgtgaccgtttctcgtcgccttctaaatgccgctgaacgtactggtcactctgaaaagttcttgcgggaagacctttcaacttctttcagaaatattccacgcatgtatctaaagtctattgcatggccaagagatatacacatttcccactgttatctattattacttatatttgttttaatagtttggttcttatttgtgctcaacatatttcgacagttatttcttacgatcacgctaagaacttactctaatagcaaataataacaaaaccggtcatacatattaaaatatataagcgaactacctgatatctatttaatgctaattgttgtttaaatttaatgaaaaatgtaattctcgaaccatccactttttccgatattttcacgcctatcgatagatccacctgcgcaccactacaaaaaatggccgctgagctgcaagtgcacttttttttataatagaccaatccgattgaaacaagcacgcaaagcccttaatttggaactcctgttgaacggaaagccatcagtggggcagtggaatcatggagcaggtgtcggatagtgcggtgacaactctggagtcaacccaagcagaggagccaccaccaggagtcgaaaaagttgagactctagaactaaaaacggcggcgttagaaacactctcggaaagtgcgggtcccactgatttggagaatgagctggccaatctcaacggatctgaagagggtccaggcttggacgagctgagcactctggagagggagatagctaagctgcataacattcgaccgccggatgcggcgtccgaagttaaggattccgacacaccaattgccttagcagacaatggtggcttagagccccgccaggccccagatgaagctaaatgtcgaaccccaataatcgaagaaggcaacgctgcctcaggcaacggccagtccagcgaatcccccttggaagagg

SEQ ID NO: 40535 - DNA, 1860 bp, DROSOPHILA
ccctttcgaatacttgattgaaaaaagtctcatcagcagcaaggatacgcgcaaggatagcgccaagaaaggcaaccgttaattgatctaacccctcggcggtggtcagtgccagagcacagagtatccgcgaacccccaggcacaagctaatcccggagagcggcaaaatccggacggagctggggccaaagcgaaacgagcgtcgaatacagaacttcgcaggcagggggcagcaggcagcaggatgtgggattcgtccatgtttctcagcactctgacgcctaagttctacgtggcgctcacagggacctccagcctgatctcgggcctgatcctgatctttgagtggtggtatttccggaagtatggcacttcgtttatagagcaagtctctatcaaccacattagcccctggataaatggcagcgatggccaatcagagtccagcaatggcagtggcagcagcagcagcagtggctccagcagcagcagcaatggcggagcaggcggaggaggatcgggtggagcaggggcatcaggcagtggcagcgccaccacaagtacgggcacccaaatgcccgagtgtaaggtctggcgaaatccacttaatctatttcgcggcgccgagtaccagagattcttttgggccaccagcaaggagccgttgacctactacgacatgaacttaagtgcccaggaccatcaaacattttttacctgcgaaggcgatgcccgcaaggaggagtatgagatcatgcagacggcctggcgcgaacgcaatcccatgcagcgcatcaagtccgctcacagtgctctggaaatcaatgcggaatgtgcacctgcctatatactgctggccgaggaggaagccatgaccattatggaggcggagaagatcctgaagacggccctaaaggtcgccgagatcaactaccgcaagtcgcaggccacccaacaccagggcgccattgcggatggcatgcatcggcgcgacaccaatgtgctgatctatatcaagcgacggcttgccatgtgcgcccgcaagctgggcaagctgaaggaggcggctaaaatgtttcgcgatctcaccaaggagataccctcgatcatgagcgtactgaacattcacgagaatctaatcgaaacgctgctggagatgcaggcctacgccgattgccatgccattctggccaagtacgatgacatctcgctgccgaaatcggcgactatctgctatacagctgctctgctgaaggcgcgcgccgtagccgacaagttttcgccagacatagcatccaagcgaggtctaagtcaagctgaaatgagcgccgttgaggccattcatcgggcggtggagttcaatccgcatgtgcccaagtatctgcttgagacaaagcgacttattctaccgccagagcacattttgaagcgcggcgattcggaggcgttggcctacgcgttcttccatctgaagcactggaagcaggtggagggcgccctgaacctgctgcactgcacctgggagggcacgtttcgcatgctgccgtatccgctggagcgtggccacctcttctatccatatccaacatgcacagagtgcgcggatcgcgaactgctgccggcgttccacgaggtgtctgtttatcctaagaaggagctgcccttcttcatcctgttcacggcgggactgtgctccattaccgccctgctggccttggccacccaccagtatccggagcccatgggtcatttggcacagaccgtacttacctggatatcgtatccatttcagctgctcaaggagcgtatcgaggcgttctggccgtgcaatctgctgcagcagttgtctcgcgtctaa

SEQ ID NO: 40536 - protein, 537 aa, DROSOPHILA
MWDSSMFLSTLTPKFYVALTGTSSLISGLILIFEWWYFRKYGTSFIEQVSINHISPWINGSDGQSESSNGSGSSSSSGSSSSSNGGAGGGGSGGAGASGSGSATTSTGTQMPECKVWRNPLNLFRGAEYQRFFWATSKEPLTYYDMNLSAQDHQTFFTCEGDARKEEYEIMQTAWRERNPMQRIKSAHSALEINAECAPAYILLAEEEAMTIMEAEKILKTALKVAEINYRKSQATQHQGAIADGMHRRDTNVLIYIKRRLAMCARKLGKLKEAAKMFRDLTKEIPSIMSVLNIHENLIETLLEMQAYADCHAILAKYDDISLPKSATICYTAALLKARAVADKFSPDIASKRGLSQAEMSAVEAIHRAVEFNPHVPKYLLETKRLILPPEHILKRGDSEALAYAFFHLKHWKQVEGALNLLHCTWEGTFRMLPYPLERGHLFYPYPTCTECADRELLPAFHEVSVYPKKELPFFILFTAGLCSITALLALATHQYPEPMGHLAQTVLTWISYPFQLLKERIEAFWPCNLLQQLSRV

SEQ ID NO: 40537 - DNA, 5195 bp, DROSOPHILA
tgctgctgctgctgccactgccattgctggactctgattggccatcgctgccatttatccaggggctaatgtggttgatagagacttgctctgcgaaacagggacagtgaaacagaataagaaggaagcggaggaaggggaaccccactactcacctataaacgaagtgccatacttccggaaataccaccactcaaagatcaggatcaggcccgagatcaggctggaggtccctgtgagcgccacgtagaacttaggcgtcagagtgctgagaaacatggacgaatcccacatcctgctgcctgctgccccctgcctgcgaagttctgtattcgacgctcgtttcgctttggccccagctccgtccggattttgccgctctccgggattagcttgtgcctgggggttcgcggatactctgtgctctggcactgaccaccgccgaggggttagatcaattaacggttgcctttcttggcgctatccttgcgcgtatccttgctgctgatgagacttttttcaatcaagtattcgaaaggggatgagcggggggtaaataccagcgcaacgtgaccgtttctcgtcgccttctaaatgccgctgaacgtactggtcactctgaaaagttcttgcgggaagacctttcaacttctttcagaaatattccacgcatgtatctaaagtctattgcatggccaagagatatacacatttcccactgttatctattattacttatatttgttttaatagtttggttcttatttgtgctcaacatatttcgacagttatttcttacgatcacgctaagaacttactctaatagcaaataataacaaaaccggtcatacatattaaaatatataagcgaactacctgatatctatttaatgctaattgttgtttaaatttaatgaaaaatgtaattctcgaaccatccactttttccgatattttcacgcctatcgatagatccacctgcgcaccactacaaaaaatggccgctgagctgcaagtgcacttttttttataatagaccaatccgattgaaacaagcacgcaaagcccttaatttggaactcctgttgaacggaaagccatcagtggggcagtggaatcatggagcaggtgtcggatagtgcggtgacaactctggagtcaacccaagcagaggagccaccaccaggagtcgaaaaagttgagactctagaactaaaaacggcggcgttagaaacactctcggaaagtgcgggtcccactgatttggagaatgagctggccaatctcaacggatctgaagagggtccaggcttggacgagctgagcactctggagagggagatagctaagctgcataacattcgaccgccggatgcggcgtccgaagttaaggattccgacacaccaattgccttagcagacaatggtggcttagagccccgccaggccccagatgaagctaaatgtcgaaccccaataatcgaagaaggcaacgctgcctcaggcaacggccagtccagcgaatcccccttggaagaggtagatctcattgccctgctcaaggggacggataccagtcatgatcagcctacgggagaggaaaagtgcacattggagaaggctctctccgagcttgacggcgttggagaagatggggatgtaggtgttaccatcgagggcgaagggcagttcgaaatcatggaaattgacgacgacgagggggagtcatcgagtcgaaaagccagccccaaggtacctgcgtccaagcccatcaaatctaactccttgccttctatatccaagcataagctctccccggaacaagccagagctgttgctctggagcagatggccggtctaaagccaaagtcgcgtcgtaaggagccgcctgcgccgccttctgtggtcgcgccgatagatattgtcagctcgttgaacgatgattgggacgactacgactctgaggaagacaagtcggcttccgcgttggtgacagaagttataactctgccttcagcacacgtagtcactaagaagccacctctgcctgtgaaaaaattgtcatccccagttaagcacagcccgaactcggcaattttgctaaacaacaagatcagcggagtaaaagtaatgttaaagaccgtgagccaaaagcaacttgcagcctcaacaggggcagcagcggaaaaaaccaagccgactgtcgttgtgtcacctcccaaggaaaccgaagagcatactacgggtacagtaaagttggaattcattaaatcattgcttacaaactgaatttttagggttcaagcgtatgcgtgtaattaaaaggaagataatctgggaccccgatgtaccagagacgaaaaaatcgtttgcgcagtatgctagcacgaaggcggcatgtccagcacccaccacaccaaaaacaactgtcaaaagcatttcgcccaccacgacgactaagaaggaggtggcacccaaaaaacggtcagctacacctactgctcggtctactaaagctggcactccggtcggaggaacagagcggggtccctcgcccgtcaaacgacgcgcgcaaactccgaacacaggtctagccaatggaggaactcaaaaaaagaaaaaggtctctgagatcgatcgcctgatgggcgacgagggagctgccaatatgattcatgcagtggagcatgagcagcgggaattgagtggtggtgaggtgtccaataagccgctgatgcggaaacgagcgatgaccataaccggaagggtaagtacttctactatagaaatccgagatacctattatcgattatcgaatatttatgattttccaatacaagaaccaggcagcacgagttgctgtggaaccaacaccgcccaaaaaagagtcagcacaatcggccgccaaacgaacgcctgctgattctgtttttactaaggccaccgccaacacatctgcccgtaagcctcgcgcttccgactcgtgggactatgtttacaaacagcgcgccagcgaggaatcgatgatcatgcgtcggcgctccaacagctcgtactccagcaacgcttccgtaagtcgaaattcgctggacaataggcccggagcagccaatctgtctgatgatgcaggcgagggctcggacccgtcatttaagtttgtaaagcccgtaagcaagtcgagccaaaggggcggtgaagatacctcctcgcatacgctggctaacgatatgaaggcgaacaacggtagcgaactggtgtgcctgcacaaggttaacaaagttgctcacctggtcatccacacggaacgaggaaacttcggccatacgtacagcaagcagctgctggagcagttgaacgacacactgtccagtgttgcccgcaaaggcgaattcaacacggtgttgcttaccgtcgagggtccacagttttgtcagggcatcgattgccaggaactgatacagggttccctggagaagcgaaaggatagtgccagtcaactggctgtagcccttaagtaagtaattcaaatgtatctttgagaaaaggcttattaacgaaaccgttacattttagatgctatctacgcactctggccacatttcctaaacccttggtggctggcattgttggcagccagattaatttgggcgttatgcagcttccctttgctgactacgtggtggcctctgatgattgtagcttcgagactaactatgccaaattgggtcagctgcccgagggctatgctctgtggcatggtcaccaaagagtttccagtgaagtggtaaatattcagtcttttataaagcttatctacagctcatcccatgtatcgttcagcactcgcgtttgtttcttatgggtgaaagactgttcgcaacggaacttttggaatcgaatagtttcgttgacaagatctgcaaggccagaaatgtcaacgaaatggctctggccaaagccaaacagatatccactagctctgcggaggtaaagcgtaacatctagtgttattattagttaacttatattgaaaatcccacagatgtatcgtacactaaagaaactcaaccactccgccgtcaatgtcacgaaattcccgcgtctggatgaggaactaaaggttataggagagcaatgggttactgccgattgcttagccaatttcaaacgctatcttaacgacgttgatttttagagcattgatttatagttactgtataccatttgggaatggtagacattcatccatacaaaccatataaagattaattcatacatttagttgagtccttttaggagttttattctggaccatgagactatcgccctaagaatttttttactcctaccccattgtaaagtacgaacgctgtgtaaattgtaagaaattcggaggcaggagttatatcctgttctattaggattttaaaggtaactcgattagttgaacgtgctgggattggaaagtttgcaaattaaattatcgcttacacgttttaaattcgaaattttattttccgtcatccgaaattcccaaatagttcacttttcaatcaaacaatggagtttaagatcccatgcaatatatcttgtgttatatgaaaaaaatgttaagcctcataataaataaaataagatgaacagctcccataaacggaacttatcaattgaaatctatttgtcgactaatttattatgggaggctagaaaaggtttttaatgtacaatgtaatgcacgcaactagtttaaactactatttatgatcgacagcacgcttctgctggctaaatgctctataactcaactcagttcctgatcgccatctgaatgcccatctagttgttcttgtggtcctcgaagtaggaaggtagctctgcttggaggcgcaacaaacggacgtaggtcagcagtttccattcgctcagcggctgatcctcgggatgcacgaaggtggacatgtatgtgactagctcctgagatccgtcctggtcgagatctgcgacaagcatcgagtggtcctggttgttcagatccggttggcacaccacctccttgcggtcgtgacggcaaaactggacgatgttgcttcgcgaggtgttctcaatgtgggtatcggcccccacgaaaaccactagcagcacggtttctgtaatcatgttcattttgtagcttccgccgggagagattccactcg

SEQ ID NO: 40538 - DNA, 2792 bp, DROSOPHILA
gccgctgagctgcaagtgcacttttttttataatagaccaatccgattgaaacaagcacgcaaagcccttaatttggaactcctgttgaacggaaagccatcagtggggcagtggaatcatggagcaggtgtcggatagtgcggtgacaactctggagtcaacccaagcagaggagccaccaccaggagtcgaaaaagttgagactctagaactaaaaacggcggcgttagaaacactctcggaaagtgcgggtcccactgatttggagaatgagctggccaatctcaacggatctgaagagggtccaggcttggacgagctgagcactctggagagggagatagctaagctgcataacattcgaccgccggatgcggcgtccgaagttaaggattccgacacaccaattgccttagcagacaatggtggcttagagccccgccaggccccagatgaagctaaatgtcgaaccccaataatcgaagaaggcaacgctgcctcaggcaacggccagtccagcgaatcccccttggaagaggtagatctcattgccctgctcaaggggacggataccagtcatgatcagcctacgggagaggaaaagtgcacattggagaaggctctctccgagcttgacggcgttggagaagatggggatgtaggtgttaccatcgagggcgaagggcagttcgaaatcatggaaattgacgacgacgagggggagtcatcgagtcgaaaagccagccccaaggtacctgcgtccaagcccatcaaatctaactccttgccttctatatccaagcataagctctccccggaacaagccagagctgttgctctggagcagatggccggtctaaagccaaagtcgcgtcgtaaggagccgcctgcgccgccttctgtggtcgcgccgatagatattgtcagctcgttgaacgatgattgggacgactacgactctgaggaagacaagtcggcttccgcgttggtgacagaagttataactctgccttcagcacacgtagtcactaagaagccacctctgcctgtgaaaaaattgtcatccccagttaagcacagcccgaactcggcaattttgctaaacaacaagatcagcggagtaaaagtaatgttaaagaccgtgagccaaaagcaacttgcagcctcaacaggggcagcagcggaaaaaaccaagccgactgtcgttgtgtcacctcccaaggaaaccgaagagcatactacggcacccaccacaccaaaaacaactgtcaaaagcatttcgcccaccacgacgactaagaaggaggtggcacccaaaaaacggtcagctacacctactgctcggtctactaaagctggcactccggtcggaggaacagagcggggtccctcgcccgtcaaacgacgcgcgcaaactccgaacacaggtctagccaatggaggaactcaaaaaaagaaaaaggtctctgagatcgatcgcctgatgggcgacgagggagctgccaatatgattcatgcagtggagcatgagcagcgggaattgagtggtggtgaggtgtccaataagccgctgatgcggaaacgagcgatgaccataaccggaaggaaccaggcagcacgagttgctgtggaaccaacaccgcccaaaaaagagtcagcacaatcggccgccaaacgaacgcctgctgattctgtttttactaaggccaccgccaacacatctgcccgtaagcctcgcgcttccgactcgtgggactatgtttacaaacagcgcgccagcgaggaatcgatgatcatgcgtcggcgctccaacagctcgtactccagcaacgcttccgtaagtcgaaattcgctggacaataggcccggagcagccaatctgtctgatgatgcaggcgagggctcggacccgtcatttaagtttgtaaagcccgtaagcaagtcgagccaaaggggcggtgaagatacctcctcgcatacgctggctaacgatatgaaggcgaacaacggtagcgaactggtgtgcctgcacaaggttaacaaagttgctcacctggtcatccacacggaacgaggaaacttcggccatacgtacagcaagcagctgctggagcagttgaacgacacactgtccagtgttgcccgcaaaggcgaattcaacacggtgttgcttaccgtcgagggtccacagttttgtcagggcatcgattgccaggaactgatacagggttccctggagaagcgaaaggatagtgccagtcaactggctgtagcccttaaatgctatctacgcactctggccacatttcctaaacccttggtggctggcattgttggcagccagattaatttgggcgttatgcagcttccctttgctgactacgtggtggcctctgatgattgtagcttcgagactaactatgccaaattgggtcagctgcccgagggctatgctctgtggcatggtcaccaaagagtttccagtgaagtgcactcgcgtttgtttcttatgggtgaaagactgttcgcaacggaacttttggaatcgaatagtttcgttgacaagatctgcaaggccagaaatgtcaacgaaatggctctggccaaagccaaacagatatccactagctctgcggagatgtatcgtacactaaagaaactcaaccactccgccgtcaatgtcacgaaattcccgcgtctggatgaggaactaaaggttataggagagcaatgggttactgccgattgcttagccaatttcaaacgctatcttaacgacgttgatttttag

SEQ ID NO: 40539 - protein, 890 aa, DROSOPHILA
MEQVSDSAVTTLESTQAEEPPPGVEKVETLELKTAALETLSESAGPTDLENELANLNGSEEGPGLDELSTLEREIAKLHNIRPPDAASEVKDSDTPIALADNGGLEPRQAPDEAKCRTPIIEEGNAASGNGQSSESPLEEVDLIALLKGTDTSHDQPTGEEKCTLEKALSELDGVGEDGDVGVTIEGEGQFEIMEIDDDEGESSSRKASPKVPASKPIKSNSLPSISKHKLSPEQARAVALEQMAGLKPKSRRKEPPAPPSVVAPIDIVSSLNDDWDDYDSEEDKSASALVTEVITLPSAHVVTKKPPLPVKKLSSPVKHSPNSAILLNNKISGVKVMLKTVSQKQLAASTGAAAEKTKPTVVVSPPKETEEHTTAPTTPKTTVKSISPTTTTKKEVAPKKRSATPTARSTKAGTPVGGTERGPSPVKRRAQTPNTGLANGGTQKKKKVSEIDRLMGDEGAANMIHAVEHEQRELSGGEVSNKPLMRKRAMTITGRNQAARVAVEPTPPKKESAQSAAKRTPADSVFTKATANTSARKPRASDSWDYVYKQRASEESMIMRRRSNSSYSSNASVSRNSLDNRPGAANLSDDAGEGSDPSFKFVKPVSKSSQRGGEDTSSHTLANDMKANNGSELVCLHKVNKVAHLVIHTERGNFGHTYSKQLLEQLNDTLSSVARKGEFNTVLLTVEGPQFCQGIDCQELIQGSLEKRKDSASQLAVALKCYLRTLATFPKPLVAGIVGSQINLGVMQLPFADYVVASDDCSFETNYAKLGQLPEGYALWHGHQRVSSEVHSRLFLMGERLFATELLESNSFVDKICKARNVNEMALAKAKQISTSSAEMYRTLKKLNHSAVNVTKFPRLDEELKVIGEQWVTADCLANFKRYLNDVDF

SEQ ID NO: 40540 - DNA, 1687 bp, DROSOPHILA
aacttagcctttcttacttcttcagatactcgttgagctccttgatggcctccaggcgacgaccacgggccttaaggatggcaatcttgcgcttcctgggcgcggcatttgtctcgtccttagcaatgattgcatccaggacctcgtcggcctcatcgtactgctccagggcctcgtagcgcatcgctttgaacttcatcacgcgcaggctgcccgggaactcgagggccagctgcttggtacacttggtggcgatgtcaaagcgagccgtatccaatgccgcgatgatcacctgctccaggatgagatgccgctcgttgccggtcttgtgcaccttgtcctccagcacagcaacccacagctggaccacctcctcgctgtggcgacccgtctcctcgcgccatgttctgaactgatcgcgtacatctggaaggatgatcatacgattatgataccgcacttttcattcatggccccgttttttgggtccacggaaaccgggcgattgggagcaacccactgacgtggtctgcacctgtttgaagccgggaaaagccaaaaactcacccgaccagctcatcttctcataatctagcgacatattcacttaggcgcacttaaatatctcattaatttaacttaattttccaattgtaatctttaactgccgatttcctttcctggcaaaataaaagtgtggcagcataatgggccgttagattataccaaataacagtggcgtggcgctgccaacctactttttgaatatcgtaagactctactctacagttacacagtatgcaggatttgttgactagtttgtaaaagaaagcgtttccgatccaatgatgtatatatatcctttcctctcatctgcatacataagtaaacgagaaggtgatataactataataactaggtcattaatgaatacggtaaaaaggagcgaacctaggtgtttcccttgtggtatgccagatatgggtacaagatgggtacaagtaataacatttttgcagagtaccctttgcgttctgccattcaaatatcttaaagtccaattcaaaagatcaaccggaaaacattataaatttagattcctattggataattaaggaagtcatatggcttacttatgttagtatatatgtatagtcacataatcaacatattttcacgtttcccttccgtttctgagtgcactcggcatacgacacaatcgatcaacttagctctatatgaacaaacaagtaaataaatgtgatttatattacaaggagctcttattaattatttgcagcgcattaacatggtccaattgttcccagccacgtaaggtaatacaaagttcctgagtttgataaaagagataagaaagaacaccttaaaccctcttaccaaacgtactcctaactggataagtagttcggtaaaccaataactaaatagtataccaagcgttcagcaaaactaacacaccatctccgtagataattccgtggaagagtatcagcatcaacaaaggaaaaacaatagagatttcttcctcataccttactttgttgttctcgacttgtgcatttacacttactaatctgaacgagtaattttacagagaaaaaaaaacgtttatttataaacttatctcaaaataaggaggaattgtggcagaaaagattcactacat

SEQ ID NO: 40541 - DNA, 533 bp, DROSOPHILA
ttgccaggaaaggaaatcggcagttaaagattacaattggaaaattaagttaaattaatgagatatttaagtgcgcctaagtgaatatgtcgctagattatgagaagatgagctggtcggatgtacgcgatcagttcagaacatggcgcgaggagacgggtcgccacagcgaggaggtggtccagctgtgggttgctgtgctggaggacaaggtgcacaagaccggcaacgagcggcatctcatcctggagcaggtgatcatcgcggcattggatacggctcgctttgacatcgccaccaagtgtaccaagcagctggccctcgagttcccgggcagcctgcgcgtgatgaagttcaaagcgatgcgctacgaggccctggagcagtacgatgaggccgacgaggtcctggatgcaatcattgctaaggacgagacaaatgccgcgcccaggaagcgcaagattgccatccttaaggcccgtggtcgtcgcctggaggccatcaaggagctcaacgagtatctgaagaagtaa

SEQ ID NO: 40542 - protein, 148 aa, DROSOPHILA
MSLDYEKMSWSDVRDQFRTWREETGRHSEEVVQLWVAVLEDKVHKTGNERHLILEQVIIAALDTARFDIATKCTKQLALEFPGSLRVMKFKAMRYEALEQYDEADEVLDAIIAKDETNAAPRKRKIAILKARGRRLEAIKELNEYLKK

SEQ ID NO: 40543 - DNA, 3809 bp, DROSOPHILA
ccagtttaacgcctttgcgtgacgttcgattaatcacagattcatgtacgcagatggcaaaacatcataaaatcttttacaaaagtcttttttccagcacgcctttggttgtaccaatgctgtactcagcttggaaactttcagacttctgaatacgttccacttgatttttggctagacatgtgtgctgatatttttggatacaagttttcctactgtttcataaataaaaaggtgaaaaacactgatcataactttagggacttggacagtagtgaaaagatgcagcgcgtcttcttaacccagccagaaattgacgcttggtcggctactaaggtgagaaaacacaatcggacttatattttaaagggtacgtttaaattgaattatttatctcagaaattactaacctattttaactaaccaaggggcaactcactgcgaggatctacaaccatcagcagtgaatgtaaacccatccataaaaaccctattgatggatatcgatttcgaagttcaaaaattacaaaaagattaatctctgtaaattttattattctattaacaaaacctgtataatataaatcaaatatgtaatattacacttaacagattgttgtatataacgaaaatattgaaagactcttttacagtgtataatcattagatggtagttagtaattgtactacaccttgtataacccttatcggttaactctattacccacatttcaagtaccctcaaattgagtgagtgaaacccaatgattgataatcgggcacagtcgacgcgaatgccattgtactcgataagacgccgcatggcgttggagcacaaaatgccaacaatctatttggcccagttgacaatattatttactggcttaaagaccactaattaagtactgcgttagcgataagatttgcctttttagctaaggcaatggaattagttggcccataagctaaacgttgatcagtccaactttaacgctcgacaatgaaactttggctaggcatttctttggctctgttggccctgggccaaacccatggtagcatctttgagaggactttcaaaaggatccacgaggagccaccactgccaaccactcagaatcgagctgatgtagttcaaaccctttggattgaacagaagctggatcacttcgacccggaagaaacgcgcacatggcaaatggtatattgcataatttggattgatacaaatcgggatgttttcttggacatgtacaatgtttatattaatttctttcagcgctatatgctcaacgatgcactttaccagtctggagcaccactttttatttatcttggcggagaatgggagatctcatcgggcagaataaccggcggtcacctatacgacatggccaaggagcacaatgctcttttggcctacacagagcatcgctactatggccaaagcaagcccttgccgtaagtgattctgaaaacaattgtgtgcttctaacgaaactattttccacgcctttaaagtgatctatcgaacgaaaacataaaatacctaaatgttaatcagtccctggccgatctggcttatttcataaacaccatcaagcaaaaccacgaaggtttgtccgattccaaggtcattattgttggaggttcctactctgccactatggtcacctggttcaagaagctctatcccgatctggtggctggaggttgggcttccagtgctccgctccttgccaaggtcaactttgttggtgagtttggcagttgtaacggctctttggtggcatacaatataaaccatactttcaacagagtacaaagaaatcactggccaatccatcgaacaaatgggtggatctgcctgctacaagcgaattgaaaacggcattgccgagatggagaccatgatagccaccaaacgaggtgcagaggtcaaggccctgctcaagttgtgcgaaccctttgatgtctacagcgatctggatgtttggactttgttcagcgagatttccgatatttttgcgggcgtggtccagactcacaagttcgtacaatacccggaatggtatttgggttagataagaaactaatatcccacttccagtgctggtcaaattgagggtgtttgcgagaagataatggccggttcgaatgatcttattggcgttgctggatatttgttggatgtattcgaggagagcggtggcaagtgctacgaccttagctatgatgcaattactgcattacttctggacactaattacaatggcaacattagtaagttcgcatgaatgatagctttaaaaagcttaacctttaaaagctgcttctgaataatttcagtgcgtcagtggatcttccagacctgcaatgagtatggttggtatcagacctctggttctagtgcccaaccatttggtaccaaattccctgttacctattataccaccatgtgtgccgatttatatggctcagagtacagcaacgagttcattagcaaccaagtgagcatcaccaatcagttctttggtggattatttcctaatgtggaaaacgtctacctcacccatgggcaattggatccctggagggcgatgggtattcaggacgaaactcaggccactattattccaggtgattagatgggactacatcaccgaattaggaatatttttactttttccgtgactttatagagcatgcccattgcaaggacttcaattcgatcagctcgagtgacactgctgaaatgagagcttccaaagaacgtattgccgaactggtacgcgagtgggttaaataatcgtagatatggtcgcaccgaatggaaaaccacaaataaaatttaacggattttacttataaacaaaccgataaacatcttcgttttaaaatttaatttaatgtttagggcttcatctaattaaaactatatgtcaacgaatcccgtaaactggctaaacattaatagaaaatgaaagctttgatttataaacaaaatctatagatcggcaaatctcatagattaggtaataatgttacggctgtgattttgattggccgacaataaattggaattttcaactaatccaatgtttcgatcgatttatgatggacagcgaatgcgaacatctaatcgcaacttaggaagctatcatatcatgtcgctggtcacttatcaactaattaatttacaatccttatcgtggtaggaaataactttagaatgtgacaccgttacctttaaaaccataatcgaacccgatagttgcctcatttgtgaaaatggctgctctgcgtttggtctgcctttttgtggtcttggccataggacttgtccaatccctggacattccgaagatcaaagatgtgcctcttttggtcaagactctaaagaatttgaaccgtggtccaccacaccaggtggtgaccaagcgtgccaatgtccaggagaaatggatcacccagaaactggataactttaacgcgagcaacacgcaaacctatcagatggtatgtatattcggaaggagaagtatattgctcagtaaaaatatccataagttcgaaacattcatttgagttagacaaaaataagataacaccaagagcttgaacacgtgccattttacacgtttcagcgttatttgctcaacgatgagtttcaaactgagggaagtcccattttcatttacctgggtggcgaatgggagattgaggagagcatggtaagcgctggtcactggtatgatatggcccaggaacacaatggtgttctcgtctacactgaacatcgttactat

SEQ ID NO: 40544 - DNA, 1500 bp, DROSOPHILA
atgaaactttggctaggcatttctttggctctgttggccctgggccaaacccatggtagcatctttgagaggactttcaaaaggatccacgaggagccaccactgccaaccactcagaatcgagctgatgtagttcaaaccctttggattgaacagaagctggatcacttcgacccggaagaaacgcgcacatggcaaatggtatattgcataatttggattgatacaaatcgggatgttttcttggacatgtacaatgtttatattaatttctttcagcgctatatgctcaacgatgcactttaccagtctggagcaccactttttatttatcttggcggagaatgggagatctcatcgggcagaataaccggcggtcacctatacgacatggccaaggagcacaatgctcttttggcctacacagagcatcgctactatggccaaagcaagcccttgcctgatctatcgaacgaaaacataaaatacctaaatgttaatcagtccctggccgatctggcttatttcataaacaccatcaagcaaaaccacgaaggtttgtccgattccaaggtcattattgttggaggttcctactctgccactatggtcacctggttcaagaagctctatcccgatctggtggctggaggttgggcttccagtgctccgctccttgccaaggtcaactttgttgagtacaaagaaatcactggccaatccatcgaacaaatgggtggatctgcctgctacaagcgaattgaaaacggcattgccgagatggagaccatgatagccaccaaacgaggtgcagaggtcaaggccctgctcaagttgtgcgaaccctttgatgtctacagcgatctggatgtttggactttgttcagcgagatttccgatatttttgcgggcgtggtccagactcacaatgctggtcaaattgagggtgtttgcgagaagataatggccggttcgaatgatcttattggcgttgctggatatttgttggatgtattcgaggagagcggtggcaagtgctacgaccttagctatgatgcaattactgcattacttctggacactaattacaatggcaacattatgcgtcagtggatcttccagacctgcaatgagtatggttggtatcagacctctggttctagtgcccaaccatttggtaccaaattccctgttacctattataccaccatgtgtgccgatttatatggctcagagtacagcaacgagttcattagcaaccaagtgagcatcaccaatcagttctttggtggattatttcctaatgtggaaaacgtctacctcacccatgggcaattggatccctggagggcgatgggtattcaggacgaaactcaggccactattattccagagcatgcccattgcaaggacttcaattcgatcagctcgagtgacactgctgaaatgagagcttccaaagaacgtattgccgaactggtacgcgagtgggttaaataa

SEQ ID NO: 40545 - protein, 499 aa, DROSOPHILA
MKLWLGISLALLALGQTHGSIFERTFKRIHEEPPLPTTQNRADVVQTLWIEQKLDHFDPEETRTWQMVYCIIWIDTNRDVFLDMYNVYINFFQRYMLNDALYQSGAPLFIYLGGEWEISSGRITGGHLYDMAKEHNALLAYTEHRYYGQSKPLPDLSNENIKYLNVNQSLADLAYFINTIKQNHEGLSDSKVIIVGGSYSATMVTWFKKLYPDLVAGGWASSAPLLAKVNFVEYKEITGQSIEQMGGSACYKRIENGIAEMETMIATKRGAEVKALLKLCEPFDVYSDLDVWTLFSEISDIFAGVVQTHNAGQIEGVCEKIMAGSNDLIGVAGYLLDVFEESGGKCYDLSYDAITALLLDTNYNGNIMRQWIFQTCNEYGWYQTSGSSAQPFGTKFPVTYYTTMCADLYGSEYSNEFISNQVSITNQFFGGLFPNVENVYLTHGQLDPWRAMGIQDETQATIIPEHAHCKDFNSISSSDTAEMRASKERIAELVREWVK

SEQ ID NO: 40546 - DNA, 3047 bp, DROSOPHILA
ataggaattctgttgaaagtcggaaacccgagcagattggcaactgatttccatcattctacctgatctagatcagatttgtttatttgctctttctaaatttggtatgcagagttcttgggaaattttggccaaaaatgaatgaaaatttgaagaatgaaatctgataaaatcaaagcaccattgataaaaaaaaagacggctgtttctcaccattacatagagaaaaattgtccaacgatattaatattttcactatatattatttatattcaagttctatattatttatggctagctttaaatgggatttcaaattctcttgtgcatcgttgttttctaacgactttattaagcgaaaattgtaaactaattatgcgctgccaaacgaaattcccgcgggacacaattagtgtgttttttattttttattttggacatatgctttccccggccgcaaaatgagcaaataaatcataaatgtttcattcaacgtaattgagccagaacttacccctaagttctccttctccgaggggcaggggtgggtcaccatgcctacacttctgtgaaacgagaaaaacaatgtaatccgagaaggttttttggaatgtgcgtaatattgtgtgaaggctgcgaggtggaaaaacttcttcagttttaggggttgtaatggctccgcctacgggaacaagtggaagtgaaacaaaacggtcaacggaacaaaattgaaatgaaacagattcaatgggggaatccttttaaatttatagttcatacaaatattgattatatacaaatataaaaaatatgtatttaataatattattgcctgatattatatattgcattatattacatttgtacaagcagttgtagttttctatccttaatttaaaatgagtagaatttatataaagtccgtacttatttttaatataacaagaaaagcacttcgaaaacgaacaataacaatttaacagcgtaaacgaaacgaaactcaaacctctttggccagcttatggacctggcgatagttgacgtccaccaatcgtatactgccgcccaccgtggccagcggtttcatcaagttgttcagggtggtggccaccggatcgaggatgtccctggcggagcacagtacattgtataggaaaatcagtggtggctgcaggtagccgttgaagagcatggtcaggaggggcttgagcaagtagtcggaggtcatgtggagcagtccaacgatcagggtgttcaccagggagtagaggacaaatcggtagctctgcagaatgaaggctaccacgaaggccacggcgatgtgcagcagtccgaagagctccgcccagaagtgggtggcataggtggtggcgcggtcggccaggacaatagcattgatcttcggatgcgagtccgtggtgctcagatagtcggcgcagccatgctcgaagggatagatgccgatgcaggtgtgccggttggcctccttgcgattccactgtggctccggcagatcgtcgatgatggaatttcggctctgcggctggcacttgcacatcttgtccagcgactccactaaacgggctagaaagccactcttctgcttctgcttctgcgcctgcgatgatttgtgggactttgtggcacgacccttcactttcggcgcagttctcgttgggacgagcacacggggacggcgcttggagtaacgctggaactcgatcctttggggcttgctcttgctcaggctaagctgactcttccccggctcagcgtgcatctcgtacagagtgtgtggtgagctccccgaatccgtggacgcggtcatttccccgtgcgccacatccttgaacatgttgtactgcgtctgactgtgctgatatgcgtcggaatcgctggaggagttcagccgtgggaagatcttcttcaggggagactgcagcttggccgtcacccccacgtggttcaccttgatcaggttggacttggaggtggcgcaatggggatcggttgattccgacatagtgactttatgttctaaacttatgacgtgccgcttcaaagccaactgacgtctttttcgtacatatgatctgaattcaagttaggcgtgccaaaaagttaacttataagctttttaccacagaagagaacatatactctttggcctagagacaagaatatataatttaatataaaaatgtatttttattattattggcttatgtctgtgctataaaacttttcatttccggtttgagccaccactacgtttgcaggtatgtttcggtatatttccggtagatggtgtacccgtcagtggtttcccttaccggcccccaaacggtcacactcgcccgagcatagcagatttggagaaaaaaacaactgtaattaggagccataattaattcatttcgaatcgcacacgcttttcagtttatctagccgaaagtacagaatgttggcctccgcctggcgcagcgtggccacctccgtggagacccagttgacggccacctacttccgaggttcgtccagcaatccgacactgctcctgcgttcctggcggacgattcctcgagcggatgcccctggtttcggagcgattcggcggcgttttctggctgtgcccgtcatctgtccaagtctcgtcaagcgtaatctatccgtacatacgtgtttaatctaatctctcccggtgctgcaatttcatttcccagtatctacgctttttgttcgtccgtagctagtcagtctgtttatctgttggccatctatgtagctaaatgtgaaaccatcgcttcgtttcagtgcaaaaactacgaaaagtcggcttcagaggcatgcacagcacattggaggacgtgcagctggagggcatggagatcaagatcctgccggccctgcaggataactatatgtatctgattgtagacacgaagacgcgcgaggcggccgtggtggatcccgtggagccggagctggtcattaagacggtgcaggagcagcagctgaccctcagcaaggtgctgaccacgcaccat

SEQ ID NO: 40547 - DNA, 1047 bp, DROSOPHILA
ataagtttagaacataaagtcactatgtcggaatcaaccgatccccattgcgccacctccaagtccaacctgatcaaggtgaaccacgtgggggtgacggccaagctgcagtctcccctgaagaagatcttcccacggctgaactcctccagcgattccgacgcatatcagcacagtcagacgcagtacaacatgttcaaggatgtggcgcacggggaaatgaccgcgtccacggattcggggagctcaccacacactctgtacgagatgcacgctgagccggggaagagtcagcttagcctgagcaagagcaagccccaaaggatcgagttccagcgttactccaagcgccgtccccgtgtgctcgtcccaacgagaactgcgccgaaagtgaagggtcgtgccacaaagtcccacaaatcatcgcaggcgcagaagcagaagcagaagagtggctttctagcccgtttagtggagtcgctggacaagatgtgcaagtgccagccgcagagccgaaattccatcatcgacgatctgccggagccacagtggaatcgcaaggaggccaaccggcacacctgcatcggcatctatcccttcgagcatggctgcgccgactatctgagcaccacggactcgcatccgaagatcaatgctattgtcctggccgaccgcgccaccacctatgccacccacttctgggcggagctcttcggactgctgcacatcgccgtggccttcgtggtagccttcattctgcagagctaccgatttgtcctctactccctggtgaacaccctgatcgttggactgctccacatgacctccgactacttgctcaagcccctcctgaccatgctcttcaacggctacctgcagccaccactgattttcctatacaatgtactgtgctccgccagggacatcctcgatccggtggccaccaccctgaacaacttgatgaaaccgctggccacggtgggcggcagtatacgattggtggacgtcaactatcgccaggtccataagctggccaaagaggtttga

SEQ ID NO: 40548 - protein, 340 aa, DROSOPHILA
MSESTDPHCATSKSNLIKVNHVGVTAKLQSPLKKIFPRLNSSSDSDAYQHSQTQYNMFKDVAHGEMTASTDSGSSPHTLYEMHAEPGKSQLSLSKSKPQRIEFQRYSKRRPRVLVPTRTAPKVKGRATKSHKSSQAQKQKQKSGFLARLVESLDKMCKCQPQSRNSIIDDLPEPQWNRKEANRHTCIGIYPFEHGCADYLSTTDSHPKINAIVLADRATTYATHFWAELFGLLHIAVAFVVAFILQSYRFVLYSLVNTLIVGLLHMTSDYLLKPLLTMLFNGYLQPPLIFLYNVLCSARDILDPVATTLNNLMKPLATVGGSIRLVDVNYRQVHKLAKEV

SEQ ID NO: 40549 - DNA, 3887 bp, DROSOPHILA
aaaatatggcatatatttaaatcgtttttatttcagacactattttaggcttttcttgaacgaaatttaaaagttatttaccaaaaactctaattaaaatggggttttaaacaatggctatcgcaatatttcgtaatacgccgaaggttatgctattaaagctaagtcaaaaacaaagtaatggaactcaaaaaaaaaaaataaacattctaaatatactgtgtagatattttagtgtataaatccggttatacacatatttgtatatgtatgtttctataggttttgtcttctaagttttgctaatagtttacttttttgatagagctataacgtttaacgtaactcttttgtttgcacttacataaaaatgatagggaatgaaattgattcatttttcttacatcattttaagaccttagcttattgaccaaggcccctaaaaaagtaaatatttggtaacaaaacaatgccaccaataaattgccacttttgcttatataggattaaattgtggaagattgcagggcacgtgtacatgtaaactattcaacaaactaaacttttatactattaagaaaattggtttcataaaaagtttgagaaattatttcatatcgattatgacctttcccttcaatattggagtttcatttaaattttaaaaccaaaagtaacgcaaagaagagtattaatctaatatataaacgtgggtatccaggctagttcaccaagaactttagtcaaatggtgtcccttaaaatttaacataatccactacttgctcgcttttttttaccttttaaatgaatccctcttttaaaatgtgtgtttataaacattgatataaataattgacggtttaaatcaagaaaatctgtatataacatttaaacatagttatataaatacgatatatacaatcagagacaatcttctttgtctttgcgtggacgaaacgcattctaatgaacctagatcaattaacgtgatgcaagacatgatacgaacaaagaaccctcgactttatcagtgtaatatatttccgatttttgtttgctttgcaattcagcgcccaaaggccctatctaaggttaatgttactgtcagtagcgaatattttccaataaatagtcggccaccgatggaggaaaatcattcgcaaacttgtgaactatccagcaatatgaagtataccctagtagtgctcgccctgcttgcacctctgactgcagcagctagtctgggtgaacagaaaccggaggcgaatgcgttcgtcaaatctctgagagaactgcaccgaggtcctccagttgaaccaatgaagaccagggctaaggtggaggagcgctggatcacccagaaactagataacttcgatgacagcaacaacgccacctggcaggatgtaaggattggcttcacataaagtatggtcagctttattcatagctttattttattccctagcgaatctatatcaacaacaagtacttcgttgatggctctcccatctttatctacttgggcggcgagtgggctatcgatcctagtgggattacctctggactatggaaggacattgctaagcagcacaacggctcccttctctacactgaacatcgcttctttggccagagtatccctataacgtgagttaatggtttccttactaagttccgtagagctaaagtaatacaactgctccatttagtcctctgtccactgagaatttggccaaataccagagcgtggagcaggccctggctgatgtgattaacgtgattgccacgctgaagcaggaggacaagtacaaggactccaaggttgtggtctctggttgctcctactcggcaaccatggccacctggatcaggaagctctatccggaaatcatcaggggcagctgggcctcgtctgcaccactcctggctaaggtgaacttcaaggactacatgaaggtggtcggcgagtcgtacgctacccttggaggacaatattgctatgatctgatcgataacgccacctcgtactatgaaaatctgttcgagattggaaatggcactcaggctgtgaaggaattgaacttgtgctccaactttaatgtaaacagcgaacaagaccgttggcagatcttcagcactattgcaaacatttttgctggcattgctcagtaccaaaagtaggtgatttgaaaggaccaaaacgatgtactaacattcattatttacccatagaccagagaaatatgatatacccacctactgctcgatcctgagagagttcagtgacgatgattctgttgctttgtccaagttcattaattggaaaatcaatgagcattccggagcttgccttagcacgacctttaagggagctgttggctactacgaatggtctaaggagaactaccaggatagtaggtgctacttgcttttagcatcatatatccttgttaaaacctatctttttgactctttaaggtgacttgccctggattttccagacctgcagcgagttcggatggttccagtcttccggcagcagaagccaaccctttggatccacttttccggccactctctatgaggacacctgcgagggggtctttggagcgaagtacgactcggctggcatccacgctaatatccgcgcaacaaacgatgacttcggtggcctaaacgttaatgccaccaacatctattttgtgcagggagctcttgacggttggagtaaggtgggtgctggagttgcccagggagccaccattatcccatacgcctcccattgtcccgatactggatcgatcagtgccagcgatagtgccgaactggtggcctccaagaaaaagctgatcaagctcgtggcccaatggctggaggattaatttctcgaacaacgattttaattagtttagaagatattgtcagtttttttgttttaaatgtataactatttaaccaccagtgattgaacctaataaaccgaatattaaatatataaaatttataatttttctaacattaattccatattgcaaccaaagaaacaatactttctttcaaattgcttatacttatcaatagtcctttataacaaaacctttatatttaaccttataaatacgctttatagtttagatgagattcttatctgaagcacccactctgcacaattaacaaataagttgagtgggttattctctgaaaatgcaagtagtttgcggagtggccatagaataataagatccccaaacattaaatcgcttagcaaggacagtcgcaaaactggtaaagctttctgtttctaaaacagctaaacgaatttattataccctcagctccgacagatttccaaatatgatgcaataaagagtgtaaatttatgtagctcacaaatccatcaaaaagctcgaagaggtgtgaccgacagtctatcgcggacatagacggtcccaaaaaaaaaaagtggggaatgatgatctgcggaggaagagcggagatcctacacccaatgaattgcactaaattcagaaacgtgctgggcatatcaagatctatggacagccggctacttaaagactttgcattgctttagaaaatgtcataaatctttttgttagtcgaaaccgaatcgagtcacgcattctaatgacccgggcagatccatttaacaagtcccaagtgaacttgttttcaacaatacaatttgcttataaatagcataaaatacaattaaatcgtgggtcttgtatcatttaaaatgtaactggtacagttcttacttcctctttgacattctttttggcatttggtgcttggtagcttggtagaatattggggaaagagggcaaacgaaaggccgattaaataccaatatgttgagtt

SEQ ID NO: 40550 - DNA, 1644 bp, DROSOPHILA
atgatacgaacaaagaaccctcgactttatcagtgtaatatatttccgatttttgtttgctttgcaattcagcgcccaaaggccctatctaaggttaatgttactgtcagtagcgaatattttccaataaatagtcggccaccgatggaggaaaatcattcgcaaacttgtgaactatccagcaatatgaagtataccctagtagtgctcgccctgcttgcacctctgactgcagcagctagtctgggtgaacagaaaccggaggcgaatgcgttcgtcaaatctctgagagaactgcaccgaggtcctccagttgaaccaatgaagaccagggctaaggtggaggagcgctggatcacccagaaactagataacttcgatgacagcaacaacgccacctggcaggatcgaatctatatcaacaacaagtacttcgttgatggctctcccatctttatctacttgggcggcgagtgggctatcgatcctagtgggattacctctggactatggaaggacattgctaagcagcacaacggctcccttctctacactgaacatcgcttctttggccagagtatccctataactcctctgtccactgagaatttggccaaataccagagcgtggagcaggccctggctgatgtgattaacgtgattgccacgctgaagcaggaggacaagtacaaggactccaaggttgtggtctctggttgctcctactcggcaaccatggccacctggatcaggaagctctatccggaaatcatcaggggcagctgggcctcgtctgcaccactcctggctaaggtgaacttcaaggactacatgaaggtggtcggcgagtcgtacgctacccttggaggacaatattgctatgatctgatcgataacgccacctcgtactatgaaaatctgttcgagattggaaatggcactcaggctgtgaaggaattgaacttgtgctccaactttaatgtaaacagcgaacaagaccgttggcagatcttcagcactattgcaaacatttttgctggcattgctcagtaccaaaaaccagagaaatatgatatacccacctactgctcgatcctgagagagttcagtgacgatgattctgttgctttgtccaagttcattaattggaaaatcaatgagcattccggagcttgccttagcacgacctttaagggagctgttggctactacgaatggtctaaggagaactaccaggatagtgacttgccctggattttccagacctgcagcgagttcggatggttccagtcttccggcagcagaagccaaccctttggatccacttttccggccactctctatgaggacacctgcgagggggtctttggagcgaagtacgactcggctggcatccacgctaatatccgcgcaacaaacgatgacttcggtggcctaaacgttaatgccaccaacatctattttgtgcagggagctcttgacggttggagtaaggtgggtgctggagttgcccagggagccaccattatcccatacgcctcccattgtcccgatactggatcgatcagtgccagcgatagtgccgaactggtggcctccaagaaaaagctgatcaagctcgtggcccaatggctggaggattaa

SEQ ID NO: 40551 - protein, 547 aa, DROSOPHILA
MIRTKNPRLYQCNIFPIFVCFAIQRPKALSKVNVTVSSEYFPINSRPPMEENHSQTCELSSNMKYTLVVLALLAPLTAAASLGEQKPEANAFVKSLRELHRGPPVEPMKTRAKVEERWITQKLDNFDDSNNATWQDRIYINNKYFVDGSPIFIYLGGEWAIDPSGITSGLWKDIAKQHNGSLLYTEHRFFGQSIPITPLSTENLAKYQSVEQALADVINVIATLKQEDKYKDSKVVVSGCSYSATMATWIRKLYPEIIRGSWASSAPLLAKVNFKDYMKVVGESYATLGGQYCYDLIDNATSYYENLFEIGNGTQAVKELNLCSNFNVNSEQDRWQIFSTIANIFAGIAQYQKPEKYDIPTYCSILREFSDDDSVALSKFINWKINEHSGACLSTTFKGAVGYYEWSKENYQDSDLPWIFQTCSEFGWFQSSGSRSQPFGSTFPATLYEDTCEGVFGAKYDSAGIHANIRATNDDFGGLNVNATNIYFVQGALDGWSKVGAGVAQGATIIPYASHCPDTGSISASDSAELVASKKKLIKLVAQWLED

SEQ ID NO: 40552 - DNA, 4825 bp, DROSOPHILA
gcggcctttttgtagtagttctttcgctgacgctgttcccgaacgtgctctctcagcagctgctgcacatactcatcttcggtgatagtgggatcgtcgctttccgtgtcgctcaagaggagatcgtatagccactcccgatcgctggtcagatcgttgaagttataaagctgtgctttgacactttgtcgctctgttgggggaaattttaggaggtgtactaaactgctccagataccaactcaccttccttgctggccaacagacgactcttccgcttgctggactgtttcatccggaccacgcccacggtggaggagtcatcagagtcttgtacatcgtgttccctcttgaccacatgctcgtcgtccgtttcctcgtcgctactcagtggcttccgcagacttcttttggccatgttcatgaagggtcgcatgttgagtgccgcctccaagcgctggatgtgcagcggctccgccatggcacgggggcgtggctggggtgccggcacgggcttggcttccatggcagcagcgattttagtcagcttttacaaacaattatcacgtaattttgcttttatgcggcatgcacagaggtaaacaacagtatgaccgcagcgagatcggcgaaaaaataccattgagtaaccctcatatcggcatccaacgccattcgcacagtgggcttgactaccacaaatataatataattgctatccccataaatcgttattaaaaaagttcacaaaattacaaattttaaaatacataaatgcatgaaaaaagttatgtatattacactgtttttgaacttaataacatattttcagaggaataaataggaagcagctctacctatatacgttttccaacactaacattcagctgttagaggttttgttttgttttcagtttgtgcagttggagacgatgatttaatagtctgtagggtcgtgagacgtcgatagttatcgatgtttatgttgccagctgtgcggcactgggatgtcaactgccagtaagaaaagaaagcagttcttagcaagttaacaaataaataaatgacaaaataataacgaaatatataataacaaaataaataacgaaaatatttgcttttgtgcaaatacgctcacagaaatcgataaaagtctcgccgttgctgcaattccaagcaaatcaggcagtagcatttgtgatgtcctggtcaagtgcactaatcaaagatatctcgaaaccagaaaatttgatcatttcgtcagaaatcgcagtggtcatagcagacaagtttcccaaggcgcagcatcactacttggtgctaccattggccgacattcccagcatctttcacgtgcgcaaagattgtgcttccgtctccatcgttttactattccaagtaacatttttctcgctccgtttagttgaaccggagccatctgtcgcttttggaggagctgcatctgctggccaggaacgttgtggaagtgaaaggagtccggtggcaggacttcaacgtgggatttcacgcggagccgagcatgcaaaggctccacctgcacgtcatctccaaggacttcgtatcaacaagcctgaagaccaagaagcattggaactcattcaacaccgagctgtttgtgccctacacaagtaaggctattagaacacggcgcaggctacaggcttcatgagcgaaaaacagataaatcgaatgatctagttagaaaatagagatttgccggcggtgccaatttttatgagcattcccatatagaaagtgtggcagtattagctaatctatttgaatttttttatatatattttttttttagagctttacgcccagctggagaaggagaatagcatttcgcgactcccgaaatcactaaaagacgagctgctggccaagccactcatttgtaatcagtgcgagtttgttgcaagaaatttgccatcacttaaggggcatctggtggggcaccttcaagatccgaaatcagtttgccagcgagtccgactagggaaccagttctttcccacagctggttacagaacgtcagaacttgcatattgtttcgatttcgtggatttctacgaatacaaaaagcaaatggaggtggataaattggcatatatccgagatgagctgcagcgcaagctaaatgataagaggaacttccttatcgagagtgaccgggcggtggtcatgaaagcggactatcctaaatcgcaataccactttagggtggtggccaaggaagagttcagggatataactcaggtgggttagtgcaaagacattagaaatttttctagtgtgtgattagtggcaggaggttgaattgactatttatgctccttccccataatcagctaaccgaagcgcagctgcccctgctggatcacatgatggatctggcgaatcaaatcatcgagaagcagaaacacctggagtcgcgtaattttctcatcggtttcaaagtcaatactttctggaatcgtctaaatctacatgttatttctaacgacttctattccatggccatgaaacgtataagtcactggaatagtttcaatacggaactatttatgccctttcaaattgcgtatatgatgctcagtgttcagggatccattgaatccatttcggaggagacgtacaataatttgcaagagaagacgccattgcgatgcaaccagtgcgaatttgttactaatatgttgctggatctaaaagctcacctgtatcagcactggcagcgcaaggaggacgagcgcgatcagaagaaaaaagtcgataaaataatccaaatgatatctgagaccaaactggatgaggcagaggcaaagccgaagctgttgaatgaagaggaacctattcaagctcagcccgttgccgctatcgcccagtatcccaatgaacatctaggcaagcccttaacgccgcaacagcagccgggcaagcagcaggcccagaatgtttacgacaaaaacattaacgggccttctgtgaatatgatgaatcagaacaatcccaacaatccgttccggaacactccgcaccttaatagacaatcacagaaaccgccgcatccccgctctgggccccgtggaccaatggctccttggactggtccgcgctttccgtgtcatcaacagcagaacagattcaggcctccaggatttaacgcatgtcggcaaccttatccaccctatcattcaggccatcagcaatttccgaatgcttcatcagtcggcggcggtcaaactgggctgccaggtcagggacagggacctagaccgaaatggaattcaaataagatattcaatcaacagaaccgccaaaatacagtccaagcccagccacaagcccagaaccaacaaaccaaccagcagcagattcaaaattcgaataaaaaccaaactccaaaaaaaaagccatggaaaaatcgcctgcaacctgtaggcaaagttcagaatcaaggcggagcgaatcgcgatcccgcacctccaagtaactcgaaaccatcttaggatgatttatcctattgaaacaattcctaattccaaattcccaacagcagttggtaaactaccagaaagactttagatccacacaaatcgttcccaaattggcattttgcaataaacaagatgaaggcaggaagaaaaattaagaaatcacttgggattctacaaaatcaaacgatttcaaaacagcgcaactcctagaatatttttcccatatgaattttttttctgtatgtcatattttaaaaataaagttcttgtgagctcttgggagttcgcgaaaattttgtaaagcagatatcgctttaattgtcactttgccacccctccacccattcctgcgctcaattaaagtgctctggccaactggaaaaacagccacccacggctaattaagcagtcaccgaggagaatcgccagcatcagcaatgctcctcctccagcgccagttggagctgttattaaattatgattctgaattcgaaaagtcgacgaagtttgtcgggtaatcagtgtcccagtgggagagggataactttacagtggatggccgcttgaattggataggtataccaaaaaatgttaaaacaaatttctttgttagtaatagttttaacatttagacaccgaattggacttgaatggtttaagctataattaggcccagttaagctcattttactccctctaattatattatgttctaaaatgactgcgcctcttaacaatttaaactagttaattagttaatttgcagtaaatgtcatatgctgggctcatcagccattcattttacactttacaaggcggaacatagggctaacagtgcataaagccacttgccgttcttagaagctaatacacatcggaccataaacaacattcaaggcaacatccctgcgatagacgaggtcctcgtgtgtttctagcaggtatttaaattttctagtgggttacagtatcaaggtgtcccaaagctagcagtggttccaaaacgacagctccatcgatatgcctcagggttgaacttgctaccaccgttgggctccagtttcggtgagcaatcaacagctccattaaagctatctctcccagccttgccacctgttatgtctcgagcaacaggaggccattcataaaggacgttacttcggagcagtggaaagcagagagaaaggctcactggcaggactcgctgtgagtaccactcgacttgagttctttttccatgcgcatgcccgcagacgaaagctttatagtatggacaaggaagaggtccttttgaggggaaatgc

SEQ ID NO: 40553 - DNA, 2550 bp, DROSOPHILA
cactgggatgtcaactgccagtaagaaaagaaagcagttcttagcaagttaacaaataaataaatgacaaaataataacgaaatatataataacaaaataaataacgaaaatatttgcttttgtgcaaatacgctcacagaaatcgataaaagtctcgccgttgctgcaattccaagcaaatcaggcagtagcatttgtgatgtcctggtcaagtgcactaatcaaagatatctcgaaaccagaaaatttgatcatttcgtcagaaatcgcagtggtcatagcagacaagtttcccaaggcgcagcatcactacttggtgctaccattggccgacattcccagcatctttcacgtgcgcaaagattgtgcttccgtctccatcgttttactattccaagtaacatttttctcgctccgtttagttgaaccggagccatctgtcgcttttggaggagctgcatctgctggccaggaacgttgtggaagtgaaaggagtccggtggcaggacttcaacgtgggatttcacgcggagccgagcatgcaaaggctccacctgcacgtcatctccaaggacttcgtatcaacaagcctgaagaccaagaagcattggaactcattcaacaccgagctgtttgtgccctacacaagctttacgcccagctggagaaggagaatagcatttcgcgactcccgaaatcactaaaagacgagctgctggccaagccactcatttgtaatcagtgcgagtttgttgcaagaaatttgccatcacttaaggggcatctggtggggcaccttcaagatccgaaatcagtttgccagcgagtccgactagggaaccagttctttcccacagctggttacagaacgtcagaacttgcatattgtttcgatttcgtggatttctacgaatacaaaaagcaaatggaggtggataaattggcatatatccgagatgagctgcagcgcaagctaaatgataagaggaacttccttatcgagagtgaccgggcggtggtcatgaaagcggactatcctaaatcgcaataccactttagggtggtggccaaggaagagttcagggatataactcagctaaccgaagcgcagctgcccctgctggatcacatgatggatctggcgaatcaaatcatcgagaagcagaaacacctggagtcgcgtaattttctcatcggtttcaaagtcaatactttctggaatcgtctaaatctacatgttatttctaacgacttctattccatggccatgaaacgtataagtcactggaatagtttcaatacggaactatttatgccctttcaaattgcgtatatgatgctcagtgttcagggatccattgaatccatttcggaggagacgtacaataatttgcaagagaagacgccattgcgatgcaaccagtgcgaatttgttactaatatgttgctggatctaaaagctcacctgtatcagcactggcagcgcaaggaggacgagcgcgatcagaagaaaaaagtcgataaaataatccaaatgatatctgagaccaaactggatgaggcagaggcaaagccgaagctgttgaatgaagaggaacctattcaagctcagcccgttgccgctatcgcccagtatcccaatgaacatctaggcaagcccttaacgccgcaacagcagccgggcaagcagcaggcccagaatgtttacgacaaaaacattaacgggccttctgtgaatatgatgaatcagaacaatcccaacaatccgttccggaacactccgcaccttaatagacaatcacagaaaccgccgcatccccgctctgggccccgtggaccaatggctccttggactggtccgcgctttccgtgtcatcaacagcagaacagattcaggcctccaggatttaacgcatgtcggcaaccttatccaccctatcattcaggccatcagcaatttccgaatgcttcatcagtcggcggcggtcaaactgggctgccaggtcagggacagggacctagaccgaaatggaattcaaataagatattcaatcaacagaaccgccaaaatacagtccaagcccagccacaagcccagaaccaacaaaccaaccagcagcagattcaaaattcgaataaaaaccaaactccaaaaaaaaagccatggaaaaatcgcctgcaacctgtaggcaaagttcagaatcaaggcggagcgaatcgcgatcccgcacctccaagtaactcgaaaccatcttaggatgatttatcctattgaaacaattcctaattccaaattcccaacagcagttggtaaactaccagaaagactttagatccacacaaatcgttcccaaattggcattttgcaataaacaagatgaaggcaggaagaaaaattaagaaatcacttgggattctacaaaatcaaacgatttcaaaacagcgcaactcctagaatatttttcccatatgaattttttttctgtatgtcatattttaaaaataaagttcttgtgagctcttgggagttcgcgaaaattttgtaaagc

SEQ ID NO: 40554 - protein, 685 aa, DROSOPHILA
MSWSSALIKDISKPENLIISSEIAVVIADKFPKAQHHYLVLPLADIPSIFHVRKDCASVSIVLLFQVTFFSLRLVEPEPSVAFGGAASAGQERCGSERSPVAGLQRGISRGAEHAKAPPARHLQGLRINKPEDQEALELIQHRAVCALHKLYAQLEKENSISRLPKSLKDELLAKPLICNQCEFVARNLPSLKGHLVGHLQDPKSVCQRVRLGNQFFPTAGYRTSELAYCFDFVDFYEYKKQMEVDKLAYIRDELQRKLNDKRNFLIESDRAVVMKADYPKSQYHFRVVAKEEFRDITQLTEAQLPLLDHMMDLANQIIEKQKHLESRNFLIGFKVNTFWNRLNLHVISNDFYSMAMKRISHWNSFNTELFMPFQIAYMMLSVQGSIESISEETYNNLQEKTPLRCNQCEFVTNMLLDLKAHLYQHWQRKEDERDQKKKVDKIIQMISETKLDEAEAKPKLLNEEEPIQAQPVAAIAQYPNEHLGKPLTPQQQPGKQQAQNVYDKNINGPSVNMMNQNNPNNPFRNTPHLNRQSQKPPHPRSGPRGPMAPWTGPRFPCHQQQNRFRPPGFNACRQPYPPYHSGHQQFPNASSVGGGQTGLPGQGQGPRPKWNSNKIFNQQNRQNTVQAQPQAQNQQTNQQQIQNSNKNQTPKKKPWKNRLQPVGKVQNQGGANRDPAPPSNSKPS

SEQ ID NO: 40555 - DNA, 5216 bp, DROSOPHILA
ataatttgtagaagaactaaccaggaatgggctaacctacttttgtagttagggcgatacttacttgctttacaaatgaatgtctgcacagcacaaatcaaataatcaataaatcttataactatttaaacttaaatgtatttactcataataaacaaccaagtaaatatacccaaataggtaattattacttcaaagtgataagtataagcatgcaaacagcccatctcgatcccactgcagagttgagtgcttgcaaaagctcgtcacgtcataagcggcaacagttgggttcagtttctggttctgtgtgctcagaacgcagtgccccactgtgagagcgaagggaagaaggggtgggacagtcagctgggggtcgattcggggtgggggctcggctcgttctcggcgcagagctagaagtgcaggcaaccgtgggcagagtgccacacttatgctcacacaagcacccaagcacacagtcgccccttcgcacacacacacacacacacatacagatcgacagctttgtattgacgcacttgaacgggctgtttctagttaccgattcacagtacacgcttctacactgggagaaaatatgcatgtccgcaaaatccttatcaactctcgaatcttttctcgcagccattataacgagttttaatactaaatatgcatagaaattcaaaatataaacaataacaaaaacaaaaacgatatttggatgttatagaacactcttagttttagcctgcgtttggttttgcccaacttaaactttggttataatatatataatatatggaagtaagtactttttttcagtgtgcggttcccacaggtctctttctcgccatctctgttgcactcaccgtacttatgcgattcattttagcttataacgccgaacacggggaacgttgagctgcagttgtagaaacgttctcagcactcaaatttcgcattcacattctcattcgtcaattagttgccggcgcgagcgaatcgtgagtgcggaaaaaagaaaatcttttcatcagctggaaaactgttcttcccgatcaaaactgggattcgggagatttttgaagcccaaaagcagggaactcctcactgatggccacgcgaggggcgaatgtgatttggtttcgccatggattgcgcctccatgataatcccgctctattggccgccctcgccgataaggatcagggtatagccctaattcccgttttcatattcgatggagagagtgcaggtaagaactgagttttcgaaaattttatttcgttgcgcacacatacatgtaggtatccaaattaaattgattacaggtaaccttgaacttaccttgcactttcctaagttattacttcaaaacttttatatgagatatggatatctcatggagatatatttaaaatattaagataatcttaaaataattaatagatagcaaaacatcaaagataaaatattatatctatatatatttgctcatacaaaatcatcagaagtttgtgtaaaaatagatttttggaaagagtttgaaaattcaacaaaattaaaataaaaaaccgttggcaacagagggttaaaataaatacttttagtttgattgctattacacgctcattctccgtatgagctaatatcattttttgcgacttgcatcggttatcacataccacctctttccgcgaccgctgcgaattcagcgttttcgctgcttgtgaaaatggaaagagggcgagagctgcaggggcggaaaatggagggaaaacctaatgcacttttgcatggtagagcaaaacaaacgatgcgccctaatgccatttgtggctggcggttttgagaattttccgtcgaatcgctgggagagagatatagaaagacaatgcaaaatgggtagagacattgagtgcaaaccagaatagcagtataatgcttgtgtttaaacagctcgctcacggaaaaagtcggcgagaaacggggatacctatagaacccatcacttgaccgataagcgtcgttttgtgggtaaaagcgtgaaaacaaatattacaatggaaaatgggctaaactgaaccatttgtttgcacaaaagctgaaaatttatctaaaaggtggcacttaaacacacaaacttgttttgaattcctagttttgcgaaaattgtgcacgaaaaaactttgaaaatgcataattttttttaaatttataaatcttataaaaccgttaaatgctcttccttaacaggtaccaagaatgtgggttacaatcggatgcgtttcctcctggactcgttgcaggacatcgatgatcagctacaggcggcaactgatggacgtggacgcctcctggtcttcgagggcgaaccggcttatatcttccgccggctacatgagcaagtgcgtctgcacaggatttgcatagagcaggactgcgagccaatttggaatgagcgcgatgaaagcatccgttctctatgtcgggagctgaatatcgactttgtcgagaaggtatcacacacgctttgggatccgcaattggtgattgagaccaatggtggcattccaccgctgacctaccaaatgttcctggtgagtttaaagctcagttctctagttataatattcttttgagaatatatctttaaaataaatgtaaaaatataactatctgaaaattatatagtcactgaaagatactaattatttacatcaaattatattttcgtttattttattatgttttagcacacggtgcaaattattgggcttccaccgcgtcccaccgccgatgctcgactagaagacgccacctttgtcgagctggaccccgagttctgccgaagtcttaagttgttcgagcagctgcccacgccggagcacttcaatgtgtatggagacaacatgggcttcctggccaagattaactggcgcggcggagaaacacaggccttacttctgttggatgagcgtcttaaagtggagcagcatgcgtttgagcgtggattttatctgcccaaccaggcactgcccaatatccacgactcgccaaaatcgatgagcgcccatctgcgctttggttgcctttcggtacgtcgcttctactggagcgtccacgatctcttcaagaatgtccagttgcgcgcctgtgtgcggggcgttcagatgactggcggcgcgcacatcacgggacagttgatctggcgagagtacttctacaccatgtcggtgaacaatccaaactacgatcgcatggagggcaatgacatctgcctgagcatcccgtgggctaagccgaacgaaaatctcctgcagagctggcgtttaggccaaacgggattcccgctcatcgacggcgccatgcgacaactcctggccgagggatggctccaccatacgctgcgcaacaccgtggccacctttctcacgcgcggcggtttgtggcagagctgggagcatggactgcagcactttctgaagtatctgctggatgcggattggtcggtctgcgctggcaactggatgtgggtatccagctcggcgtttgaaaggctgctggactcctccctggtcacctgcccggtggcattggccaagcgacttgatccggatggcacctacatcaagcagtacgtcccggagttgatgaatgtgcccaaggaatttgtgtaagtttatataatgaaaattccatataacaatttaagtacttagatataataaaaatactgatggtatacttgtcgtatacgcaatatatgatgactcctttgtcgtctttacttatgattcgttaaagtgttcaacaatctcaagcaaccatttgaactatatatatttttaattcgtttattcgtgcttttgttatattttttaaattataaatcccattttatattttcagtcacgagccctggcgaatgtctgccgagcagcaggagcagtacgagtgcctgatcggagtccattatccggagcggatcattgatttgtccatggccgtaaagcgaaacatgctggccatgaagtctctccgaaattcgctgatcaccccgccgccgcattgccgaccatccaacgaggaggaagtgcgtcagttcttctggctggccgacgtggtggtttgaaggagtacaagtgggatgaccaatccaattttaattcgatttcacaataaagaaactattaccagtgaaatattatatataattaataatgctttattttcttcaattaaaataagtactacaatacaatttgtatccgttttatttggtttcgttttacttttaacagcttataacgtgttactcatatatcaattttattcagcttattttaaaaatcgtttatggtgtatatatatataattattattatcatctgtattacgttgtcaaattatacgttaattaacagcattaattaaatagtttttgcttttaattgggtctttcatacgagaaaaattgaacgcgaagtatttcaaatattgaaatttattttatgtcgatctattgatcctggcttcgtttgcctttcgtttaatgagagattctatctttataatttgtctaaattgttgtgtatattttattttaatgcctaaattttggtgttccttctagatgtgtgcctttcgaatgagatattggtaggggttgatgggacctaaaaggagttattgttgaagtttgagtccctcgacagtttgctacaaataaagtttgagaaaatctaaactcgaccacgccgagcttttcgctcattcccctaccagcgacttaatcgcaatagtcctttgtaggaagtaagcattcgttttagacattcgacatcctgcgaattagttgaagtaaattcgagtaaacatttagagcgttgcttggcaaaaagttatttttctggtaaatgtaaatttcacacacacacacattgcgtaatatacgatagctgaataaataatggaaccaaccaattcaatcaacaaacgaacaaggaaggaacgagaactcacagaaaataacaatttgatgcaatttatactttatggaatatctcgtaacgcattatacttttatcaatattatattttttaagtactctccccagcttcaagtgtcctctctgtatgtatgtacaaatgtatagtattgtgctgatgcagatgcattcggtgtgctaagtggatgtctgtgtgtt

SEQ ID NO: 40556 - DNA, 1823 bp, DROSOPHILA
cgagcgaatcgtgagtgcggaaaaaagaaaatcttttcatcagctggaaaactgttcttcccgatcaaaactgggattcgggagatttttgaagcccaaaagcagggaactcctcactgatggccacgcgaggggcgaatgtgatttggtttcgccatggattgcgcctccatgataatcccgctctattggccgccctcgccgataaggatcagggtatagccctaattcccgttttcatattcgatggagagagtgcaggtaccaagaatgtgggttacaatcggatgcgtttcctcctggactcgttgcaggacatcgatgatcagctacaggcggcaactgatggacgtggacgcctcctggtcttcgagggcgaaccggcttatatcttccgccggctacatgagcaagtgcgtctgcacaggatttgcatagagcaggactgcgagccaatttggaatgagcgcgatgaaagcatccgttctctatgtcgggagctgaatatcgactttgtcgagaaggtatcacacacgctttgggatccgcaattggtgattgagaccaatggtggcattccaccgctgacctaccaaatgttcctgcacacggtgcaaattattgggcttccaccgcgtcccaccgccgatgctcgactagaagacgccacctttgtcgagctggaccccgagttctgccgaagtcttaagttgttcgagcagctgcccacgccggagcacttcaatgtgtatggagacaacatgggcttcctggccaagattaactggcgcggcggagaaacacaggccttacttctgttggatgagcgtcttaaagtggagcagcatgcgtttgagcgtggattttatctgcccaaccaggcactgcccaatatccacgactcgccaaaatcgatgagcgcccatctgcgctttggttgcctttcggtacgtcgcttctactggagcgtccacgatctcttcaagaatgtccagttgcgcgcctgtgtgcggggcgttcagatgactggcggcgcgcacatcacgggacagttgatctggcgagagtacttctacaccatgtcggtgaacaatccaaactacgatcgcatggagggcaatgacatctgcctgagcatcccgtgggctaagccgaacgaaaatctcctgcagagctggcgtttaggccaaacgggattcccgctcatcgacggcgccatgcgacaactcctggccgagggatggctccaccatacgctgcgcaacaccgtggccacctttctcacgcgcggcggtttgtggcagagctgggagcatggactgcagcactttctgaagtatctgctggatgcggattggtcggtctgcgctggcaactggatgtgggtatccagctcggcgtttgaaaggctgctggactcctccctggtcacctgcccggtggcattggccaagcgacttgatccggatggcacctacatcaagcagtacgtcccggagttgatgaatgtgcccaaggaatttgttcacgagccctggcgaatgtctgccgagcagcaggagcagtacgagtgcctgatcggagtccattatccggagcggatcattgatttgtccatggccgtaaagcgaaacatgctggccatgaagtctctccgaaattcgctgatcaccccgccgccgcattgccgaccatccaacgaggaggaagtgcgtcagttcttctggctggccgacgtggtggtttgaaggagtacaagtgggatgaccaatccaattttaattcgatttcacaataaagaaactattaccagtgaaatatta

SEQ ID NO: 40557 - protein, 542 aa, DROSOPHILA
MATRGANVIWFRHGLRLHDNPALLAALADKDQGIALIPVFIFDGESAGTKNVGYNRMRFLLDSLQDIDDQLQAATDGRGRLLVFEGEPAYIFRRLHEQVRLHRICIEQDCEPIWNERDESIRSLCRELNIDFVEKVSHTLWDPQLVIETNGGIPPLTYQMFLHTVQIIGLPPRPTADARLEDATFVELDPEFCRSLKLFEQLPTPEHFNVYGDNMGFLAKINWRGGETQALLLLDERLKVEQHAFERGFYLPNQALPNIHDSPKSMSAHLRFGCLSVRRFYWSVHDLFKNVQLRACVRGVQMTGGAHITGQLIWREYFYTMSVNNPNYDRMEGNDICLSIPWAKPNENLLQSWRLGQTGFPLIDGAMRQLLAEGWLHHTLRNTVATFLTRGGLWQSWEHGLQHFLKYLLDADWSVCAGNWMWVSSSAFERLLDSSLVTCPVALAKRLDPDGTYIKQYVPELMNVPKEFVHEPWRMSAEQQEQYECLIGVHYPERIIDLSMAVKRNMLAMKSLRNSLITPPPHCRPSNEEEVRQFFWLADVVV

SEQ ID NO: 40558 - DNA, 3343 bp, DROSOPHILA
gcaagcgggcgtttgaaccgtatactttcccctttttcggtccgttctcaaagcctcaattgcagaggaatgtacgaatgctaaggttgttcccattcgcattttttgcgagtcaatttcttgcacgtacaagacgccaaaggaagaaacgcaaagccggaaaactttgtttttattttcgcagacttaggagcgcttccctcgcctcatcttactgatcccacttgaaaaagactctgcaggcgaccgcaaaacgtttctccatatacatttcagccaaactggagggctggaggagttagacgtgaccgagaagaagaattaggtgggcggaccgtcaaaaaggaagaggcaacttgaaaccgttttagttgcaactttatttatttatcaactatatgctaatgaaaccagtgtgcggtggctgccttctcttcctcttcctctgctgccacttccgtttccgctgtgtccccacatacatacatacacacatacattatatataacgtatacgtacaagcaaacacagtttcaggcacaaacaatggttcccgctccactgccatccgctgattattccagtggttagctgctctcttcctgtcactccaacatccccagctgccctaaccaccctaccaagtcccaataagaagctttaatatttgacacctgttttgggcattcgcacttcattttgggggaaggtgtgtacttaaaaaaaatccgaataacaacttaaaaaacccgactataatagaattattttctttattgcatctcaagtccttagaattgtttctatattttagattattagaaaatttatttaataatgttttaccttactagttttatcatagatttttgggtaactaacttcttgttaataaaaatacataaagtaaatattcaccaattaccataattagtcttacctatttttcccagtgcaaacgcagcctgcggacctgggaaatcattagacagctgtcatatgcagcatttggtgggaccacatctgtgcggttaggcagaggtagattgtctggggattggagtaaggtatgctccaccattaaggacgagtcaagtgggcaacagggaattcttgagaaatatcttagggggccagcagattgctcttaatgtataatgtacatttgattaggccttcgtaactcaattatgctgcgaattattcagttgttactcaatttagaaaaaaagatatactaaattatattattatcaattcatttcagtgccgatcgcagtcgcgatggcattctgtcaatccaggaattggggcagtacataaatcgccggattgtggagcacattgatgaggcgattatgaacaatgcccgcgagttccgacgcgtggatattggtcctgcggatggtctgatcacctgggacgagtaccaccgcttcttccttagggagcacggcatgacagaggcggacatcgatgagcatgacgagattcgccacacggcgctgaaccgcagggccagggaggatatgatgagggacaaggcccggtggtcggaggcagctcgaaccgatctgttcacactgaccatcgatgaatacctgagtttccgccatcccgagtccagtgtatccaatctcttggagctggtcgatgatctgctgcgccaattcgatcaggatggagacgatcagctaaccctggaggaattttccgatctgaatgtggatgatgacgatgatctgatgcgaaaatctctgatatcgaagactttggtggagcgacgcgaggagttcaagcggatcatcgataagaatcacgatggcaaggcggatcggggtgagctactgaactatgtgaaccccaagactccgcggtatgccctccaggaggcggccactttgttcagcctgtgcgacgagaacaaggacgagctgctgaccctcaaagaggtaatgaaatgcaatcgtttcaataagatttttataataatataatattatctactaatccttatgtttagatgactgatcatgccgagatatttctgcaatccaagatgatcgatacggcgaatagttttcacacagagttctagcttaattctttaccatcactaaacctttcaccctttaagcatttatagtgatattaatttgtaagttatggcacctaaaatagctaatttagtagcaaagcgtctttttgttaataatttctttaaactacttggatcagatgtaaagcaagatgatgtaagaaaatcatttcccgtgtgatttttcaataattagcttttaaggacacaaatactctccgaataaatatacgtaattgtacggaatttccaggttgcctttttatgggattaaattgtacaccctcgcatttattacccaatcacctcgcctctcttatctctgattacaaatgatttgagctttttaacaaagtatgaaattaaatttcagccgccatcgaaatcctcttaaggacatcttccatttgagctgacaaatcactccacattaaggataagtccttgttcaatttgtttgtttcgtgctgtcccagctccttgcctgctcactgatgataaacaaggcaggggactgactaatgataaataagtgtcacttgcaaaaatttccatggaatcctgttgcccctgccatgctaaaggtggataaatattcttgagatggaattttacaagcaattgactttctgatgggtgttaatacctccctaatctccccatttatccatccaggctgactaggaaaagcatttaaaatgtacggcaaatagtgatggattagttgtactgagctacgaacaggagcatcagccggatgttctgactacgtgaagtgtgtgcgtgccgtcggagaattccgtccggataacgctacgggaataataatcttcagtccaagtcgcatctcatcgcatcagggtaaggcggatccgggggatcgccatcctttatccgacaatagacatgcggtgggtaattgaatctaattgttcgggagcgcagataatgagcacgtaaaacgcaagaaccaaaaacaggaaagccataacacgtctatggcatctgaatccgagtcagcaaactaaacgtatataagcaaaaacacatcaattcgcttaataagatacagacgtaggacatgcaaacaggactacgcatattatatgagctggggccaagataagtgaggtaagaacaaatgaatggggtgtggaaagtgtcttgataagtgggaaagtgttgcgtaactgatgcgcataaaattagctcataatcacttaccttcagatctatgacactag

SEQ ID NO: 40559 - DNA, 1030 bp, DROSOPHILA
atgcagcatttggtgggaccacatcttgccgatcgcagtcgcgatggcattctgtcaatccaggaattggggcagtacataaatcgccggattgtggagcacattgatgaggcgattatgaacaatgcccgcgagttccgacgcgtggatattggtcctgcggatggtctgatcacctgggacgagtaccaccgcttcttccttagggagcacggcatgacagaggcggacatcgatgagcatgacgagattcgccacacggcgctgaaccgcagggccagggaggatatgatgagggacaaggcccggtggtcggaggcagctcgaaccgatctgttcacactgaccatcgatgaatacctgagtttccgccatcccgagtccagtgtatccaatctcttggagctggtcgatgatctgctgcgccaattcgatcaggatggagacgatcagctaaccctggaggaattttccgatctgaatgtggatgatgacgatgatctgatgcgaaaatctctgatatcgaagactttggtggagcgacgcgaggagttcaagcggatcatcgataagaatcacgatggcaaggcggatcggggtgagctactgaactatgtgaaccccaagactccgcggtatgccctccaggaggcggccactttgttcagcctgtgcgacgagaacaaggacgagctgctgaccctcaaagagatgactgatcatgccgagatatttctgcaatccaagatgatcgatacggcgaatagttttcacacagagttctagcttaattctttaccatcactaaacctttcaccctttaagcatttatagtgatattaatttgtaagttatggcacctaaaatagctaatttagtagcaaagcgtctttttgttaataatttctttaaactacttggatcagatgtaaagcaagatgatgtaagaaaatcatttcccgtgtgatttttcaataattagcttttaaggacacaaatactctccgaataaatatacgtaattgtacgg

SEQ ID NO: 40560 - protein, 261 aa, DROSOPHILA
MQHLVGPHLADRSRDGILSIQELGQYINRRIVEHIDEAIMNNAREFRRVDIGPADGLITWDEYHRFFLREHGMTEADIDEHDEIRHTALNRRAREDMMRDKARWSEAARTDLFTLTIDEYLSFRHPESSVSNLLELVDDLLRQFDQDGDDQLTLEEFSDLNVDDDDDLMRKSLISKTLVERREEFKRIIDKNHDGKADRGELLNYVNPKTPRYALQEAATLFSLCDENKDELLTLKEMTDHAEIFLQSKMIDTANSFHTEF

SEQ ID NO: 40561 - DNA, 3230 bp, DROSOPHILA
cgtcgtcgtccgaagactcgttgagaaagacattgccggaggtgaagagctcttcggcatcgaagaagcgaaccggatggtagtcgaactgaatgtccactcttggctcaataacctggcaggacacccagatgcggttgaagcgctcctccgagcccaggcccaccacatagtcgaatagctcatccggagcgtactcgggcagcgttagggcgtcatcgtaggttaccgcctggaagcccaatgcctgggtgatctttattagaatgcacggcgtgccggacatatagccccaactgtcgtctatgttacagcccatcaggcgcttcgggccttcgagaccgtatcgtttcaccgttcgcattatcgcgcgttgtatgttagccacatccttaatgttattagggctccacataatttgcttctgatcaccgacatggtgtccgggtgcggttgctagtccggggaactttttgcatcccggcctatccggatatatatgattcgcaatcatcacgagggccaatccggttgtgaatacgcccaaaacgaaaaagaatccgatgaagtagagcagcagtttgataaaacggcacacggtcatctcgggatccgcattgcgtgtgcgaatggaacgcctgtagaggtactccgccacacgcatatcacgacgccggcgaaggcgtcccaattcgtagggaccagaatagattatcgcgtcgttaggcatggaataataatatatgggtacttaattatatcttatggaaatatatgagggatttcagaaagctagcttggggtggattagaaatataggaatgtattccgcacagaaatcagaagcactaatgtatatttttgaataacgcgcctttttgtcgataacgataggcgttaagtgaactcctgtagccctttgcttcgtagcagcactaagtattttatcgcaaccacagcacggtcatactaagcttatgagcaaaataagtgagccaaaatgggcgataatgtgattcctgctccgcttagccgtatcccgggcaccagccaggcgaaggagaagcacagcaaggacctgaagacccttacctatccgcagctgctggagattaaggacaggcagtctcactttctgtcgttcaagtgagttttagtttccacctgtggagttccctgtgaatttatcttatttaattttatctctatttagaaagcgtttgcaccaactgccggacaagggaaagcgtctgcaggagtcgtacgacaaattactggccgagatcaggaggcgggatgaagtagaggaagcgactcgaatgttgagcggtctcaacattgtcgaaaagggcaaaattgctctcaacaatctggagtggaatggcagaaacacggacgagggcgcccatgtggacgacattctggacagcgatgatgaggtggagatggatccgctgcggattatagcgcagggaacaatgcacgagaagaaggtcaaggttttgcctccgccaacgagtttcattacggcagatgatctggcggatatcgaggagtttaagaaaccaaccgactccccagattccgccttggcaggacatagtgacaccagttcccttcctgccgagatcgtagaaatcgacgccagtcaagtggccgcaaagctgagcagggagctgcctcccgatcagcatgccctctacctcatcgataagacggaaacaaatgtgaatactcctagggaaaagtttatgccattccgaaccaccaagtccaatgtccacaatcccgacaaggagcgcgtgcgcaaaaagggcaagcattgggaaataacggcagcaactccgccactcatccagcacaaagaggcccagttggtgccattggctgagtcggctgcgttacagattgattacatgcaaagagtaaaggtaatttcattgcttatggtctacataattcgatgctaaatacactttatttgtaggaggttcgcattcagcaggctgaacagcggctggccaggcttaaagactctcgactccgacttggcctgcccgaggaatcgattgtgaaaaccaaggaatccttccgcaactaccgtgatccccaagacacttttctcatcgagggcaggcaaaaagccagcgaagcgaatgaagtgcaagatcctactgttcaagacagaggatcgtccgccagtggcattcattacacggtgttcgagtaacctatgggcagagcatgagatagaatctatgctattcgatttccaagaaacattgtgtactatttattcgcgtaggcaacaattaccaaataagactgcatacataactatactgtgtatactctgtgaatacttagattgaatagaactgcgtggctgtggaggcttgcaactcgatctggcccatcttgaactgcaagcgctgcagccatttgagcagagcctccgacttgtacgtttgctgctcctcgtagtccggtgcatagtctcttacgttttgcaaccggacgtgcaaagtgtccgagagttgcgtctgtgacgagagtacggggctccacatgggtagcagtttgcccagcactgtggaattggtgtccttcaacgcctccaacagactaaggaagtgcagattgaccatctcggacagcttggagttagcactctgcgtctgaaagtccaggggggtctgcggctgatccttattgactgtcggcttggcgtgggacaccaattgcaagatgcagggcgtcacctttgcccagaactcaaaaagaacgcctaacgtgctgccctccgcattgctattggtattgtgggccatctgctccaagtacaccgtccacagttgacatagagtgaatgcatggaatagcgaggacatgtgcagcacggaggtcttggactgctccgcaaatccggcaaagatcacctgaatgtgatcggcgatgtggcaggaggcttcctgcggcaccggttgcgaataggtcactccttgatgctgataatgtacgctggctgcaggaccggtgccctgactattctgctgcggcaagggcgtaggaatgctatgtgtctcctggcgccgctgcatcagagccatgtgagtgagggagccaaggagcaaccaggacagcaggcgcatgtgacccacgcattctgtgaactccttgggtctaaataaacgtttatttgtgttattcaagggagatgttaatcctga

SEQ ID NO: 40562 - DNA, 1107 bp, DROSOPHILA
atgggcgataatgtgattcctgctccgcttagccgtatcccgggcaccagccaggcgaaggagaagcacagcaaggacctgaagacccttacctatccgcagctgctggagattaaggacaggcagtctcactttctgtcgttcaaaaagcgtttgcaccaactgccggacaagggaaagcgtctgcaggagtcgtacgacaaattactggccgagatcaggaggcgggatgaagtagaggaagcgactcgaatgttgagcggtctcaacattgtcgaaaagggcaaaattgctctcaacaatctggagtggaatggcagaaacacggacgagggcgcccatgtggacgacattctggacagcgatgatgaggtggagatggatccgctgcggattatagcgcagggaacaatgcacgagaagaaggtcaaggttttgcctccgccaacgagtttcattacggcagatgatctggcggatatcgaggagtttaagaaaccaaccgactccccagattccgccttggcaggacatagtgacaccagttcccttcctgccgagatcgtagaaatcgacgccagtcaagtggccgcaaagctgagcagggagctgcctcccgatcagcatgccctctacctcatcgataagacggaaacaaatgtgaatactcctagggaaaagtttatgccattccgaaccaccaagtccaatgtccacaatcccgacaaggagcgcgtgcgcaaaaagggcaagcattgggaaataacggcagcaactccgccactcatccagcacaaagaggcccagttggtgccattggctgagtcggctgcgttacagattgattacatgcaaagagtaaaggaggttcgcattcagcaggctgaacagcggctggccaggcttaaagactctcgactccgacttggcctgcccgaggaatcgattgtgaaaaccaaggaatccttccgcaactaccgtgatccccaagacacttttctcatcgagggcaggcaaaaagccagcgaagcgaatgaagtgcaagatcctactgttcaagacagaggatcgtccgccagtggcattcattacacggtgttcgagtaa

SEQ ID NO: 40563 - protein, 368 aa, DROSOPHILA
MGDNVIPAPLSRIPGTSQAKEKHSKDLKTLTYPQLLEIKDRQSHFLSFKKRLHQLPDKGKRLQESYDKLLAEIRRRDEVEEATRMLSGLNIVEKGKIALNNLEWNGRNTDEGAHVDDILDSDDEVEMDPLRIIAQGTMHEKKVKVLPPPTSFITADDLADIEEFKKPTDSPDSALAGHSDTSSLPAEIVEIDASQVAAKLSRELPPDQHALYLIDKTETNVNTPREKFMPFRTTKSNVHNPDKERVRKKGKHWEITAATPPLIQHKEAQLVPLAESAALQIDYMQRVKEVRIQQAEQRLARLKDSRLRLGLPEESIVKTKESFRNYRDPQDTFLIEGRQKASEANEVQDPTVQDRGSSASGIHYTVFE

SEQ ID NO: 40564 - DNA, 5885 bp, DROSOPHILA
ttttatagaatcctctcctgcctcaggtgtctcaacatattcaggaggttggaagaacccgacgaaggtgttggacatcatgtttggggcggaactggtgctactggcgctgctggaactcccttctgttgacaagttgttgcccttgggtttgctggccagctcatcgaagaaactgggcggatcatttgcgaaatattcgcttattttgtgtgacatgtctttctttgatggtttttcgataggctttcagggatgtcactatcgctgctgccacagtaagagctatcggccgcgaatggcgccaatacttcagtggttttaaacaatcttattttgatccgtttaccgtattgcttgctaaaagttcttttcaacgttactattttgcatttgcaaaatttttttacaccgaaattttcataataaacaaaaagtccaagcacaaaaatattcatgtgttatataatgatttttactatctaatatatatatttttttgagaccagacttggaacttgtgctgtggaacttgatttaggattctttatttcctaattttcttaaattttctcttcttaaaaatgtctatatttcatggcgtaacgcagattaaaatgtgttgcgttgaaatatgtggtacataaattttaaatatgattttagtgttaagttttaagattcggttagcgcaaatgactagtttggccaattgtttgtattagtttttacaaaaataatgattagggcaaaggaaaagaaactagcgtttaaccaacatatatattaacatataatcactatatgaacatattgtctctggcttacctatattatatcccttttattcgtaggccagcattttccatttgattagcccataaaaattatagctaagagaaattatccatattgattttccatatgattttcagcgacagtggatataaattatttttcttttacataacccaaatttcccaaataaaatgcacacaaattcatttgttgatctaatgtcatttgtttattattcgagttatacagtacataaagcaaaaattggttaattctagagctaacaaagatggccatttgatggccactttccagttgcctgtgtcctaacatacaaacgcattacactttatttacacaaaaacagcctcctcacatcgcagtttattgcccattgaaaatcgtttcgggataatagcttggagcattgaacatgcgcgggaatccattgccatccagttggcccacgggcagcaccgacatgatgtccctaaaatcaaacaattagttttttaaatatatttataacatagcacttaaaatatagagttactatatataaatatatgttttagtttcaggcagtggaactatctatggaatccccctaaaattcccttaacaattatcaatgtaagtgaagcatgactccattttttaagatcgctctgcgttttccaaatggttctagtcatggaagtgcgactgtgagttttcgagcagctaaaaagaacacatttactccacttgtgagctcgggtgtggtatgtgctgcaatttgacgccctgtagaggcgatgcgatcaaacagcgggatgcgggcggaggaggagaatgggaatggtgaggaggatgaggggcacatgctacacgcatgcgctgcgttaggagtcgggcacgtcccgagtccctgggctctataaatatgcagaggaccgtgcaaggagccggccgaaattggacataaaacacgctcaagtgggcggcctggaggcacaagtgccgtacggaacggtcacttacaaacgatttttaatgccaattccagaacaattgattatattcgttcgcatttcggatttcggagtttggttctggggcgcaacacgctcaagtgttgaatgaattgttttacgagttatgaggaagtggaaattaccatgccgccctagattcccctcctaacgaacttggttggcccaagttcaaaagaaatgtgaagagaatctaactacacttcaaatggtattagctcttttcaaagttgttttttaggaaatagtcaataatctctaattacaactaatcttttgattgattctttgacgattttcagttcttaaaataaaattctattttatgtgttcaagataggatgtgggttatagttaaaaggataagttatatagtggattttatggatgaggacatgagaatctatgatttcaactcacggtctttgctggggcgtgcgatcccgctgtcgacgattcttgaaccagttggagacctgggtgagcgtgagcccggtcttcttggccagcgtcttcttctcgtcgggggtgggatatcggttggtcaggtagcagtccttgagagcgttgcgcgacttctccttgaagcagtagaccgtctcctcgccatcccagatcgtcttgggcaggggatacttcttgcgcagacggtacttgtccacggcgcccagtggtcggccacgcaccttctcggcctccttgtagtgggccttgaaccagaggttctgcaggtccacgtggtacttgatcgaaaagcagtgcgtctccagcaggttgtacagctcgtggaactggcccagattgtaggccaccatggcgcgggcccgcaggacactctcgttggtcttgaagaactcgctgggcggcaggctgcagaggaatgtggtcagcttctcgatgtcgcccttctgctgcagtgcctcgcacatgcactggatctaaagaagaagttcatagcactttatgtctgcaaaagtctaggatatatgggagaagtatcctacctgatccgtggagaactgcagcatcttggcatcgataggaaagctgctcacggcggacatgttgtgggcggctgtgagattggatatgaggtggccaccactgccggcattgccccccaatccgccgccacttctctgcaggccggcgcatagatccgtcttcgtgttcccgttgagatcgcccaggttgccactgctgccattctcaaatattatgctgttcaggctgggatagtgcgtgggcgtggtcgaggcggtgggcggcggcgacttgtcgtagtcattggtgatgtcctgaaaccgccgctccagcaggtgatccttctccacaccctcgtagggtgcgaacttgtccagctgcaggaccgttttgcatgacaggttgccacgataacctgaagattgaaatggaaaacttatgtcaagcaaatatcttaaatttatattaccaaatgttatttaatgataaaatattttaaataataatttaaattgtcagctttaagctgtccaattctgtatcgtaaaataataggaattcagtttctgggacatccagatgagcaccagaagatttgccaaagaatcaggttgcaatgatcacatctatctgacaccttggattagcaataggttcgttctttcccacgtgccacttcaatggtggtcaatgaaagccccactttccccgggtgccccaaagctcagaagtgactaatcgacttgaccaaaacgatcgccgtctttcgacacctcggacgaagtggacagccactgtggatcatattgagcccgaaagagacatcggcaaataaataaatgcgatatgctttacacagctaaatgtgtgtagatatgcagttgtgaatatgtaaatcttaatacattttaatacaatttaattgatgggcgaactgtggttgcccttcaatagtgtggaataccctttagttttgataataataaaatagtttaaaaaatgttatgtaaaggattatcaaaggagggaagttctaacttaaatcaaattgaaaagttttgtattatctgaattgagttttgaagtattatactgacgaatttgaagcaatctaaaaactgttaacaaaacggtaatcggtataatgatgatttgatggaactttaatatttaacttcgtatatcaaactaaataagctgcctgccataactgcattacccacatcatgcaccctaatcatgcagtcctcaaaaatgtgtactcctcagcagaataaaagtcccaggctttaattgtttatgcagcgcctcattgacgcctctgtcccgaaacatgataccctgggtcttcggtctctggactatttgcaccgataagactagacctagttggatccgatggctgcatatatctaatagcggactcaccagcatttgggaggaagagggatccgtaggccatcggcgagctgagattgtcctgatggacagccgagtgatccgaggatgtgccgccggaactcgtcgaatccaaatccccaccgatggagaccgacagattgttgccgtccaaattcttgtcaaacataatgcaacaccgatttactgaacaaagttcagattggttgttaacttttattggattagtttttatattttttctctctttgtttttatatttttatttcagtttatcattttagtttcgttccacattgtacattttatagaactataatgtttttatactattttactttgcactttggtaactgttttaattgctttgaaactttaggtcaatcgaactatccttaaattgacttgtcttaaatcactcggttaatcccaatttgtgttgctttgacttgatcagttgaatcactaaactgcattcacttgtctaaagattatttagctgtattttgtgaacatatcttattttaaacttgttgctgactcgatattctgtttgattgttatttaataatatgccaggaactttgaatttatttagttattttccgggaccgattcttcccagcgactggacgcgaccgctcttcaaactcgactgcaagccagcgaaaactgcattccgagggtgtgtttcgtgccgtttcgttcccttcgttcaccttggcctgcggaacgagtggtcaagtggaacggtggacgttcactggctgctataccgctagtttaggggtggttccgtttccgcttctcgtccgcgggcggtgggcgtggcactcggcagccattttgttccgctgcctcgaaactgaggagtaacttcttttttttttgccgtctaggggcagaatgggtcttgaattggcaaacatcatgacctcattagcgatttcgagggtgtctaatgattgccgtgtgctgtttctcggaatttacatcgggtttctgtgatattgcttcatttgcgagcagcaacgagttctcctcacacagatgaccttctcgaattggaactttagatgccttaaattactaagatgctgctgaaacaaaaatatgtaaagatgtttaaagattccaccaattcttacttttaatatggattaaatcttaaaatataataatctgtatgctaaaatactttttaaaactgtctgtcttatatacatactaataaactttaatttaagcaagcctactcatatgttatttcaactttacttgtatcagatacggaaaaggtttatcatattatgtttatgaataatttcttcatttacttataataaaatatatgttatgcccttttggttatattattgttttagcatttaaagaagtaaacaattgacaaaattgttaaggtccaaaccaataaaacatgcaaatagtatatttatgtttattatattgttttgatgaataatttgtatatttatttacaatgaaatataagctaagcattggttattattcttaattggcaaatagaaaaataaataattgacaaaaatgtagagctctagacttgaatttgtctatgtatgcatatatgtgtgtacttacataggtataaagtcagacgcgatgcaa

SEQ ID NO: 40565 - DNA, 1839 bp, DROSOPHILA
tttgaagagcggtcgcgtccagtcgctgggaagaatcggtcccggaaaataactaaataaattcaaagttcctggcatattattaaataacaatcaaacagaatatcgagtcagcaacaagtttaaaataagatatgttcacaaaatacagctaaataatctttagacaagtgaatgcagtttagtgattcaactgatcaagtcaaagcaacacaaattgggattaaccgagtgatttaagacaagtcaatttaaggatagttcgattgacctaaagtttcaaagcaattaaaacagttaccaaagtgcaaagtaaaatagtataaaaacattatagttctataaaatgtacaatgtggaacgaaactaaaatgataaactgaaataaaaatataaaaacaaagagagaaaaaatataaaaactaatccaataaaagttaacaaccaatctgaactttgttcagtaaatcggtgttgcattatgtttgacaagaatttggacggcaacaatctgtcggtctccatcggtggggatttggattcgacgagttccggcggcacatcctcggatcactcggctgtccatcaggacaatctcagctcgccgatggcctacggatccctcttcctcccaaatgctggttatcgtggcaacctgtcatgcaaaacggtcctgcagctggacaagttcgcaccctacgagggtgtggagaaggatcacctgctggagcggcggtttcaggacatcaccaatgactacgacaagtcgccgccgcccaccgcctcgaccacgcccacgcactatcccagcctgaacagcataatatttgagaatggcagcagtggcaacctgggcgatctcaacgggaacacgaagacggatctatgcgccggcctgcagagaagtggcggcggattggggggcaatgccggcagtggtggccacctcatatccaatctcacagccgcccacaacatgtccgccgtgagcagctttcctatcgatgccaagatgctgcagttctccacggatcagatccagtgcatgtgcgaggcactgcagcagaagggcgacatcgagaagctgaccacattcctctgcagcctgccgcccagcgagttcttcaagaccaacgagagtgtcctgcgggcccgcgccatggtggcctacaatctgggccagttccacgagctgtacaacctgctggagacgcactgcttttcgatcaagtaccacgtggacctgcagaacctctggttcaaggcccactacaaggaggccgagaaggtgcgtggccgaccactgggcgccgtggacaagtaccgtctgcgcaagaagtatcccctgcccaagacgatctgggatggcgaggagacggtctactgcttcaaggagaagtcgcgcaacgctctcaaggactgctacctgaccaaccgatatcccacccccgacgagaagaagacgctggccaagaagaccgggctcacgctcacccaggtctccaactggttcaagaatcgtcgacagcgggatcgcacgccccagcaaagggacatcatgtcggtgctgcccgtgggccaactggatggcaatggattcccgcgcatgttcaatgctccaagctattatcccgaaacgattttcaatgggcaataaactgcgatgtgaggaggctgtttttgtgtaaataaagtgtaatgcgtttgtatgttaggacacaggcaactggaaagtggccatcaaatggccatctttgttagctctagaattaaccaatttttgctttatgtactgtataactcgaataataaacaaatgacattagatcaacaaatgaa

SEQ ID NO: 40566 - protein, 391 aa, DROSOPHILA
MFDKNLDGNNLSVSIGGDLDSTSSGGTSSDHSAVHQDNLSSPMAYGSLFLPNAGYRGNLSCKTVLQLDKFAPYEGVEKDHLLERRFQDITNDYDKSPPPTASTTPTHYPSLNSIIFENGSSGNLGDLNGNTKTDLCAGLQRSGGGLGGNAGSGGHLISNLTAAHNMSAVSSFPIDAKMLQFSTDQIQCMCEALQQKGDIEKLTTFLCSLPPSEFFKTNESVLRARAMVAYNLGQFHELYNLLETHCFSIKYHVDLQNLWFKAHYKEAEKVRGRPLGAVDKYRLRKKYPLPKTIWDGEETVYCFKEKSRNALKDCYLTNRYPTPDEKKTLAKKTGLTLTQVSNWFKNRRQRDRTPQQRDIMSVLPVGQLDGNGFPRMFNAPSYYPETIFNGQ

SEQ ID NO: 40567 - DNA, 3411 bp, DROSOPHILA
tatattatgagcacgcgatccaactgaaagtgaaattaaaaacacattttcacagcacaatttatattcaaaattactgggaattaatgcgcggaatcgatggtattttgcatttttatggcgacaaatattgataacaagacggaacacttaagcaaagctatggggtgtcgtttcagccggtgatatctatcttcctttgaaaaataccctaactaaatcaatacattatccgaaactgtttagaataagaagttaaatggcctataataaagccctatgcgttttcataagccaaaacgttaatcagcttaagacaataccgtatttatacttaagtttaacaataagtatatatattaatatgattcctacagcgtaccatagtcaaactcatttgatattaaatattaaacaagttgtctacccttagagccgagggtatcaatcaatcggtgctcaatttattatttctgattttgtatggctccaacgcgcgtcggaaactcgggctgcttctgcagcttttgtgttgcataaaaattaaaatttatgccaggcaacttgtgcaaagcactgcaatgccattgtttttcattccccacccccaggatgctcctccactgctgatgtttttttggcggcggaaggacattcacgttctgggtggctgcattcattcccagcacccaccccgactgccccttccgcctacttgtcaagcccacttacattcaattcattcatctccggcagagaaatgaaaataaaatcccccaaagctacctccttctccacgaaggcaggcaccaacgtaattgcacagcaattatacatacttccatcgacaagatggatacgtaattaatagcacattaaattgggccacaacaatattaattgttctgattgatttatgcaggtaattaacgttttaaccaactgagggaaataaatttcgtcggaggggcgagctgttctcttccactcataaattttgtcacatcaatcaaattaaacagttcgatacagtaaaacagcatgaacgacaaataggcgtagaatccatcaggtgtaggagttctcaagaatcggcgagggtctaatattgggaatgtccaggcgggtttttggcctcagtataaaatcattccgattgttccgaagaactccgatccatcccccagcattccagcatttttctggtggcgtctttcgaacttcctttaggagtttctgcgattgtcaggaacaccgaagaatggatctaccagagggaatacttatgggctttggcaaccccctgctggacatcacctgcaccgttgaggataatgtgatcctggagaagtacggcctggaagcaaatgctgcgatcattgctgatgaaaagcacgatgccctgtttgatgagttgatgaacatggaaaatgtcatctattcggcgggtggagcctgtcagaactcgatgcggatcttccagtggatcgtgcagacaccatttcgagctgtgttcatagggtcagtgggcaaggataagctaggtgatcgcatcgaaaagagggccaaatccgatggcctgctaacactttatcagctgaaggaagagctgccgacaggtatgatcaaatttagtaaaagaaaaatacctagctgagcaccttatgaataataaaaagttttgcataacaaattagctacatttcattcgttttcatttctcaggctcttgtgctgtgatcatcaacggtccaaaccgctcattagtggccaacttgggcgctgcctctctcttcagcgacgactggattgacgaggatgataacatctgcgccttggatcgcgccgagtacttctactttacgggcttctttctggccgtttgtccacctgccgtggagcgggtagctaggatgtgctgcgagaccaatcgaattatgatcctcaacttcagcgccgtgtttgtgctgcagatgcaaaaggaagccttgggcaatatcctgcagtacgtggatataatcatctgcaataaggaagaggccattgcatttagcgacaccaacgactggaagacgaagaatatctttgagatcggatctaggctgcagcaaatgcccaaggaaaatacccgaccaagactagtaatgattacggatgcggtgtgtcctgttctcgtcttccaggataacgatcgcgttctggaataccccgttccacccgtaaagcagggcgagattttcgacaccaatggttgtggcgacgccttcgtcggcggattcctggccatgtacgtccaaaggatgcccctggattactgcatccgaacggggattttcgcatcccagcaggtcctacacgtggtcggtgttcagatcgataagctgccaaagtttagcgagaaatgcatatgaaggggaccgatgcatattgtgtctttgcaaaacttatcaagtgacgagtaccattaggaccttaaataaaatttaaagttttcaatatactatgacaggatgttttctttaaaactggctagcaagccttaagctctctctttccccctagcaccaaacacaaatgtgttaaaccgaataaattcttaacttgattaccagattagcccttttccacccataagctatcaatataataatttaaggccccagcctgcttgcatatcctccggcacttcctttggcccacacctttttccagcatattccaggcggcaagagtcctgcggcactcggtctgcctttagctccgggaaaaataaatacatttaaatgtataaaacgctctctttctctccgctccgtccctctgttggtcctgctgcggagctgtggctctgggaaaggcaaacagaagtgatgtaaaaatatgcgttgcatactttgcagcgccaatgtaaatttcctccacgtcccgccgggaggagctttgtctttcgggtcctggcgtctgctgcctgccggctgttgactttggcctgacaaaatattgctaccatttcagatgcgaagacgcaaagaacgcgtttggagaagagaagctggggcagctggacatgagcacgtgccaaaggacagtggcttaagcacccaaaatctgattatataatgtttaacagcattgttttataattattgatccatgtataaataacgtgttaacattcttttagaaatttaacatatactgaattttcgggatcagtttttggttgttgcggtccttaaaaactacaatgaaaacattttttttgtgtttatattataatagtttcattttacacactaaaaacatttaatgactccaccgtgcaacggatggtgctgaacaaagcgaaggacgaggcggtacagtagctgtcttccactgattaaaacgatgcgtcctcgtgacagcgat

SEQ ID NO: 40568 - DNA, 1305 bp, DROSOPHILA
tcacatcaatcaaattaaacagttcgatacagtaaaacagcatgaacgacaaataggcgtagaatccatcaggtgtaggagttctcaagaatcggcgagggtctaatattgggaatgtccaggcgggtttttggcctcagtataaaatcattccgattgttccgaagaactccgatccatcccccagcattccagcatttttctggtggcgtctttcgaacttcctttaggagtttctgcgattgtcaggaacaccgaagaatggatctaccagagggaatacttatgggctttggcaaccccctgctggacatcacctgcaccgttgaggataatgtgatcctggagaagtacggcctggaagcaaatgctgcgatcattgctgatgaaaagcacgatgccctgtttgatgagttgatgaacatggaaaatgtcatctattcggcgggtggagcctgtcagaactcgatgcggatcttccagtggatcgtgcagacaccatttcgagctgtgttcatagggtcagtgggcaaggataagctaggtgatcgcatcgaaaagagggccaaatccgatggcctgctaacactttatcagctgaaggaagagctgccgacaggctcttgtgctgtgatcatcaacggtccaaaccgctcattagtggccaacttgggcgctgcctctctcttcagcgacgactggattgacgaggatgataacatctgcgccttggatcgcgccgagtacttctactttacgggcttctttctggccgtttgtccacctgccgtggagcgggtagctaggatgtgctgcgagaccaatcgaattatgatcctcaacttcagcgccgtgtttgtgctgcagatgcaaaaggaagccttgggcaatatcctgcagtacgtggatataatcatctgcaataaggaagaggccattgcatttagcgacaccaacgactggaagacgaagaatatctttgagatcggatctaggctgcagcaaatgcccaaggaaaatacccgaccaagactagtaatgattacggatgcggtgtgtcctgttctcgtcttccaggataacgatcgcgttctggaataccccgttccacccgtaaagcagggcgagattttcgacaccaatggttgtggcgacgccttcgtcggcggattcctggccatgtacgtccaaaggatgcccctggattactgcatccgaacggggattttcgcatcccagcaggtcctacacgtggtcggtgttcagatcgataagctgccaaagtttagcgagaaatgcatatga

SEQ ID NO: 40569 - protein, 347 aa, DROSOPHILA
MDLPEGILMGFGNPLLDITCTVEDNVILEKYGLEANAAIIADEKHDALFDELMNMENVIYSAGGACQNSMRIFQWIVQTPFRAVFIGSVGKDKLGDRIEKRAKSDGLLTLYQLKEELPTGSCAVIINGPNRSLVANLGAASLFSDDWIDEDDNICALDRAEYFYFTGFFLAVCPPAVERVARMCCETNRIMILNFSAVFVLQMQKEALGNILQYVDIIICNKEEAIAFSDTNDWKTKNIFEIGSRLQQMPKENTRPRLVMITDAVCPVLVFQDNDRVLEYPVPPVKQGEIFDTNGCGDAFVGGFLAMYVQRMPLDYCIRTGIFASQQVLHVVGVQIDKLPKFSEKCI

SEQ ID NO: 40570 - DNA, 8414 bp, DROSOPHILA
cagatctttcgtttaaacttacgtgaattaggtttaaaaatgctccaattaatcgatgtcagtgcttttatcacgagttttggcttattaagttcgggctcaagccgctcgttgcttccgtgcacgcggcagttgttggcgtggacgccggagttgctgctattacaagtgtttagcaactttgaacactgcgatttcgtgctgctgccaacaagtgatgcagttgtaaatgaatgttgcaatttcaaatagcaattgttcttgattttaaagcacatgagcactagactgattcgaattggacatttgaatctttaacgggcggagaatataaaacaccggcaaaataaataaagaaaggagccacaacaaacggaaagccagaggcgtagtcattctcttcgcaaatcagcgggggttaccattcgagcagcatacaaccctctctgagagagaattgacatgccactggatctcacacatacaatgaaaggcacactcactcaaagtagacagcactgccagacttaatgcaatagtatagcagttggtgttggcagtgccatttgatcgctggaggtgctgccaacgcatttaccaattaattaatgaccacccctaaatgttgtaaattataaaaattattcaagaatattacgattttggttaaattaatgtacaaaataaaatatttcatatttgtattggctgtcaaatgaagttattttattttaagataaatgctaacaaatcttagagaaactggaaaacaaggttgagcggttttgagaattatgaacaacgcgtaaaaaacattatttataaacgtaaaaaaatattatagtctagcccgacaggtaaaaaataaatttatccggggccaccttggtcaaccctcgtcaacgaccgttcggcctgccaactcgcttttccctgcaacgcaaggcgccgctctctgctcacactctcacttggctgtgtgtgtgtgctcaatactcgcttttagttttcgctgcagtcggtcgccgtttttagtctcagctgctgcgcgcgtgtgttgtgattgtgtgaattgcgtttgcgtttgtagcataacacaaaaccgataaattcctggcgaagcgagctctctcgattggattcttgcaaagtgaactagcgatgagcgccgcctctgaggtgaacctgatgttgctgcggtcagtggagaagcagactgcgctttatgatcgtaccgacgaaaactataggaagcgcctgccgagtgagaacgcctgggacatggttgcctccgaagttggagagtcgggtgagtcgtgagtgcgagcgggatagcaatcgacgttgcgtagttttctgccagtgctgcacagcgtcaacgcgcgcacaacagtcagtcgtccccgaattatcggccgtcgatagttgtgtgcgagttggcagcgccatgtatgccatcacaaagcagctggcatcgattaattcgaatataacgagtctcctgttgaatgcgtagtcgtttgggatgaaattgcttcttgctgtgacataatttttgtaaatagctggaaagtaatttatattagttatttggcaactgcaataattgcatggtaaaaactaaacaaagttatttcgtttgttgttattattatttttttaatttaacattttataatttataattctccaacaagcttgttatttcatattaaaaaaatgtcttatttgaatattacattattttagaaggatttaaaaataaataaattaaatacagaaaaaccaaaatatgacaaataataatatctagtctattcagtagccaaatccatttcatttaattcttattagctttataaattttttttaaatgatttgaatccttctgcacgttttggtaacactggtaacactaatcgcccattagctgagtaaaatttaaccttagaaaattggtatattgtattatattggtatattatgagtgggtagttccatttatccatgcatctctgattttgttgtcggtgtatatcgattgacccatatatatttccctggaaagatcttttggccaaacttttcgagcagtacaatataagttggctctttttcatttgagaactgaaaaaatattgccaatgatgggggacttcttattcgagaattcttgctgtaagttttatttatatatcgcaaaagaaagaaaaatcctttttagtgtacatatgtacatacacacgtgcatgtacatatttaagtatgattctcaatttgattgcgattatttccacgtggtttctgacaccttttactaaactttacacgattccttaacacaactattttttaagtaatgtgtttggatatcagataaagggtgtttcagcaatgtctacaggttttgttaactaacaaattaaaacgtatcttagaagtttgggcgtcggaaacctgcacgccttataaatatgtatgatatgtacatccatgtacgttcccatgtatgtatgtcggaaatctgcatatatatatatttatataaatatatatggtcatgtatggtcatgcagataaatggacgcttctaatttgtataccccttactcgtagatttaaagggtatacgttggaagggattcgttgcaaagtatgtatgcaactggtatgaaggtcgatctcaggaactatagaaacaaaaaggttcaaattaaacatatagattaaagggacttagacgcagcgaaagtttgttttttcataatttttaattagttttgtaaatttatattgactttttgaacagtttttttaaaattttctcatttgactccccaatatctatctatatgccatatctatatgcattataaagcttcccacttccattattcattctcttattatttgtttttgtggtgatttattgcactgtaaattaattttttgcaaaaatgctttgtcttaaaaatataaagtaatttcctacaatttttcttgtatatgttatagctgatattattttatcactttaaaaaattgttatgtttggctagaaaaaagcttattttttatgacccgatttttatttgaactatccttatgcaaggacaagaattgaaatggcaccgaacacaaaatttcatgtgtcagttttgtcagattttggccgcggtaattgaaaataaccttccgcagcgtagttagttacatactgttacaaaccatattaatcggcgagtataaaggcagataactaagaagcagttttggcacgtagaagctaagaatttcttgtctattactccaaatcaattttgccacttcctccaatggaaagagccatacgaatttgatcaattaaaaaataatatggaaatatctaataccgaagaccatatttagaccattaagaccattaattagctaatcattttccgactgttggtattgaaaatatagtttttcgattttaataaatgtaatccaaaatttatatatatttccaagatctagtgtattcttattaaaaacaagtaatgtgccatccgggttgtaggacccgtgattcagggttcgcggtgcgtactggatgccccgattttgtgactagcagttacacactgcagtgcttttatttttatttttaaaaatttacatacatgtatagcttaattattaaatactgctaccttcaggcagctaaaaaattatatataaactgcagtgcatgtactcgccaccgaatactcatttatactcatttagatattcatacatagcatactttcaagcgaaacttgcatttacggaaccatgtacaatgttggttttttgaaattaaaaataatttaactagtgtctcttcccattattaataagcattcctgagctcttattacctgttcatgtaaaatgcacacaaagttttatgagctaagattaaagtggaattttccgggcaatcagggggtgttatgctattgagaagtaaaggttgggccgctacctgttgcctgatatatattacgtatcatatcttcttacctagccttatcatttccctcttgttccctcttgcagtggaaaaatgcaagcgacgctggcgtcagctgcgaaatgactatacccgctggtgcaacgccgacgccaaccggcgacgaaatggccagcgtcgtttggcttatccgctggccgatgagctgcgctttttggaccgccatctaaacatagctgacgacatggctgccgacgatgaccgcagcgtatcatcggacaaggacagggataacaatagagacagcgagggcgtggatcatcatgctcaggcgtcattaaaagaacgcgcatcatcgacaagcaagttagttaaggaggtcaagctggcaagtcaagttcgtaaggaaaaatcgtcccaagacaagagagaaaattgggaaaatcctggagataaacagcgatctaggaagaaaagtgctgaagagaagctgaatgatttggaggaatcggacgaaccagagaaggttcctgaactcgatagttttctgcagtctgataatgaagacgacgagtgcatggacgaggagcacctagaagatctggaaggtttcgattttgacttggaacaatcgaatcaggaaaaggagttaacgccggagaagtctctagagaagaataacaccgactcaactgttagccagccggagttctttgtcaagcaaaccagagatcctcgtttgctaattattggcagaaagaattcgacgtcttcgtttgctgaatccaaggcttcaaaatctatttccggggatcctctggaaacggctatggaagatagtggcgatgaatatggtagggatggtgaaaaacgcgtcacaggcagcgacactacttctccaacccgacgtccacgtcgcgcagcccgtgcatcaataagtttcgctggcataagggatttaccgatccagaaaccaggccaagcacaacgaatgacgcgattgcagcgcaggaaatctatgagtttagcggctgtacacagtgtaaggagctccacatcgcctgtgaaaatgactccagtccccaggtctcagccgatcaacaagccgccatccgggccagtccagatcacgaaaatcagtcatcgggatgacatcttcccgagacctgcggtgccatctggagttgtgaatataaatcaaaaccaactcaagactcaacaacagcagaagacgctgatctttccgacgaccgatgaagcgatcgctaacccgcagggatctggtccaccacaaaggaggtccgtgggtaggccgcccaagaagctacctatggtgcagcgaatagttgcgccggaaacgcagaccaagccacagtcgcccataaacaccaaagtcctgaccattggcaagcccaccagctccgtcgcgagtggtaacataaataatattgctatcaaaagcaacgtcgttactagcataagcagcagcaccgctactactaataccattaccaaaggtaccagtaacaacagcatcaaaactactgaaaacgttaatgtaataagctacagtccgaattcatctagcaccagcagcagcagcaaggccaccactggtgcctctggtgcggtgataactaatatacccacaaccaccacagctggaacatccgttccggtcggaaagagtataacccaattgaaaatgactgagcgaggcactcaaaccggagtccagaatcctttctccgataattactttctcgaaatgatcaagccccagatgcaggaaatgaacccccgtcagaagatgcactttaagaagaaagtattccaagcgctgatggaaacctttgatgatgctaccgatttcccaacgtctaaagaactgcagcattttaatataaacactccttcaggatttgagcacattacagatccggaacttcgattggtcagggagctagtcagcatggtgagcgcggctaaggttaccctaattagaccgccaggagaagctacagctatagctacagcttcccgcagtggaattgctcctgaggtacagcgaggaccccgaacaaatatgacacgccaagtcattcagagggtatacaagccaggcactggacaagagatcgcccccaccagcccggcgggtggactagataagaggttgttcaggttagcggctatgggtggtaaaccgaatggcaacttgagtgccactcaggaaattttgcgcaaggatagtgttgacagtaaccatagtgtggtcaaggtggccaaccacgccccaacaggcagtcccaaaggagctgctgtagtggctgctataaggccgcagggttcattgatcaacagtttctttggacaaggcaatggaccgacgacggccaagggagctgcctccgagaatatccgcgccatgtccaggaggtattccgtgtgcggtagcagcaatccacccaatgcccaaaacgctagccaaggttccgccaatggcagcaccataaactccaatgctagcgctatggaagcgtctatgcttaagcggcgattgatagcagctgggcatggaatggtgccacctacccaacgccctcggtattctgccgtaggtgctagtcaaatgaccactgcatcgcaaggcagcagtttactagtgaggaagtctgtgggctgcgttcctgcttaccaaaagcaaatctcacccactggcggtgcctccctgcttcagaaaactccgcagattgccagtgtgcaaggatctgccttcaatgactttgcccagcccaagcccgctgcaacggcctctgtaaacggcgaagaaagttcgcctacctcggcgctgaagcgcagcttggtggtggctaataccaaaacctcctttcaggaccttcttcagcaggccagtcagacggtgcagagaaataaaattgaatcctcggagacagcagccactattgctgcggatgatttttcgctggacaaccttaagcgagagccagtggatcccgcggaggatcacaatgacatactcggtgtttaagaccaggccaaagaaatttccgagtattgattaaagagtaaagaattaagacagattcattaaatcgtaaataacacgttgaaaaattgttaagctatctaatgcacttataatgttgcgttaaacattttttatagttccctataattttaagaatttcgaattttttttttttggaaaaagtttttaactttttctattttgttcataattttttagacgatagaaaaccgacagttttgttcaaaatttgcacaagaaaaatgattaatgagaaatcgaatcttaactttatttcacattttctagttatatatatcgaataaaaattgcccttataagttaaacaaaaaggacaactgaaaaaatatttaaatatgtttttatggaaatatatttctatacatagttaggtcaaagtcactagaatattattctaatgtctttggttaggtagtgaaatatattgcagtacatttatgcgaaacaaccatcacgaaaatttgaaaattagtttggttggtgaaccaaactggagggtgggtgctccagacgttgttctagcagagacataagtaaaattatgaaaattaattaattctaataattatgacaatatctttggttcgggtaccgattctggagtatttccaaagcttcagagtatttagatactgatcaataatattaaattgtttttatcaatacatcagtgagtcggtggaattaacagttccaaagcacacaaactgatgcaattaccactatcaggatatatacgtggacctaactacgaagtaacacatcatcgataacagaagattagatatgaaaacgctgacgcagctaagaaaagcctaaacataacaattcagtaataacataaaaccttcttgtatttataaatagaataaaaaaataaatttgcaaatttgatcaaacgtaattccaacgttattgaaatacttcccgttttgggtgaaccaccggtaaagatttacaaggtaccagtaccattcaatatgctgttctttttgcacatttggctgggaatctaatctggagaggtctaccgcgaatgggccgtaaataagggagtcagtgcccagataaggcagctatataacctctcttcaagtggccgcgaggttcagtcgaattcgagacatcaccatgaaactctttgccatttgtgccctcctcatccttccgctggtaagcggtggaatcgtgccacgcacacctactaggcactttgtggcctacgagatccattctacccataatctcccccagatggaaggtaagagacagtattagttataccagatggtacaattcgctggatggattacgcttagc

SEQ ID NO: 40571 - DNA, 3637 bp, DROSOPHILA
ttttagttttcgctgcagtcggtcgccgtttttagtctcagctgctgcgcgcgtgtgttgtgattgtgtgaattgcgtttgcgtttgtagcataacacaaaaccgataaattcctggcgaagcgagctctctcgattggattcttgcaaagtgaactagcgatgagcgccgcctctgaggtgaacctgatgttgctgcggtcagtggagaagcagactgcgctttatgatcgtaccgacgaaaactataggaagcgcctgccgagtgagaacgcctgggacatggttgcctccgaagttggagagtcggtggaaaaatgcaagcgacgctggcgtcagctgcgaaatgactatacccgctggtgcaacgccgacgccaaccggcgacgaaatggccagcgtcgtttggcttatccgctggccgatgagctgcgctttttggaccgccatctaaacatagctgacgacatggctgccgacgatgaccgcagcgtatcatcggacaaggacagggataacaatagagacagcgagggcgtggatcatcatgctcaggcgtcattaaaagaacgcgcatcatcgacaagcaagttagttaaggaggtcaagctggcaagtcaagttcgtaaggaaaaatcgtcccaagacaagagagaaaattgggaaaatcctggagataaacagcgatctaggaagaaaagtgctgaagagaagctgaatgatttggaggaatcggacgaaccagagaaggttcctgaactcgatagttttctgcagtctgataatgaagacgacgagtgcatggacgaggagcacctagaagatctggaaggtttcgattttgacttggaacaatcgaatcaggaaaaggagttaacgccggagaagtctctagagaagaataacaccgactcaactgttagccagccggagttctttgtcaagcaaaccagagatcctcgtttgctaattattggcagaaagaattcgacgtcttcgtttgctgaatccaaggcttcaaaatctatttccggggatcctctggaaacggctatggaagatagtggcgatgaatatggtagggatggtgaaaaacgcgtcacaggcagcgacactacttctccaacccgacgtccacgtcgcgcagcccgtgcatcaataagtttcgctggcataagggatttaccgatccagaaaccaggccaagcacaacgaatgacgcgattgcagcgcaggaaatctatgagtttagcggctgtacacagtgtaaggagctccacatcgcctgtgaaaatgactccagtccccaggtctcagccgatcaacaagccgccatccgggccagtccagatcacgaaaatcagtcatcgggatgacatcttcccgagacctgcggtgccatctggagttgtgaatataaatcaaaaccaactcaagactcaacaacagcagaagacgctgatctttccgacgaccgatgaagcgatcgctaacccgcagggatctggtccaccacaaaggaggtccgtgggtaggccgcccaagaagctacctatggtgcagcgaatagttgcgccggaaacgcagaccaagccacagtcgcccataaacaccaaagtcctgaccattggcaagcccaccagctccgtcgcgagtggtaacataaataatattgctatcaaaagcaacgtcgttactagcataagcagcagcaccgctactactaataccattaccaaaggtaccagtaacaacagcatcaaaactactgaaaacgttaatgtaataagctacagtccgaattcatctagcaccagcagcagcagcaaggccaccactggtgcctctggtgcggtgataactaatatacccacaaccaccacagctggaacatccgttccggtcggaaagagtataacccaattgaaaatgactgagcgaggcactcaaaccggagtccagaatcctttctccgataattactttctcgaaatgatcaagccccagatgcaggaaatgaacccccgtcagaagatgcactttaagaagaaagtattccaagcgctgatggaaacctttgatgatgctaccgatttcccaacgtctaaagaactgcagcattttaatataaacactccttcaggatttgagcacattacagatccggaacttcgattggtcagggagctagtcagcatggtgagcgcggctaaggttaccctaattagaccgccaggagaagctacagctatagctacagcttcccgcagtggaattgctcctgaggtacagcgaggaccccgaacaaatatgacacgccaagtcattcagagggtatacaagccaggcactggacaagagatcgcccccaccagcccggcgggtggactagataagaggttgttcaggttagcggctatgggtggtaaaccgaatggcaacttgagtgccactcaggaaattttgcgcaaggatagtgttgacagtaaccatagtgtggtcaaggtggccaaccacgccccaacaggcagtcccaaaggagctgctgtagtggctgctataaggccgcagggttcattgatcaacagtttctttggacaaggcaatggaccgacgacggccaagggagctgcctccgagaatatccgcgccatgtccaggaggtattccgtgtgcggtagcagcaatccacccaatgcccaaaacgctagccaaggttccgccaatggcagcaccataaactccaatgctagcgctatggaagcgtctatgcttaagcggcgattgatagcagctgggcatggaatggtgccacctacccaacgccctcggtattctgccgtaggtgctagtcaaatgaccactgcatcgcaaggcagcagtttactagtgaggaagtctgtgggctgcgttcctgcttaccaaaagcaaatctcacccactggcggtgcctccctgcttcagaaaactccgcagattgccagtgtgcaaggatctgccttcaatgactttgcccagcccaagcccgctgcaacggcctctgtaaacggcgaagaaagttcgcctacctcggcgctgaagcgcagcttggtggtggctaataccaaaacctcctttcaggaccttcttcagcaggccagtcagacggtgcagagaaataaaattgaatcctcggagacagcagccactattgctgcggatgatttttcgctggacaaccttaagcgagagccagtggatcccgcggaggatcacaatgacatactcggtgtttaagaccaggccaaagaaatttccgagtattgattaaagagtaaagaattaagacagattcattaaatcgtaaataacacgttgaaaaattgttaagctatctaatgcacttataatgttgcgttaaacattttttatagttccctataattttaagaatttcgaattttttttttttggaaaaagtttttaactttttctattttgttcataattttttagacgatagaaaaccgacagttttgttcaaaatttgcacaagaaaaatgattaatgagaaatcgaatcttaactttatttcacattttctagttatatatatcgaataaaaattgcccttataagttaaacaaaaaggacaactg

SEQ ID NO: 40572 - protein, 1037 aa, DROSOPHILA
MSAASEVNLMLLRSVEKQTALYDRTDENYRKRLPSENAWDMVASEVGESVEKCKRRWRQLRNDYTRWCNADANRRRNGQRRLAYPLADELRFLDRHLNIADDMAADDDRSVSSDKDRDNNRDSEGVDHHAQASLKERASSTSKLVKEVKLASQVRKEKSSQDKRENWENPGDKQRSRKKSAEEKLNDLEESDEPEKVPELDSFLQSDNEDDECMDEEHLEDLEGFDFDLEQSNQEKELTPEKSLEKNNTDSTVSQPEFFVKQTRDPRLLIIGRKNSTSSFAESKASKSISGDPLETAMEDSGDEYGRDGEKRVTGSDTTSPTRRPRRAARASISFAGIRDLPIQKPGQAQRMTRLQRRKSMSLAAVHSVRSSTSPVKMTPVPRSQPINKPPSGPVQITKISHRDDIFPRPAVPSGVVNINQNQLKTQQQQKTLIFPTTDEAIANPQGSGPPQRRSVGRPPKKLPMVQRIVAPETQTKPQSPINTKVLTIGKPTSSVASGNINNIAIKSNVVTSISSSTATTNTITKGTSNNSIKTTENVNVISYSPNSSSTSSSSKATTGASGAVITNIPTTTTAGTSVPVGKSITQLKMTERGTQTGVQNPFSDNYFLEMIKPQMQEMNPRQKMHFKKKVFQALMETFDDATDFPTSKELQHFNINTPSGFEHITDPELRLVRELVSMVSAAKVTLIRPPGEATAIATASRSGIAPEVQRGPRTNMTRQVIQRVYKPGTGQEIAPTSPAGGLDKRLFRLAAMGGKPNGNLSATQEILRKDSVDSNHSVVKVANHAPTGSPKGAAVVAAIRPQGSLINSFFGQGNGPTTAKGAASENIRAMSRRYSVCGSSNPPNAQNASQGSANGSTINSNASAMEASMLKRRLIAAGHGMVPPTQRPRYSAVGASQMTTASQGSSLLVRKSVGCVPAYQKQISPTGGASLLQKTPQIASVQGSAFNDFAQPKPAATASVNGEESSPTSALKRSLVVANTKTSFQDLLQQASQTVQRNKIESSETAATIAADDFSLDNLKREPVDPAEDHNDILGV

SEQ ID NO: 40573 - DNA, 3524 bp, DROSOPHILA
ataattcaggggaattggacttacaaatacccaggaccagccaccaaaatggaggcttaaaaccccaataaataagccaggaagaagtccgggaaagacaatggcgagaaggctcagccattatatttttttctgtccggcgaccgcacgctgtgtccgtaattaaaagtcgtaaactatttttatggtgactcgtatttttgccgcaaaatgtcaaccccgatttgcatgcgccgctcgtgggaatgttaatacttatacggcggacaggtgagcggggtattcgggtcgatttgaattcaatttaattaattgcggatagataaagcgagatgatcgcagagtaccactgcgaatcggcccacttaccatccataccaatgccgcagatcaagacgaagtatgtcggccatcgcagccccttctctgccatttatctcaatgaggcacccagttgcagtggctcattaattggactttatggccgtctaaatcatgtggcaaaatgcaaattaatatttatactcgtaccagaacgccagtggaacccgatcccagtttgtgttcgccttggcgcagctttcagcacacacagcgcataaattcataaatgtgcctgcacagccaatgaatttacagtgtaaaacataacttttaattacgcgcgcaaggaaaagtgcgcaaaacagaaaaatgtcgccacacaagtggcataaataagtaaatgcttagtaatgattaagacaatgtagcaacaaatatggcaggaagtacagcaaatagatatatattctcattaacttgctaatatcatgatgtatataggattatagataaactcatgccaattaaaccttttaaaatagtatagttattatcagtcattcatctttatacttccctcatggggctacacagttcataactttacctattacatttaatttaatgtttttgaccatttacaagcatcactgggatttctttgatatctcaaacactaagcgttcgaggagtcgctgctggatgtgaatgtgatcactgctggccggttaataagcccgcccagtctttgttggatcttggccgaggagagtttcttggtctccggaatgtagatcagcgagaagagcaggatgagcgacgcgatgatggcgaacagcagaaacaggtaaggctggcacttgaccccgtggctgccgaaccagcagatgacgaagaaggcggtcagccagttaaaggcacagacaatagagcagcccaatggtcgcatgggcctcacaagaagctccgcattaagcacccaggtgagcgaacccactccggcggtgtagcagcccacaaaaatagctatgcagaagagggcaatccaggacatgacggtcaagcccatcgtcatccacaccttaaagtgcaatcccagatagatggacacgaaaacgattccagccgaggaaaagatcagcagcggacgacggcccaaccgatctaccagaaaaaagcaagccaaaaaacctagaatcaatcccagacataagatcaatccaaactctcggcgaatccttaggcaatccagcatattgaggccatagaaaataaagatcagggcaccacacagcttttggagcaaggcgatcgccaaggatcgcgccagacttcttcgtactttcttgtacttgaagcccagcagcggtccttggcgcacttcccgctcactttctgtgggatcccgtgttagaaagtcgatctcccttctggtatcatacttctggccacgcagaaatctcagagagtcctccgcccgtggaatgttaccgtggtccacatagtacgccggcgactccggcatgagaatctgcagtgggcccagtgcaagcaggcccagattcacgaagttaataatacgcagctcaaggaaaagggacattgcgaagctatagatcaccccacaaatgcaggccccttcgaacactacgcccatggcccctcgttttttagtggtgctgatctcggcgttgtagatgggcaccaccacgcaatgggctccgccgcacattccaaggaaaaagcggccggcatagagcatcggaacacttcgggcgaagaccgtgaggaaccatcccaggaaattcggcagcaactggatgaggatggtacgcctgcagcccaagagtcgcaccatcagtcccatgggcagacaccagagagccgctccgagtgtcagcaatatgcaaactccactccattgcaactccgtgggctgaaagctataggagtgctgctccatcacagacctctccgcagttcctgaccagcccactgctatgccaaagaaaaaggatcctatgttgctgtacaaggttgccttgtagagacccacgttgttgattttttggcggaccggagctctctctacatgcctctctggcatttcagacggcctctttgcaaaccatgtgccactcttcctcgaagattgggggggttcgaccggttccgcatcttgaattccccctttcctcatttatattaaaaataaaaatacaactactttagaatccaattttccaaatttaaggacagtttcgtttgggctactacggtgtaaaatggtcttaaatgattcttcgtaatttgttatgagtaaattttattaggttatcaatgatgttaacttgatcattgaaaataaaatgttgaacacgatcagtttagggcgggtaggtaatatatgcgaaaaatgtcttgaatgttgaaaatgggcttaagagcactttccaaacatttggttaacctgaaagcaaacccagtaattatacgtctcattatgatatccccagcaaaaatatcccagtataaagcccaaagcaatgaggggattgtgggctcgcaatttacaatattgcatttccaaatcctcgtaccgcccaactgagctcaaaagggacatcgagtcggccataaactggcatctgcaaatatttgttcgctcccgacccatgggcacatgtacacccggactttgggtgggtgggtatttattccgaactcgcatccgatgctgtgttttgaatttgcacggatatctgtccgggtgtacttctggcaaagtgcagatatttatgcgtatttgatagcactaatgggccattaaatgcgtacgcaaatacacacacgtacccgttcgtatacgtatatgtatgaagcggggatcgtgtgtgggtgccaggatgaaaatgtacctaagcgaatctaaatggcatcgggggcaccgaacatgcaaaatcatgtactcgtaaatctccttaatgccatcggcctccggacaaactgagacacccgggaaatggcaggaaaagcggaggagcaggtggcgggatgaggatggggatgaggattctgatgggcacactggggcggtgtggggttaagctcttccacacatcgcatgtgcacgcatggtggatgcttgctctggccccaagaaaaagtggagagcgggaaggggattttccgtaatggaa

SEQ ID NO: 40574 - DNA, 1524 bp, DROSOPHILA
atgaggaaagggggaattcaagatgcggaaccggtcgaacccccccaatcttcgaggaagagtggcacatggtttgcaaagaggccgtctgaaatgccagagaggcatgtagagagagctccggtccgccaaaaaatcaacaacgtgggtctctacaaggcaaccttgtacagcaacataggatcctttttctttggcatagcagtgggctggtcaggaactgcggagaggtctgtgatggagcagcactcctatagctttcagcccacggagttgcaatggagtggagtttgcatattgctgacactcggagcggctctctggtgtctgcccatgggactgatggtgcgactcttgggctgcaggcgtaccatcctcatccagttgctgccgaatttcctgggatggttcctcacggtcttcgcccgaagtgttccgatgctctatgccggccgctttttccttggaatgtgcggcggagcccattgcgtggtggtgcccatctacaacgccgagatcagcaccactaaaaaacgaggggccatgggcgtagtgttcgaaggggcctgcatttgtggggtgatctatagcttcgcaatgtcccttttccttgagctgcgtattattaacttcgtgaatctgggcctgcttgcactgggcccactgcagattctcatgccggagtcgccggcgtactatgtggaccacggtaacattccacgggcggaggactctctgagatttctgcgtggccagaagtatgataccagaagggagatcgactttctaacacgggatcccacagaaagtgagcgggaagtgcgccaaggaccgctgctgggcttcaagtacaagaaagtacgaagaagtctggcgcgatccttggcgatcgccttgctccaaaagctgtgtggtgccctgatctttattttctatggcctcaatatgctggattgcctaaggattcgccgagagtttggattgatcttatgtctgggattgattctaggttttttggcttgcttttttctggtagatcggttgggccgtcgtccgctgctgatcttttcctcggctggaatcgttttcgtgtccatctatctgggattgcactttaaggtgtggatgacgatgggcttgaccgtcatgtcctggattgccctcttctgcatagctatttttgtgggctgctacaccgccggagtgggttcgctcacctgggtgcttaatgcggagcttcttgtgaggcccatgcgaccattgggctgctctattgtctgtgcctttaactggctgaccgccttcttcgtcatctgctggttcggcagccacggggtcaagtgccagccttacctgtttctgctgttcgccatcatcgcgtcgctcatcctgctcttctcgctgatctacattccggagaccaagaaactctcctcggccaagatccaacaaagactgggcgggcttattaaccggccagcagtgatcacattcacatccagcagcgactcctcgaacgcttag

SEQ ID NO: 40575 - protein, 507 aa, DROSOPHILA
MRKGGIQDAEPVEPPQSSRKSGTWFAKRPSEMPERHVERAPVRQKINNVGLYKATLYSNIGSFFFGIAVGWSGTAERSVMEQHSYSFQPTELQWSGVCILLTLGAALWCLPMGLMVRLLGCRRTILIQLLPNFLGWFLTVFARSVPMLYAGRFFLGMCGGAHCVVVPIYNAEISTTKKRGAMGVVFEGACICGVIYSFAMSLFLELRIINFVNLGLLALGPLQILMPESPAYYVDHGNIPRAEDSLRFLRGQKYDTRREIDFLTRDPTESEREVRQGPLLGFKYKKVRRSLARSLAIALLQKLCGALIFIFYGLNMLDCLRIRREFGLILCLGLILGFLACFFLVDRLGRRPLLIFSSAGIVFVSIYLGLHFKVWMTMGLTVMSWIALFCIAIFVGCYTAGVGSLTWVLNAELLVRPMRPLGCSIVCAFNWLTAFFVICWFGSHGVKCQPYLFLLFAIIASLILLFSLIYIPETKKLSSAKIQQRLGGLINRPAVITFTSSSDSSNA

SEQ ID NO: 40576 - DNA, 3941 bp, DROSOPHILA
ttttttttggaaaaagtttttaactttttctattttgttcataattttttagacgatagaaaaccgacagttttgttcaaaatttgcacaagaaaaatgattaatgagaaatcgaatcttaactttatttcacattttctagttatatatatcgaataaaaattgcccttataagttaaacaaaaaggacaactgaaaaaatatttaaatatgtttttatggaaatatatttctatacatagttaggtcaaagtcactagaatattattctaatgtctttggttaggtagtgaaatatattgcagtacatttatgcgaaacaaccatcacgaaaatttgaaaattagtttggttggtgaaccaaactggagggtgggtgctccagacgttgttctagcagagacataagtaaaattatgaaaattaattaattctaataattatgacaatatctttggttcgggtaccgattctggagtatttccaaagcttcagagtatttagatactgatcaataatattaaattgtttttatcaatacatcagtgagtcggtggaattaacagttccaaagcacacaaactgatgcaattaccactatcaggatatatacgtggacctaactacgaagtaacacatcatcgataacagaagattagatatgaaaacgctgacgcagctaagaaaagcctaaacataacaattcagtaataacataaaaccttcttgtatttataaatagaataaaaaaataaatttgcaaatttgatcaaacgtaattccaacgttattgaaatacttcccgttttgggtgaaccaccggtaaagatttacaaggtaccagtaccattcaatatgctgttctttttgcacatttggctgggaatctaatctggagaggtctaccgcgaatgggccgtaaataagggagtcagtgcccagataaggcagctatataacctctcttcaagtggccgcgaggttcagtcgaattcgagacatcaccatgaaactctttgccatttgtgccctcctcatccttccgctggtaagcggtggaatcgtgccacgcacacctactaggcactttgtggcctacgagatccattctacccataatctcccccagatggaaggtaagagacagtattagttataccagatggtacaattcgctggatggattacgcttagcatttggatagaacgacttgcacagaaatacatacgcatttcttattaaaaacaaaaacaaggtgtctttggaaatttgaaatttttaacatatcaagactaatcaccagctgtctagacaaggtaatcaactaaattcgaaagctactcgtaaatcattataatcgctaaaaagtatagaagtatgaacatgtccgtctgaccgtccgtccgtgtgtctgacttatgaatctcggactgagtttatttactaaaatttccctgccaactctactcggtcttgcccattctatcgaaatgccacaaagtgttttgaattcttcctgtttgagtaaagggtatctgatagtcgttctatctagttgcaaaatgaacagtaagtaatccaattacaaaaattattttttgttgtatccgcttagccatcgtccagaagatgcagatcctattccagaacatgattccggatatgtccgtgttggccgacgctgtcgccgtacccgacatgtccgttcagtcggatgcgggtgtgctgccggatatgtcggtggccactgacgccgatgagacccccaggaggcgctccgcagagttaaaggtcgctccgatcgccaagatcgccgctcccatgatcgctaagatccccgatatgtctgtccaggctgacgccggcttaatccccgacatttccgtggcttccgatgctgatgaaactcccaagcgcgcttcctttggtctaaagaagcccctgctagacagaattgccggtgccattgctaagatggatgccgatctgattcccgatatgtccgtggccaccgatggtgctgacacccccaagcaggctgtttccggtgacaaagctctcccaaaaatgaccaaggtctctggtggcgagccagtggagattaagacccatgccgacgccgatcaaattcccgacatgtccgttgcctccgatgctgatgataccccaaggaaggttgcagctagcctcaagaccctgcccaaaatgaccaaggtctctggaggcaagccagtggagatcatgacccatgccgatgacggtcttattcccgacatgtccgttgcttcagacgccgacgtgacccccaagcagactgttgccggtctcaaggccctgccccagttgaccaaggtttccggagccaatcccgtagagccgatttcccaagctaatgctgatctggttcccgatgtgtccgtggcttccgatgctgaggataagggtaagtaatattgttttaaaaaagtattacccattttaaataaacttcaatttggcgaaaaaatttatttaaaaaagaaataacctagaaagttactccttaaaaatatattatgtgcaattttttgtcatgacttctggtaatattaaatttctgctcataacattgataaggataaatatttttgagagcaagatattgtacgatatatatatcgtacataatattgcttaagtattcataagattaactttggtatttaaatttaaattcaatttcaaaattctttcttatagctgccaatcagctgcccgatatctctgtggctggcgatgccaagtttgatcccaagatgactcttgctgcccttttggccacgatccactaaataactctgccccgattaaaacgcaaaattattcaaatctaactggttgtgtgctattgtattcttaagtctttatacgatttttaattaatttttaaaaaagcaataagcagctggttttattttggttttcatttactatcagcaattgattggagttatctgactgggttgatttagtataaatttcctatcgctcgttgtcttgttcagattgaaaccaagttggacgtcagcgattaggaattttgaaattggtgatgctcactataacatttttagaaatgggtattttaccagaataagtggttattctggctttaagatttatttatggatggtccatttttaccattttgattaaactgaatactccctactaactccatttgtgccatctgaacagatttctcctatttattttactgaagaaattttatttgtatacagatgcctaagcttggaagggaagacacaaatgggccggacataatccaagttcaggctttgcatgttggccaagaaaaggctgattagttttggccctggtctaacctcccaactaacaaataaaattagttttttttctcggtcgggatagctgggaggcggaggtgtattgtatcgcttgctatttataaaaaggaattaacggcaaaaaccggacccacacacaaaagtgccccgaatgtgatcccaatgtggcacatggccataaacaacgcaggggtgcggatgaagagttcgttcggagtgaggactccatgacagagatgccaacttggcagatttgttttaaagtattcacttctatttatcggaaaattaggaaaataaataaccaaatattatagtaatacgacttgttaaattagcaattatacttcatttcatatggtccatttttcttaagagagttttgataacattatttacatgcttgtgaaactgtggtttcaaaatttcaacttcatcctttctacataacagtgtaataaatatcattgcagtgttggttaattatgaatatcttgttttttttatgtgttttttgctttcagaatcaattttttatattttttactacccaccaaaaatattcttctttt

SEQ ID NO: 40577 - DNA, 1165 bp, DROSOPHILA
atcaccatgaaactctttgccatttgtgccctcctcatccttccgctggtaagcggtggaatcgtgccacgcacacctactaggcactttgtggcctacgagatccattctacccataatctcccccagatggaagccatcgtccagaagatgcagatcctattccagaacatgattccggatatgtccgtgttggccgacgctgtcgccgtacccgacatgtccgttcagtcggatgcgggtgtgctgccggatatgtcggtggccactgacgccgatgagacccccaggaggcgctccgcagagttaaaggtcgctccgatcgccaagatcgccgctcccatgatcgctaagatccccgatatgtctgtccaggctgacgccggcttaatccccgacatttccgtggcttccgatgctgatgaaactcccaagcgcgcttcctttggtctaaagaagcccctgctagacagaattgccggtgccattgctaagatggatgccgatctgattcccgatatgtccgtggccaccgatggtgctgacacccccaagcaggctgtttccggtgacaaagctctcccaaaaatgaccaaggtctctggtggcgagccagtggagattaagacccatgccgacgccgatcaaattcccgacatgtccgttgcctccgatgctgatgataccccaaggaaggttgcagctagcctcaagaccctgcccaaaatgaccaaggtctctggaggcaagccagtggagatcatgacccatgccgatgacggtcttattcccgacatgtccgttgcttcagacgccgacgtgacccccaagcagactgttgccggtctcaaggccctgccccagttgaccaaggtttccggagccaatcccgtagagccgatttcccaagctaatgctgatctggttcccgatgtgtccgtggcttccgatgctgaggataaggctgccaatcagctgcccgatatctctgtggctggcgatgccaagtttgatcccaagatgactcttgctgcccttttggccacgatccactaaataactctgccccgattaaaacgcaaaattattcaaatctaactggttgtgtgctattgtattcttaagtctttatacgatttttaattaatttttaaaaaagcaataa

SEQ ID NO: 40578 - protein, 349 aa, DROSOPHILA
MKLFAICALLILPLVSGGIVPRTPTRHFVAYEIHSTHNLPQMEAIVQKMQILFQNMIPDMSVLADAVAVPDMSVQSDAGVLPDMSVATDADETPRRRSAELKVAPIAKIAAPMIAKIPDMSVQADAGLIPDISVASDADETPKRASFGLKKPLLDRIAGAIAKMDADLIPDMSVATDGADTPKQAVSGDKALPKMTKVSGGEPVEIKTHADADQIPDMSVASDADDTPRKVAASLKTLPKMTKVSGGKPVEIMTHADDGLIPDMSVASDADVTPKQTVAGLKALPQLTKVSGANPVEPISQANADLVPDVSVASDAEDKAANQLPDISVAGDAKFDPKMTLAALLATIH

SEQ ID NO: 40579 - DNA, 21407 bp, DROSOPHILA
cagaaacattcgagtagccaacaaaaagataaacagcgccgaaaaacttttttcggggtggagactcattttaaacaaattggcaaaaagttgagacccccgaaaccgaaaagtccggcgataaagagccttaacggtaaaagtatctaacagatgcgcccaacagcgagctaataagagcaaacgggttctagttggattggatgagtgagtgagtgtgcttcgttgagtgagagagcagccactctgtttcagttcagtggtggtggtggtgggtatactgggtgcactggtggtggtggttcagtggtggtggcaaaccagccaaacgcgtcgaaggtcttgccccaccaacgcgagcgagcgagagcggcgatttcactcaactagaaggcaatgccagctaaacgagagtgagcagaccagcaccactgcccgtttgagttgagtatggggagcggagagagatttgtgtgatgtgtcgttaggtcgaaacggtcgagtcgagtcgggtcgggtcgtgtaccttttgccacgaatgttgtgccagtcaggctctaaaaggccttacgagaacagctgagatttcgctgctccgcatgacgcaaagataccgaaattgaaaaattttcaagtctttaagatattatatctcgtgtgtgcgccgagcgggaaattaataagcaacatcgaaaaaattcaaaaattcaaaaataaaccaagtgttttattagtgaagccagctgaaatgttaacagcatatgcagcttaaaagaaaatattaaatttattttaacataaagaagaagaattataacgcggctgacaaatacgaataaaaggatacaagttaaaagctagagccgaggactctatcgaaaccaaagtgtgaaccgtaccaagtgcgtacaaagtgtattccagcaattatcccacgtgttccgacccggccgccaaaattattacgcacaattcgctgagcgtgtacggcggcggcgtcatgtgcgcctccccgtccacggctcccggcttcttcaatccgcgcccgcaatccggcgcggagctgtcggccttcgacatcggcctgtcccgctcgatggggctgggcgtcccgccacacagcgcctggcacgaaccgccggcctccctcggcggtcacctgcacgccgcctccgccggaccgggcaccaccaccggcagcgtggcgacgggcggcggcggtaccactccgagcagcgtggccagccagcagtcggcggtgatcaagcaggatctctcttgccccagcctcaatcaggcgggatccggccatcatcctggcatcaaggaggatctgtccagcagcctgcccagcgccaatggtggatccgccggtggccatcactccggttccggatcgggttccggttcgggcgtcaatcccggacacggctccgacatgctgcccctgatcaagggccatggccaggacatgctcaccagcatcaagggacagcccacgggctgtggcagcaccacgcccagctcccaggcgaatagctcccactcgcagagcagcaacagtggatcccagatcgacagcaagcagaacatcgagtgcgtcgtctgcggcgacaagagttccggcaagcactacggacaatttacctgcgaaggtgagtacactgcgagaaattatattcaaatagggggggaaacagttagagtgaatgtgtgagctagggatgttaccactccaccagtacattaattgtgcttatgccatacatgtcaatgtatctatttggtgccatcttgaggaccatcacatcttggcaatttttattgctgagtagcgatctcacctccaaggtgcaattgggggtcaattgatttcgtactcggattcgaactggggatgaccaaacagaaatggccaacgtaatagaaagcgagcacaaaagcgtgcctgccagccgctgatttttgacagtttcggtgagttatggcagtttgatgagttggcaataaaccctcggccaggtgtgggtgtgtggcggaatggtagagcagtgggaattcttcccagggccatgcaaaagttgacgggatgcagctggaatgtatatctgtgggccagggcagtcaataaacctacgtggagcccaaaagctagttagttgatcgggggccccaaatcatgtaaaaatgtttttacgagcaaaaaatacatttatgatctaaaatatagtttggtttgaccccagcgagatttatgtttgcgcataagcttactgtcttttgctgatatattattgtgtctaattaaattttacagctgcaattgcccctaaagtggtgataaagtatctaaaaaaaaatccctgttctggcagatgattttccagatactcagatacttttgcatctccggccatcattccgttacactagagctcgcagcacgagagctcttgaatatagccatatatatatatatatacatatattgcgatctgggcacccactgcctctcggccttatcgtcagataaaaattattatctaaataaaatacggtccgtgctttgtcctaagccaaacaattgttgtgcaaacatgcaaattgtgcggcggccgctaaatgaagcgcccaccttcttattgtctctctcactgggtttctggataaggggagcctcacctggagttccggaaaagaggggtggcagatgggcaatggaaggcgggaggcggggcagatgggtaactgcattcagagatagagggagatctggcatacgctctggcatttagtgcagcttgaagttgaacttgtcatgctcgtatctcttcaaatgttctggcactggagcacacaggcaaagccactgccacagccacagctaagagccaagaagtgactatgactgggcagaggcacagtgggccattggtatgatgataccagagattcccagatacttggcactccgttggctcccactgttcgttcgcgggcgctgctattattattaatcaccgagcattttgtacgcatgcgcaacccacaagagcaacaatcagaagatatgcggctctgtgaccgcctcgttgcattctgaaggtgtttccccggatcccttcatgtggcatagtatgtagttgcctgttggcctgatgatgttgccacgatagcaatctattttgttctatgcaatcgcccagactgcagagctgtagctttagcttcactcaaatgctggcgaaataaaacgtaggaataatcataataaagcgcatagagcccatatcattgccggcgttttcagggttttttttttatgtttgctactctggtgcctggtcgcgtcctttcagctgattcacttcgaggtgcagatacttttcgtggctcttagaaaagaaagatactccactccacaccactccgttgcgcggcaactcgtttcggctgtctgagctctaaactcgtgtgtgtccgtgtgtgtgtgtgctcacttgtccgtctgtctggaggtcccttctgtccgtatgtctatccgtatgtccagtttccaggtttcagggcacacggctagctataggtatgggtataggtatgtgaatttatgccaagacaccccgccagtcgcggtactcgtagctgcaagattaattgtagcttatgcgtgttgtccgcttctcattccccttcccccttcatcatgcttgccatcctgctgaacagaagatcctcctgcccatgtcctctcattgtggtggcaacttgtttgatttcgcgcccagctgttggtgaaattgggaggacgagcggccaaaagtcttgagctcatcatcggcaggccgaagcgaatggcagccataacctttagccaactggaaaagtcacggtttagtgccgactgaaaaatgtgcgctgataaaagtgcctcgataatattaatgatgagtgcatggctctaatgtggcaagatccctttacgttctgcccccgccccctgtatcacctattaatttggctatttgtcatggctattagtgtggccgaaaagctcagatttcccgtatctctcggctagttgcacagccatcaattagtgctgcagcacaaacaacggcaagcttgcacaaaatattactgccaccatttctaggaacccaattgaatttccaatttcgacaagaaaactatctcagcacccatgtcaaaatgggaattagcataacttagtggcgcaccgcgcacatgacaatgacaaataaattttgcgaaaaattgccagcaccactaagtaccaagtacctggcatgcaattaattaaaacaaacatcgggtaagcagagcaggaccacaagagtgatggtggggggtgatcataaagagctgtaaaaaattgccatcccaactaattgttaagcgccagccgagcccattagctgccacaaataatgtgtgtgaagtgcagccgccagccacagattgtcaacttggggcagcataaataatcccgacattttccagcttgttccatttgctccagctatatgtatgtactatgtacgagtatgtacattttccgcgaacgagcttacatcaaactcatttaaatagattcccacgttcggcaattaaggctcagaacccaaaaaaaaaaatcccacaagctcaggctcccaaacccaggtctttgaaaagatgaggagaaatgtccgaattttttaatgtcgcacaatacttggtcagtatacggagatttggcggggagaatcttgtttcctctgtcttcttcctttgtgcagaattttattcagcatgtgtggctttttaattaacttcattatgatgtgggcaaataacttgagtgaaaagattaagaatactgtactgggggaaattatatagattttgttatggtgtttcttgataaatatacactgcttgagggttaaaaaaccataacaactagctttatttcgcattaattctctttgaagaaagctatttatttttggttgattaataaaagatacatttctgcttttcactttgcacctcttgacaatctgttaaatggcgctcttttgaaattcgcttttcgctgtggaaattcattccactttgagcatttaacaaaagtcaaacataaatcaatttgctgtctgtgatacgacctgccccccaccagagcaaagtaaaagcaacaaagtaaatacgaatgcagaaattaacaacgcccaccgaacattgcaatttatgacgctgcaatttcgggcatatttttcgtattttttatatatattttgtgtttttttgattttgtggtgagtgggcgtggtcaaaacgcccgcagcagcaaatttcttatttattaattagcaggaggcaaagataaattcaaggcttgtattaaaatttgcatttagctgaacgagaacggctttaccaagccggccgagtcaatttcatgcccataacatatatcaaataaatcgccttttgataaacatttataacttccgtgcgatttgcagtctgctttctgatgatttacaactcggtagctctttctcttttctccccaactcatgtgaatgggataacttatggcctcgatatttattttgacaaatttttatgtttgcactggcaaatattcgtgggcatttatcgggttaacgacgctgtcacaataatcccatacttgtacgcgtatatatgtaggcgaaatcgttgcccaagcgttgtgtcaacattaatgagcccagagctgaactcttcattaagggcagccaaaggaaaatcaccaaaaacaaaagttaattgtacagatattgccgagacagaaaacagaaggcagagagacaaacaaacaaacccaatagggctggggatcaaaaactgcaactgcaagctgcaactgcagccaggcagacattgtaatcattaaaagctggcttgtactacaaatcgttgtacttagaagaaatgttcgagccaataaagcagactagccccgtctcgcagaccagtctcacaattccaattccaattccattttcaattccgaatccgaatgcgattccgaaactcaagtctcaagtctcttaaaatgaggcgcaaaaaattcatcctgacacgatgcgatttcgaaaaaggcccccgaaatgaaagagggtctctggggtaaggaaatcgtgaactaccgacttgatccgctttataatgtaacggtttaattaattatgttaagccccatctactccaagcgttcgagctctgggccaaaaacttttcggctggttactgctagctgcattttcctctgttgccacttcatgcgcaattttcgttttcaaccaagttcggctaatcgatcaggcccagcacgttttgtgtgcatctttcagagggccaaaacaacaagttgcaacttggccagaacggctgcgatctagccggtagagtctttacctttggccataaccccgcttatcgccatgtgtcgctggatggctggctgactggctggctggccaggcccaaaaggaaccagtacttggctacatgaccagggcatttgcacggctttcaggctttgcggctaaaagagaacgcgacttgccgcataacttcgcatagcatcagttaaatcaaagccaaatcgcttatctaaggcggcattttctttgcattttcccccgggcaacgtgacatatggaagatgcaaatgaaaagccagctaagactgctccgattccagcgaaacaattgcaaatgttggttctgagctcatatggatggatactcgcagagggaacttcccagattggcatttgatttacagttgacccatattgagccataaaaagtcttggccctgtgggatatcggaattcacctgttccgttccaggttcttattttccgtttgtttttttttttttgctagagaccccgttcataatcagtgcattttgtagataccccaagtgcatgagccgagttatgagttactaccagtttcgtgtctgtcggcgggggctgtaattatgtttcggttgtactccagatattttgtctggacttgtgcaccattcttggcgctgccgtttgtgctaattacttggactagctgctggctgctccgtgttgcaagcttaacatttaattattgcaccttaatgatggccctctccccggttgccatctgtatgtgtgtgtgtgtgcattggtaattagaaaatgagccaaagtcaaggcgactttgactttgcatcgctccattttccgatcccctcggctcccattcccccgatctccgttccgctacctctgggccaagcgatcattgaccgcggctggggaaaatggggaaaagtggagtccgcaattgattgggccatctgccacccgagtgcatgtgccaaaagatacagatacactctcggtgcagagccaactaatttaacgctttaaattgcccagccaagcggcaaggggatctcgtgcggtgtagatacacagatgatgcagccagctcactttcaggaagttcaattaataaaacgcttagcttagcttagctaagttctcggaacctcttctaactgtattgaacgctttatggcgcgtagcacacgcgaactatgtacttcccttagtcacccgctggcaattaggtgaagcggtaattgaaactaccgcaaatgcgaaaatggccaactcaagtcttcgactcttttggctaagccaaaaagccaaacgtttaagaccgaagccgtagaagagagagagagagagagagagagggaaagagaaggattctagggcttcgccccggacttcccacactatcgtatctcaagcgctagtgcgatccaccctttttcggttattgatataacacgatatccactccatccctcgtctcagattttgtttacggtatctgcgcgatgtactcgtactcgcattcgtatcttcatcaataacgacgcgcatctttcgcatcgcaaagtccactggggatcgtttcccccctctgctcatcccgaaaagttaagatacccagagatactcgggatactgggatgggatgggttgcagctctagatagagttgcgataggcgcatatgggcagtttgcctctgttgcaagttcttttatttacctctgcctttgtggctttctggctttctgcctttctggccaagtcgttcgttcccccttccctctctagcgaacactcgaagcgcagtcagagtcagtgatggaaattacggggagtacgggggggccaaaaggcaacggtacgttttggcagaaatcgtgactcggtacaatatcgttattcgtagatcatatggtgtaaaagctggcagtgtgtaagtgagggtatttctagatgtgttcgtagttgtctctccggttggtctctatgaaagagccaaaagtgatgaacactgaatgccctttggtggattaactataacgagtgctcaggataacaagatcgccgatttaggatcatcaagacatccttaatttggtcagttaagactttactttgaaagactctgtcttaaattaatcgatatcttaatctaggttttttgaagtatcttccgctagtgcattaagccatcgactttcaatcaatttcaatttgcggaccacgttttgtttccatttcggtgggaggctgaagccacacgatcgcattggcaaaaagcattgaaagatcttttatagcctacgatcgcatgcaatataagtcgggggtggaggagtggataggataggatcgggtctgcataaacgctcagcgcttacatattttgtttgatgatgattttacagcttaaaacgaattttatgagcatatgccattgttttgagttattgtgagaaatctttttgctctggggaaaagcgaaaaaaaggacggaaaaccaggtccacacaatgccacctatacagactcgtatagcatatatgtacatatatccccaaaccaaatagctgggctctatatgcagaaaactctgatgcagagccaagtgatacacatgtttagatacgcgtcggcgacattaacttgccgtgtcgctggcttgtcctacaacaacacccaactgtggcccaaagcacttagccaagttgaagttgcgaccaaaactacggggcccaacgagccatggctgatctggccgccgtctagcttaacagtaaattcgtggcattcgagctgaagccgaacttgaacttgctgccagttttattccctcttttattttcgggagggatgttgtatcgccgtggccaagatacactttgttaattgaaagccattaaaggtaattttatgggaggcgttaagccatgaaacgtgtaacatgaccattgacatgggcatcaggaaggcaacgtggttcggaactcactttgcctcacacaagtggtaaccattcttgcttttatttttttttttgaggagcctgtggtgccaaggaatttgtagcgctcgcaggcattctaagactgggttgaatttgaaataccttggttttttccataccagtattaataatatcgaatgttttccctttcaggttgcaaatctttcttcaagcgctcggtgcgacgtaatctaacttactcttgccgcggcagcagaaactgtcccatagatcaacaccatcgcaatcaatgtcaatattgtcgattgaagaagtgcctcaaaatgggcatgagacgcgaaggtaagcatcatcaacatgatcatcatctcaccatcaacattcagcagctcaactagttatagaacagaaaaacaaatgtgttattcagaacaaagaaattcaggcagcacagttgcctgtgtgctgtgggtcaattaaaagtcaaacccagaggcaaacagtataaattaaatcaacggcagaagaaacggaagtagagcatcttctcgatgactaaatgtcacatgctaggaattcgcagagaacaattgggttcggttcggtgcggtgcggatcagttgagttatttgggtgccaggaactatgccagatcagtgcggatcaggccaagtgttggcacccaaattcgcatactattcgctatacatatcaccactatgtagtcgtatattccgccacgcagaagtcgtatgagaaatgacaattaggcaggcgattgaccagcttattgaccccaaagatcaaatgcaaacttgttcgatcgcttgttcataattacaatgaagcccagtcggcttgggtacactgcgcgaaatgcgccacaattgatcagttaatcaaatgcagcccaatgtgtaactaatttgtaagcacggccaagacaaatatttggcatacttgggtgagactcgttttcctgcagcggcacaatgattgacgtattgacggaatgactgactcgctgactgactaactgactaagtgactgactgactgccaatggccagttacacttgtcagcattaacaattagcgtctgtcagggagtcgcagatacaaaagatagagactgactgcagttagcggacactaagctgttattatttgcactaatattgacaggtttttcgcaaaatgctaatagatatagccatagctatagccaacggcaacggctacagatgtctgaacagtgtacacaccgatttgggttaagaacgaaaacgttaatttatggcgactacgggcaattaaaatgcagctacagcagcctcctctcaatgcacttgtaattaaatgaatataaacatttatttagtcgccgtcggattgtgaaaaaggcatttcaaatttacctaagccaagactagtttttggctaatgacatagtccgaacccaggtccgcgatctacctgttgggcccattaaatctaatatttcctcacccagtacttgccccagaacttctcgtaaaacgcaaaagagttcaacaccttttgccacattctggatctgggttgttttcaacgtttgtgtttgtccacccaatgttgagtcacatttctttaatgacaagttctgcgtaaaactagtccctcgctatcaaagctgagaaatcgtgagaaaatctcaattctgcataggcggtttccttcggttttaccctctttatgtgagggccatggtacttagttgcgaagcgggacaaaggttgtgcctggaacgaccctgggtcaagaaattgtacgggtttggcgcacaaaaagcctcacaaaacctgaaaaaacaacatcaaatcggtgttccgggtcgctctaattaaattgcagtgtcaattggtcaagggaagtgggatggggcagaactggtagctgaagttttcctgcacaaaaactagtttttttttaggggtagcaaaattatgtaaagttattcgggatttatgatgaatttttaaagggatttccatctatttcggggtgagaagggaactcgctggctgggcattagggagctgtgaactcttgctcgtgaactttgaccactggaattccgaatccaccggttgcaagccaacaccacctgcattcgctgattttgtgggcttggtcgaacgcatttctgggcagacaatagatggagttagttgaaaagacttggctggttaagaaagtgggtcagcaaaaggtttctaacacctccacggccagatggaaactccacaccttggcaacccgcctagctgggctaacagccacacatcctaggcacacctagagctccatcgcaatcttgccaacgcaatcggagccttgggccagaccaattcgaattcgcactaaaacaaagcattgctaaaaatgcacaaaacattgtggatcgaagcccatggtggtgcagctggaagtggaactggcactggcactggaactggattcgccgatctctacctggtcagcttcgtccacgaaacgtaacgtctttctgattcctactcggatttaagggaaaagcgaaagcgtttctggtcagttcgcacaatggacatatcctgaaatccctttctgtcccgggtccgaaggtgtttgtttattgccctgccggagcaattaagccgggggttgcaccacccgaaccagttgaccactgtccatccggtggaggagcaagcgagatagggacacttatttacacaatacatttgcgtaattgtgcgacatggagtgaggaggggttggccatcccagaggtcctactctgtataagatgcacttggtgatctatgacggcgaaaccggttgagtgtccagcgccttatttatgcgcctgggaaaatattgtctgaccgcaagagcagcgaagaagctaaaagctgctggccgcaaaacccaaatggagaatctgcctaagcctgtggtttcgtccgagatcaggcccagattacagcagccaagaaagcagcgcaaagggtttgccatggaatgggttttcgagatagtactaacccgacatgcccttttgcctgattgcttaatgaatgaatcttccgccagcacgtgctcaagttttaagttcccgctcacatgtcacacactcgagagcgtgtccaagtggcctcggcttaactttcagcagatattttgtatccatatccacagcgctcatgtccatgtccgaatccacgtcaatgtctggcgaaatgtcgtttccggccagagttcaaaaggcctttcactttccatttagctgctcagttgttaagcatttacattgttaattataatgtttatatatagccccactgtttgcaaaaaaaaaaaaaaacacacacacacacacacagagacaaacctgcccattattttctttcctgcctgtagtcatacttgcccaaaatctgccaaggcggctctccccacatctgctgtatctacagatatccgtagtgtgtgtgtatccgaaggatgcgttgaaagtatttagttgaaatttgcatatctaagcagtcgagccaacatagaataaggggttgaaaggctttctggggtggcagcaaagtatcttatgacgatgtcttcgcctgcaacaaagggcgagcaacaacaacgcagttctatatgcagatcgaggtggccagatactcagatatatccagatagctagcattgtgagttgtggcagctttgccaacagagctcaatgtcccgcattgtgctgagtgtgatgtggcggtcaaaataagcccaacaaaagcaagattcattttttcagggtgcctatacatccttccaaagattattttcttaagagaataccttaactttaagattagttttggaaaaattacaaacaagcgttatcagttagttagttagatcacctttccttcaaccaatctaatcctgatttttccctctttcttttcagctgttcaacgtggacgcgtaccacccactcagcccggtctggccggcatgcatgggcagtaccagattgccaacggggatcccatgggcattgccggctttaacgggcactcgtacctcagttcctacatctcgctcctgctgcgggcggaaccgtatccgacttcgcgatatggccagtgcatgcaacccaacaacattatgggcatcgacaacatctgcgaactggccgcccgactgctcttctcggcggtcgagtgggccaagaacatacccttcttcccggagctgcaggtgaccgaccaggtggccctgctccggctcgtctggtcagagctcttcgtcctaaacgccagccagtgctccatgccgctccatgtggcgccactgctggccgccgccggacttcatgcctccccgatggccgccgatcgtgtggtggccttcatggaccacatccgcatcttccaggagcaggtggagaagctgaaggcgctgcatgtcgactccgcggagtactcctgcctcaaggcgatcgtgctcttcaccaccggtaagttgctggacattctgtacaaggatgtgccggcactgctcaccaaggtttcagcactgcttggcaagggttccaccgcatccaatgacgatgtcctggctgtggtccgtgaccacctagacgaactgaatcgtcaggaacaggagtctcaggctcagcagcaggcgccgcttcacctggcagccttcatgaattgcgtggccggcgttgaggctgcagtgcagcaggcggaacaggctcaggtacccacgtcctctgcctccgcttccgtctctgctccccttgttccctccgccggcagtgcgttcagcagctgccaggccaagtccgccggctccgagatggacctgctggccagtttgtatgctcaggcccaggccacgcccccaagcagcggcggaggcgacgcctccggtcacaacaacagcagcgggctaggcgcctcgcttcctactcaatcgcaaagcggttcgtcctcccgcaacctaaccgcctcgccgctgagtacttcgctggcaaccgctcccgctccagcttccgcttcagctcccgctcccgtgcccacctcctccgtggcccaagtccctgtgcccgcacccgtcccagtaacctcctccgcctcctcctcctcgctgggtggtggagcctatcagacgccctcggctgcggcggcggcggcggcaatgttccactatcagacgccaccgcgcgccgccttcggttcggccttcgatatgttccaccacagcacgcccttcggagtgggggtgggtcacgcccacgcccttgcccactcgagcggcagcggcagcgcgtcctttggcagtcctagttacaggtattcgccctatagcctggccggtagtagatggcagttgtaggatctcacagaaatcgcagccccttgtattgtaaatgtacttgtatctatatcgatagcgttaggtagacctaaaccctctgtaaatgtacttactttagtgcctatggctagtttctatctatttattgccttaaactaagcataatttattctagtggtaattacatagattcaattagtgaacttttgccaaaaaatttgatgaaacaaagactctaagatgagggaggagaaaaaaagaatcttaagaatatatataaagctgttgctgttaaacaaaaatctaatcctggcttgtgtttttacttgttattgcttactaatgctttacaccgcttgttgactaatttatagattatttatttatttgtttattacttactacaattggattactaacaaataccatactaactcgaactaacttatgaactgattaatgcttcatctttgaagatacagatctttccaagtgagatcctactagcagttgttaaaaaccaactatagatttgttgattaaattggatctattgtagatcacgagaaataagtataaacaaaattttgcattatttagaagccgtaaatttggattcgtataatctgaatgcattaaaaaatagcttttcgtttgctatgcaatgatccatttgtttaaactttctaacgaaattaaacaacttcatcattgcttttcagtaccaaagagttacaaaaataaaatctgtaaactatgatagattggtttttatttcttaaatttaaaagaaatttaatccactatatcgtacctcggtatttccgcttatagtttgaaaagaatatctagtactttggaaactactttaccaaaaagtttaaactgtgataatatagtttcacattattaaactattttaaacttatttgaatgaaagttaaacaaaattttaatcaagatccttagattcttaaaatgatgaaccagttctgattaagtttttaaggcacctttctaacccaaggtattggaatcactatttatttcagctcgttggaaaacttttaattttggtgaattcattttgttcataatttcagcaaatttatcagttttccgtttcataaaccatccatttatttaacactaatcttctcacatttttatttcattttttaacaaagctattcacacaaaaacaaacaaaatttaatctcatccgcacgtggcaacaaaactctggactttgggattatacacacactgaaacacatgcacatctaaaacatgcacacgtatttaaataaatcacaccagcttatatgcgaataatttaaatatttttaaagccttataccatatacctacttatttttagacaattaggttccacgcgaaataaatcactgaagtttttgtatgcaaatagagtgaactgggcttttctttgactttagcctaagctaagtttgcaattaagcgtaagttagcgattttaagagcagcttagttatgggtagggaaaaactgaaattttgatttagtacccccttttccagcatggccagggaaaactgagattatgatttagtaacccccccttattccatgtcgtgtcaagcagctgtccaaattcacgtcgcaattgtttttcccctgatctgaactcaacttggcttggagatatcccaaatcctctcctgctctttgtggcgacgtttattgacgtcgagataccacattatgaacattaatacaacactcgtttatgtcgcttacttacaagcccaagtcaatggaccaagtccaggccttggccaaacttgcaatgaaaataattttaccattttcaaaacgctgtgtgtgtcgcttggcctcactacactgaaagaaatagataaggaaatataactttgaattatctcaaaaagtatattgttaatttgattggtattgatggacctatcggttttaattacgactttatttgttaacaatcagttatcagatcttctccacaccttatcaaatgtcgaattcttttcaaactttttgtattgaagctatatgctttttctcagtgcaagccccgatcagcttagccccactcacgagggggcgtgtgtggcatggagttcgtggtctcgctggctgagaccctggaccgactggcaagctgcaattgcatttgaattggctgcatgagtccataaactgcagccgatcaatcgctgcgcagcccatacccaaacccatacccatgcccatacccatgcccatacccatgcccatacccatggtctccagcttgaagattgtgggagacgagacacgatcgcggtagtaaaataccgggtatagacttactagatcttctgcagcgcattgacgacatgtctgctcctctggctgcttcgttggctggcaaacttacctggctgggaccacctcaccaccttgcctggcaatggtgcatcttcctccagcttcagctccagctcaagctgcagctgcatcccgctccagtcccagccccctctgattgctgtcgtttgttgcagttgttaagagttgtagctttcatgtcttggccacactttttgaccaacattctgtgtgtgtttttcgcctgacttgaagcagcagtctcggctcgaagcagcaccgctcaaatcgttttgtggcgctcattgatcgcctgcgctacttttccccctgaaaattgccagcgacgtgccccgaagcctgagactctggctggcaattaacagtaacttttgggccggggcagacttgagttgattagaatcattaagggcgcgtttcgatattaggttttgggttttcccttctgccagcctttcggaggagtcactgtttgctcaaaatttagatgcagtcgatagagcggaactccttttccacagttgaccccacacgacccgatccttattaaaactaaataaagttataactgtttctggcggtcgcggcacgacctgctgcttggccagaactggagccataaagaacacaaatctaataaaatataatgcagcaattcataattttgttaaacagtttagcccccccaactcctgttgctcctttttcgatatgtctgctgttggttggttgggcaaccaactactttacggtcattatgcatttaaaacacgcggtcacgatctctccctcgctgagttagtaactgcgacgacccaaaaccgaccgaatactgaaaactgaatactgaacactgaatgccgaaaactgaaaactgaaaaccaaacacacaaatacaaatcgaagccaagctcgtcttagggtacataactacaagccaaaaacagttaacaaaagccagagtcaaagccaaaaaattaaaacccagagacgaggctaacccctcgagaaagctccgatctgggctggtgcttccccagagtggagcccgacctggatgtggaatgtctttcactttgagcatgcaactcccactcctccgcatcccgagtcctcgtcatctgcgatgcatttcaatgaaactaaaaatgttcaatgcctgccctggcacaatttccacttcctccgccgtctgtgcttatgactccccccaattggatcctttggatctcgtccaagctaatggaaagtcaattgacaattatggccatggccaatgaagtgattcgttgagctcgacggactgaccatgtctaatttgtatagccagagcttcacgattattaccattacctctagttacctcgttttttttttttcttttttggccgttgtttatgaaaccgaatagttaataatggctaattgaattcctgttgccgctggcgacaaatcatttagcttgatttacgcgctttgtgtgggggcaaagcacggcaaatttatatgataactgccgtcgaacattttactttatctgccagccaaaaccaatcatcgaacagatcttgcctttggttttggctttcagctgacacactcgtcttttatggccagctcagattcggagttgcgtgcggccaatacggcccagagtgccattaacgacatgcagtttaagaccaagacaactggccatgcaatcacaggcgagagagttcggcaatcggatatatgagctcacatcacgatgatatcggttggcaaatggcaaatggcccaatcattagcttggtctgctcgactgcaaaatgatatatcagctgcaggtcttagtttttcgcttgcgtaatagagtcctcgtgtgtgcagtgactaattaagcaaacaaaatttcatatgcaatttcgaaacgccattcttaacagcaacgtcgaccatttgaaatgctttgaagctatgcaaatttacaagtgctgatgtctaatttgaatttcaaacaacaacaaaaatgtatatgtgtgtatttcagtatttgagtataaaaaatagaagaaccgctcgttgccgtttttgttgatgctttaacagcggcaattgataagcaaacttttggtgcctggcaattaacactcgacggcacacgctgcgtatgcgcaatctagcatcgctgtaattaaatgccacggctagcggccgacaagatggaaaatccattggtatcgtatagttttcgcggggacagggcgttgtctttcggcttaattttcccgaatttaattaacccaagtgttgtactcgcttgttgttcgcttctcagtagaccgaccgacttcaattgaacataaatcaaatagacatgacgtaatctccccgtttcgtcatcgatccactgccgttgtgtcttgttgccttgtcttgtgctattcagtgtgctcagcctcagcgcaattgaactgagccgttgtgggcgtggcagcggctcatgttcggttattggtttgacgtgacaggcagactcgagagttggaaactctctgccggcgccaggtgaactgcccccttgagtatcgaccatgtatttgcattcataactgtgaatccgcgaactgatcagtttcttttctttatgcctatctttaagatgcctgcggcctgtccgatgtgacgcacattgaatccctgcaagagaagtcgcagtgcgccctcgaggaatactgccggacccagtatcccaaccagcccacgagattcggcaagctgcttctcagactgccatcgctgcgaacggtctcctcacaagtaagtttattatctagctaattattacacaataaatcgtcaaaaaagattaaatatgaggtacttggaatatcaagaaaaggggaaaatacaaattgtaaagctgaaacagacaacagctggcaatttcaaaatatactggaattagactggagatagaaattttataaaatatttgaaatactcgtattaaatatctttcctaataaaaatctttgttttgccttacgttctttttcttcggttaggtcattgagcaattgttttttgtgcgtctagtcggaaaaacgccaattgaaacgctgatacgcgatatgctgctgagcggcaacagtttctcctggccctatctgccttcgatgtgacacacgatgtggcgccaattgacaacaacttgatcatcggccgcagctgtggcggctgcaacgctcaacatcaattccggcggaggcggcatcggcatcggcggcgggggcagtggcagtggcggtggcggtagtggaggcggtggcggagtcgttggatgtggcagccacaacgttgtcgctgccagtcatgaccagctcgccaatgttgctgtcatgcagcaaacatacggcagcggcggcagcagcagcagcagcatcagcggttgccacaacggtaacaacggcagcggcggcagcatttgcaatcagcagatcaacaactacggcaacaacagcaacaacaatgtcggcaatcatatgagtgcaggcagttttttcggtgggtccaacaacagcatccacagtagtggcaatagcaataccgattatatgaccacgccagccaccgcttatgcgacaccagcgacagcagccacatccacggtgaacaccacaacgatgctgtctaattactgcgatgccgccaccatgatgatggccgctgctgcagtcaatgcaaatcaatgcctgcagcaacatcaccagcgcatgttgctcgcgggcagcagcaacagcagcagcaacaacagcagcagcaacagcaacggcgcagcagcaatgccctcctcatcctcgtctggctcactgtcatctgcctcatcgaccccaacagcaacagcaactgcgactgcaattgcaacagcaacagcaactgcagcagcaacagccgcgcagcaacaacagcaacaatcgccgccaaatttaatcgatatcagcgaagttcctctcattgtggatgtcaagtagtgtaattatttatgcatctagaaatggggctataaaccaaccttgtagataccccgccccgcccccaccactaccacaaaaaccataaaaccccaaaaaaaaaacaattgaaaaatgtaaaaaaaaaaagttggaggatgagcgccgcgta

SEQ ID NO: 40580 - DNA, 1632 bp, DROSOPHILA
atgtgcgcctccccgtccacggctcccggcttcttcaatccgcgcccgcaatccggcgcggagctgtcggccttcgacatcggcctgtcccgctcgatggggctgggcgtcccgccacacagcgcctggcacgaaccgccggcctccctcggcggtcacctgcacgccgcctccgccggaccgggcaccaccaccggcagcgtggcgacgggcggcggcggtaccactccgagcagcgtggccagccagcagtcggcggtgatcaagcaggatctctcttgccccagcctcaatcaggcgggatccggccatcatcctggcatcaaggaggatctgtccagcagcctgcccagcgccaatggtggatccgccggtggccatcactccggttccggatcgggttccggttcgggcgtcaatcccggacacggctccgacatgctgcccctgatcaagggccatggccaggacatgctcaccagcatcaagggacagcccacgggctgtggcagcaccacgcccagctcccaggcgaatagctcccactcgcagagcagcaacagtggatcccagatcgacagcaagcagaacatcgagtgcgtcgtctgcggcgacaagagttccggcaagcactacggacaatttacctgcgaaggttgcaaatctttcttcaagcgctcggtgcgacgtaatctaacttactcttgccgcggcagcagaaactgtcccatagatcaacaccatcgcaatcaatgtcaatattgtcgattgaagaagtgcctcaaaatgggcatgagacgcgaagctgttcaacgtggacgcgtaccacccactcagcccggtctggccggcatgcatgggcagtaccagattgccaacggggatcccatgggcattgccggctttaacgggcactcgtacctcagttcctacatctcgctcctgctgcgggcggaaccgtatccgacttcgcgatatggccagtgcatgcaacccaacaacattatgggcatcgacaacatctgcgaactggccgcccgactgctcttctcggcggtcgagtgggccaagaacatacccttcttcccggagctgcaggtgaccgaccaggtggccctgctccggctcgtctggtcagagctcttcgtcctaaacgccagccagtgctccatgccgctccatgtggcgccactgctggccgccgccggacttcatgcctccccgatggccgccgatcgtgtggtggccttcatggaccacatccgcatcttccaggagcaggtggagaagctgaaggcgctgcatgtcgactccgcggagtactcctgcctcaaggcgatcgtgctcttcaccaccgatgcctgcggcctgtccgatgtgacgcacattgaatccctgcaagagaagtcgcagtgcgccctcgaggaatactgccggacccagtatcccaaccagcccacgagattcggcaagctgcttctcagactgccatcgctgcgaacggtctcctcacaagtcattgagcaattgttttttgtgcgtctagtcggaaaaacgccaattgaaacgctgatacgcgatatgctgctgagcggcaacagtttctcctggccctatctgccttcgatgtga

SEQ ID NO: 40581 - protein, 543 aa, DROSOPHILA
MCASPSTAPGFFNPRPQSGAELSAFDIGLSRSMGLGVPPHSAWHEPPASLGGHLHAASAGPGTTTGSVATGGGGTTPSSVASQQSAVIKQDLSCPSLNQAGSGHHPGIKEDLSSSLPSANGGSAGGHHSGSGSGSGSGVNPGHGSDMLPLIKGHGQDMLTSIKGQPTGCGSTTPSSQANSSHSQSSNSGSQIDSKQNIECVVCGDKSSGKHYGQFTCEGCKSFFKRSVRRNLTYSCRGSRNCPIDQHHRNQCQYCRLKKCLKMGMRREAVQRGRVPPTQPGLAGMHGQYQIANGDPMGIAGFNGHSYLSSYISLLLRAEPYPTSRYGQCMQPNNIMGIDNICELAARLLFSAVEWAKNIPFFPELQVTDQVALLRLVWSELFVLNASQCSMPLHVAPLLAAAGLHASPMAADRVVAFMDHIRIFQEQVEKLKALHVDSAEYSCLKAIVLFTTDACGLSDVTHIESLQEKSQCALEEYCRTQYPNQPTRFGKLLLRLPSLRTVSSQVIEQLFFVRLVGKTPIETLIRDMLLSGNSFSWPYLPSM

SEQ ID NO: 40582 - DNA, 5274 bp, DROSOPHILA
ataaaaattgtatagaagattaaagcctcgaaacgtttaattattcaaagattatgttcacgtggaaatattagttttccctcactcgcatgctgctcccaaacccacggatacactgcacccacaacaaactccacgcccaacattcgcgagggaatcgcgctagctggccgcagataatatctcactaaacagcagaataaactgaaactgaaacgaagcaagcacatatttccgtagtcattaattaaaaactaaactaaaccaaactaaatttaatgcaactcccgcgattgcagtgaagcaaatcaaaaagagagaggaggctcattttcggtatttccgctgggtgcaccagtatcgtatccaccatggtcactaagccaccttggctagctccatatggtagcgaaatggatggaggtggaagtggacgtggacacgaaaacgggaaatgagagagatagaagatagctagaaagaagcacggggaagcacagtatatgtaatatttttatgtttataaaattgttcatatatatattttttttttgtattattgtaataattattatacgaatataaattgtatttttgcaattacggtaactgaagatggaaaacgaataacaattaaattgatgcacacgtcaatgtcaataaaataaaacatatttcaaaatacacatggccgcagttccgtgtttagtttacttgggacatggacagcggattgcggtcgggatgtctagccattatacatcgatttcggaaagtgctgttcaagcgaagaagttgggattgggacgacaaactgctaaaggatggcaatgcatatatggttgctcgagttaaagggtatgctagattcgttagggattacccaacaggcagatcatcattcggcaaattaacgggtatgttttagtcgagtatctaacactcgacgctctacgttttgagtatctacggagtagagagaaagaaagataatgaacacttttgtttggaatgctttccgtttatttgaaatttcatttaattacatttacatcgagtcgaataacctcggaactcggattaatttaaacaccattgaaatgttcactttgagatacatttaggtcttgcacataaggatgagaatattattgatcacataaaacgaaagtcgtacacagttcgttccactcgaaatgcgagaacatacatacatagaacattttgttgactttggcttatcagcagagataaagataaagatcttaaatatcttttgcagctgttgattgattgccacagctacatacccatatgcgctctatcactaattacatttcaacatatttggatttccgccatccattggatccaatactttccggatatgatatacatgcttaaggataagccttgaggaacattcaatgcacttgctgctgttgaacgaacatacacaaagttacatcaaattcacatcatttagaaattcataaccatttacaagcaatacgggcaatttacgggctcataaaacatcgatatgcggttaaatatgcggtttgtaatctgtatatggcgctggggaatatatatatgtatgtggcggcataacattgactaaactttttattttgaaaatatttgtcttgcacacgtatgtatgattgaaagttggaattatttgcacttaaaactacaattgccaagcttgaataaatgggatttgcaatttttttgttttttttttttgcttaagactacatacttcggtatacataaatatacatattatgcttgaatctatctatatacatacatgctctttaggttacaagaataaataataaatgccgcgttcgaaaaataaatattttatggtttccgcttgccggcgagtccttagtaatcgtgtcattcacaacgcccctagcatcctggattctcatctgcagtcccgattgccgcgctgcgccgcttgccctttctctttgatctcggcttcagcggaacggacgcgtttcatccacgtgccaggccgtgggcgttggacaggcgataggcttccagtcggcttagccgccggcctcacgagctcatcaggctgtccaggaaggagtgtttgttgaccaccttcgtggtggcaatcaggaactccacgttgttgtcctcctgggcggcgaggaaacgcagcgcagctatttcagcgaacgtgcatccgcccacaaagcagacgagcaccactcgcggcacattcagtagggatccctcgctgactgtggtgaccgtatgccgtccaccgatgcccaccaactgcgcctgaaagtcctcgaacgtcggtccgggcaggttattgatttggctcttaagcgtctgccaacccagcggtttgagcgaatgctccacaatgcgcgcggtcagcggagcgtagaagctgtgcacgtagctgatgtcctttggctcaatttcaacgttgtcgtccaccgtgaggtgcagcgtctgcaagagaaaatgatgttttgatgtagcaacatcctaaatagcattccctcatatattcactcacaaataactatataacttataactaaatatggttggattactgaattggcgctcacctttcgcagaacgctgtaagcccgcgactctgtttgcagatggagcaggcccgatttctccaggttgctgatggtgagcagcacttccagaccgtacacatggaccagttcgcgcttgtagtggttaagcagcttctccttgaatccggaggcggcgtggcactgcatgcagatgagccgcaggacgcgattcaactccaccctgcaggcaatcaggtcctcgatgtaggcgcttggcttgtcgatatctgcgcagaccatgaactcctgctcggcagccaggtcgtcagcgaagcgcaccgcgttcacctgttcgtgcaggaggccagcgatggccgtatgctcagaggtggccttcttctgggccattagctgcggcaggaggttctcgacgaagctcttgatctcctgcacgctcttgtcctgggaggtggcgtgcatctggacgtgaatttcccgtgccttgcgagcgagcagcttggtgacctcgttgaagtgcttgttccgcagctccgcgtacaactgctcgccggagtgcagtaggatggtctttttctcggtgtcacccagcagcgactgcgattcctcgactcgtgggccactgcctccgcctccgggaagggctccgtcagagggaaagttctcggcgggcagcgtcagtttgttctgccggatgccgtagaactcatcgataagcccctcgtaggtgagttgtgtggccagcgggctgagcagatcgatgcttctgtccagaaggatcaactgatcgacgacacccttgtcgccgttgtacagagtccgctcatcccggcccagctgcttggcgtgctcccataccctgtgcgcaaactctccttttccgtagatcttcggaatgcgaccgtatagacgctgcagctgcactaggcccactgccgcctgatacagcgagctagtgtcaccgtccacactcacatcgcggaaggcattgggcatctccatcgataccaggtcgacatccagcggcagatagttccaggccagttcctcgatgtttccgaagctgcccaacacgccgctgacctccagttggctgacgcacagacatgaccgcctcggggcgaacaggatgtggtactgccgtccagcggccgctcttccgcctgccttcacgtgggcggccagctgctccatcagcgccacgcgtgggcgcatcacgtacaccacattggccacctcgcgcggcaaatgaagctccggcttgagggccagcagacggatgcctcgatcagcgaataactttggccgggtaaccaagtccagcggtccgatcatggtctcgtccagcacaataaccttggaaccctcaatgcggtccagctgctgcagcagctcgcggcaggcggcctcctgcagcaactgcaggttgacccgctgaccatggcccttcaagtgggggaacatgctcctttcctcttgccagaagtgttgattcgtatgctctgcggcttccggtcggtcgctaccgtgtccttggtgggcggtttgtgcagtgcgttggtggtgttggtgcaacgcccacggatttcggctgcagaagatcagggacgcgactgtaatcgctgcaaagcagctgatttggactgcgcctgcgctcagcagtgcggtcttacacttacccttatggcacggtcacactgtccgctgctctatgggccattcacactatcacttgcctgcaatttaaaatcaaaacagttgccagatataaattttgttgattaaacaagaatataaagttaagatagaataaaataatagaggagtagtttcaattatttaatctgtgggtagaaagtatttcttatttattttttatgtacagcttttttcatttaacaaaatttgtattttttcaatgctttgcacgctttaacgcaaataagttacagtagtggccagtccagtgtaaactatgctaaacgcacccctctttttcgccagcaaccagtgtcaccacatcctcacaattaaataccaacaaatgccaatttgcatcaagttgcttgtgctgctcatttcagtttaaattgattccgaaattgctgcaagcgcgtaaaataaaatgagcatctgcgattttaaaacggctaaggattgaaaaaaaaactagaacattacaaggacagatgacaaccctgtcgctgcagtcggcactcaagcaacccggaaaagaacaacaaaatattgagaagagcggcgcactcaaaaagagctcaattgccggttataactgtaaattgagaagcgcggaactataaattgccatctccgtgatgagtaaaccccatgcgctgcgcggtgtgctcgccaatttgatcagcgagtcgcagtaagtggattgagtgcacaggtggccagtcgatctagccgttgctcctgcaccgcctctttcccgccattggcaccatagtttactgtcattttttatcccacagatcgcccctaactccggagagcatcattcgggagtttcgggccactagtgatcggcggctgccagcctgcgatctgatcaaagtcctggtgtccatcagcgagaagcgtcccaacttcgcagaggtgaccaaggagatctcgcacattctgcagaataaggatcccatgtacgcac

SEQ ID NO: 40583 - DNA, 3152 bp, DROSOPHILA
tgtaagaccgcactgctgagcgcaggcgcagtccaaatcagctgctttgcagcgattacagtcgcgtccctgatcttctgcagccgaaatccgtgggcgttgcaccaacaccaccaacgcactgcacaaaccgcccaccaaggacacggtagcgaccgaccggaagccgcagagcatacgaatcaacacttctggcaagaggaaaggagcatgttcccccacttgaagggccatggtcagcgggtcaacctgcagttgctgcaggaggccgcctgccgcgagctgctgcagcagctggaccgcattgagggttccaaggttattgtgctggacgagaccatgatcggaccgctggacttggttacccggccaaagttattcgctgatcgaggcatccgtctgctggccctcaagccggagcttcatttgccgcgcgaggtggccaatgtggtgtacgtgatgcgcccacgcgtggcgctgatggagcagctggccgcccacgtgaaggcaggcggaagagcggccgctggacggcagtaccacatcctgttcgccccgaggcggtcatgtctgtgcgtcagccaactggaggtcagcggcgtgttgggcagcttcggaaacatcgaggaactggcctggaactatctgccgctggatgtcgacctggtatcgatggagatgcccaatgccttccgcgatgtgagtgtggacggtgacactagctcgctgtatcaggcggcagtgggcctagtgcagctgcagcgtctatacggtcgcattccgaagatctacggaaaaggagagtttgcgcacagggtatgggagcacgccaagcagctgggccgggatgagcggactctgtacaacggcgacaagggtgtcgtcgatcagttgatccttctggacagaagcatcgatctgctcagcccgctggccacacaactcacctacgaggggcttatcgatgagttctacggcatccggcagaacaaactgacgctgcccgccgagaactttccctctgacggagcccttcccggaggcggaggcagtggcccacgagtcgaggaatcgcagtcgctgctgggtgacaccgagaaaaagaccatcctactgcactccggcgagcagttgtacgcggagctgcggaacaagcacttcaacgaggtcaccaagctgctcgctcgcaaggcacgggaaattcacgtccagatgcacgccacctcccaggacaagagcgtgcaggagatcaagagcttcgtcgagaacctcctgccgcagctaatggcccagaagaaggccacctctgagcatacggccatcgctggcctcctgcacgaacaggtgaacgcggtgcgcttcgctgacgacctggctgccgagcaggagttcatggtctgcgcagatatcgacaagccaagcgcctacatcgaggacctgattgcctgcagggtggagttgaatcgcgtcctgcggctcatctgcatgcagtgccacgccgcctccggattcaaggagaagctgcttaaccactacaagcgcgaactggtccatgtgtacggtctggaagtgctgctcaccatcagcaacctggagaaatcgggcctgctccatctgcaaacagagtcgcgggcttacagcgttctgcgaaagacgctgcacctcacggtggacgacaacgttgaaattgagccaaaggacatcagctacgtgcacagcttctacgctccgctgaccgcgcgcattgtggagcattcgctcaaaccgctgggttggcagacgcttaagagccaaatcaataacctgcccggaccgacgttcgaggactttcaggcgcagttggtgggcatcggtggacggcatacggtcaccacagtcagcgagggatccctactgaatgtgccgcgagtggtgctcgtctgctttgtgggcggatgcacgttcgctgaaatagctgcgctgcgtttcctcgccgcccaggaggacaacaacgtggagttcctgattgccaccacgaaggtggtcaacaaacactccttcctggacagcctgatgagctcgtgaggccggcggctaagccgactggaagcctatcgcctgtccaacgcccacggcctggcacgtggatgaaacgcgtccgttccgctgaagccgagatcaaagagaaagggcaagcggcgcagcgcggcaatcgggactgcagatgagaatccaggatgctaggggcgttgtgaatgacacgattactaaggactcgccggcaagcggaaaccataaaatatttatttttcgaacgcggcatttattatttattcttgtaacctaaagagcatgtatgtatatagatagattcaagcataatatgtatatttatgtataccgaagtatgtagtcttaagcaaaaaaaaaaaacaaaaaaattgcaaatcccatttattcaagcttggcaattgtagttttaagtgcaaataattccaactttcaatcatacatacgtgtgcaagacaaatattttcaaaataaaaagtttagtcaatgttatgccgccacatacatatatatattccccagcgccatatacagattacaaaccgcatatttaaccgcatatcgatgttttatgagcccgtaaattgcccgtattgcttgtaaatggttatgaatttctaaatgatgtgaatttgatgtaactttgtgtatgttcgttcaacagcagcaagtgcattgaatgttcctcaaggcttatccttaagcatgtatatcatatccggaaagtattggatccaatggatggcggaaatccaaatatgttgaaatgtaattagtgatagagcgcatatgggtatgtagctgtggcaatcaatcaacagctgcaaaagatatttaagatctttatctttatctctgctgataagccaaagtcaacaaaatgttctatgtatgtatgttctcgcatttcgagtggaacgaactgtgtacgactttcgttttatgtgatcaataatattctcatccttatgtgcaagacctaaatgtatctcaaagtgaacatttcaatggtgtttaaattaatccgagttccgaggttattcgactcgatgtaaatgtaattaaatgaaatttcaaataaacggaaagcattccaaacaaaa

SEQ ID NO: 40584 - protein, 617 aa, DROSOPHILA
MFPHLKGHGQRVNLQLLQEAACRELLQQLDRIEGSKVIVLDETMIGPLDLVTRPKLFADRGIRLLALKPELHLPREVANVVYVMRPRVALMEQLAAHVKAGGRAAAGRQYHILFAPRRSCLCVSQLEVSGVLGSFGNIEELAWNYLPLDVDLVSMEMPNAFRDVSVDGDTSSLYQAAVGLVQLQRLYGRIPKIYGKGEFAHRVWEHAKQLGRDERTLYNGDKGVVDQLILLDRSIDLLSPLATQLTYEGLIDEFYGIRQNKLTLPAENFPSDGALPGGGGSGPRVEESQSLLGDTEKKTILLHSGEQLYAELRNKHFNEVTKLLARKAREIHVQMHATSQDKSVQEIKSFVENLLPQLMAQKKATSEHTAIAGLLHEQVNAVRFADDLAAEQEFMVCADIDKPSAYIEDLIACRVELNRVLRLICMQCHAASGFKEKLLNHYKRELVHVYGLEVLLTISNLEKSGLLHLQTESRAYSVLRKTLHLTVDDNVEIEPKDISYVHSFYAPLTARIVEHSLKPLGWQTLKSQINNLPGPTFEDFQAQLVGIGGRHTVTTVSEGSLLNVPRVVLVCFVGGCTFAEIAALRFLAAQEDNNVEFLIATTKVVNKHSFLDSLMSS

SEQ ID NO: 40585 - DNA, 3948 bp, DROSOPHILA
taaggttaatttgtcatccttcctttaaagcgattattaatgaaggttgtgtttcttaaccaggtggtgccgcccagaagaccaaccaggtgcgcaatggcgacgaaatccttagcatcaatggtgcctccacgtcgcggatgacacgtgtggatgcctggaactatatgaagcaactgccgctgggaccggtcaagatttgtttcgcctagatgaaatggtctaaatgaaataccaacgatggggaagaatgcgccacaattttcatagatttaagccaattagcttggttaccccttaaccggtctaaccttgggggtcttgccaattcgatggatcaatgctgcgagcgatttgttttgcatttaaacgaacctttaattgtatgcctaatttgatagatatttaatttaaagtgcaattgtttaaacccttacaacgttttcatgccctgcttacctacctataactgatcgatgattgtacatattactaatcgagactaatttacgtatttaaacctttaatcaaattgaagccagctatcgggcagccctatttccttatacacaacttattattcaaaaaaacataacgaaaaaaaaaacaattatattttatgccataaattatacgggaacgttatacatgtatattattttaataattattattttatttaaagaacaacaaaaacaatgtttacgtatacaaaagtatttgctaaaaataaacatacaacatatatgaaattaacctgaatgtaatttttttaaattgtctggattgttttaatttccttcacaaaaaaattttagttttcacaaaaaagtctagttttaaatttagaaaaatttatttatttagtttcaacttcacatttttctgtttatacattatgggaacatttctaaaaacaacttaaaatgttatttgtcctatgtactgtacataaatttgatatcagtgtattaaagctgttcaatgagcagttcgcaagctacaaatctttggatgccttggacaccagctttggcagctgcagcataagtcccatgtgctgtagtggattcgccgaggagagactcgaggtagtggatagcgttccattgacattctccctgggatgcggctgcgctgggtgggttgatgaggctgactgctcggaatggaatatctcgccaagcaggtcgtacacacgtcgcttgaagtacagcttctggtggaagttcatgtgcttgatttcgggacgcagtccctgcaggaatgcgtcatcgaaatccatgattggcaatgcttcaatacagcgggttgatgtctgaaataagaaaataacaaatcataaataaacgctgtacaaattaaattttgcacttaatagattgttactttggggaattcaagcaatggcactctatataaagtaatttctcccaccttggcctccttctcactgctgtcgctctctgtgcgcatttctgccgggaccgtgtcctcgaaatccatgattgatgatggttcattattaaattgtgttgcctgaagaattaaaggaaactgcatcattaaaattataaatgcaaatttcagctttgaaataaaaacgggcacacagtataaaactaagctaatttgcacagctttaacttttgaccaaaaatatagcatacatcatttttttactttaaagtatagttcataacgctaaacaaggttgtaataatttaaggcctcagcaaaatgcatctgagtattgctcccacctcaacgtccgtcgccgatgcagggtcggtgctgtgacggctctgcgcatgctccgaattcagaaagctcggggagtgcaccatctcgaggattgcctctacgggagtttcgggatccccttcgtcgtgctcctcctgtcccttgggtcttgacctacgacctctgagcggaacgggcactccgggagtgatgtgcttttgcaggaacttcagctcgctgttaagatagtacgtattcgcaccgtgatgcaactttattgagcgggcatagctggagcgaatgttgcgccaacgttccttgcagcttttaactgaaatgatcaatagcagtcaataagattgtaagataatattatataatatttatataatataaattgtaagattttataagagattatattttattttatattatgtatcgacatagtaaaatcgtgcttataaaaatataaacatctcctaatgaaatgtaaatttaataattaaagtaaatttagttaatatgcaatatgtcgaaatatagataaaaacccacccgaatttcgcatctcattggatatttccttccacgcatttttcacagtcgatttccgcaagtagttgtcatcgtgacgatcgtaaagacaaggatgtagtttcaccaaatgacatattttggcattgatggcgtaaacgttcggtggtggagctatggaccgacggcgtgtattcatttcatatataaaaactaaatatgcaaatttaattaattaatataattaatagagttaaagtagaagacccgaaatcgaatctgaaacatgtgtcgcctgaccgtgcaacagctgtttgccgctactttgcttctctgctccgctttcaacaacagttattttctctgaaaccagatctttcgtttaaacttacgtgaattaggtttaaaaatgctccaattaatcgatgtcagtgcttttatcacgagttttggcttattaagttcgggctcaagccgctcgttgcttccgtgcacgcggcagttgttggcgtggacgccggagttgctgctattacaagtgtttagcaactttgaacactgcgatttcgtgctgctgccaacaagtgatgcagttgtaaatgaatgttgcaatttcaaatagcaattgttcttgattttaaagcacatgagcactagactgattcgaattggacatttgaatctttaacgggcggagaatataaaacaccggcaaaataaataaagaaaggagccacaacaaacggaaagccagaggcgtagtcattctcttcgcaaatcagcgggggttaccattcgagcagcatacaaccctctctgagagagaattgacatgccactggatctcacacatacaatgaaaggcacactcactcaaagtagacagcactgccagacttaatgcaatagtatagcagttggtgttggcagtgccatttgatcgctggaggtgctgccaacgcatttaccaattaattaatgaccacccctaaatgttgtaaattataaaaattattcaagaatattacgattttggttaaattaatgtacaaaataaaatatttcatatttgtattggctgtcaaatgaagttattttattttaagataaatgctaacaaatcttagagaaactggaaaacaaggttgagcggttttgagaattatgaacaacgcgtaaaaaacattatttataaacgtaaaaaaatattatagtctagcccgacaggtaaaaaataaatttatccggggccaccttggtcaaccctcgtcaacgaccgttcggcctgccaactcgcttttccctgcaacgcaaggcgccgctctctgctcacactctcacttggctgtgtgtgtgtgctcaatactcgcttttagttttcgctgcagtcggtcgccgtttttagtctcagctgctgcgcgcgtgtgttgtgattgtgtgaattgcgtttgcgtttgtagcataacacaaaaccgataaattcctggcgaagcgagctctctcgattggattcttgcaaagtgaactagcgatgagcgccgcctctgaggtgaacctgatgttgctgcggtcagtggagaagcagactgcgctttatgatcgtaccgacgaaaactataggaagcgcctgccgagtgagaacgcctgggacatggttgcctccgaagt

SEQ ID NO: 40586 - DNA, 1199 bp, DROSOPHILA
ttcgaatcagtctagtgctcatgtgctttaaaatcaagaacaattgctatttgaaattgcaacattcatttacaactgcatcacttgttggcagcagcacgaaatcgcagtgttcaaagttgctaaacacttgtaatagcagcaactccggcgtccacgccaacaactgccgcgtgcacggaagcaacgagcggcttgagcccgaacttaataagccaaaactcgtgataaaagcactgacatcgattaattggagcatttttaaacctaattcactttttatatatgaaatgaatacacgccgtcggtccatagctccaccaccgaacgtttacgccatcaatgccaaaatatgtcatttggtgaaactacatccttgtctttacgatcgtcacgatgacaactacttgcggaaatcgactgtgaaaaatgcgtggaaggaaatatccaatgagatgcgaaattcggttaaaagctgcaaggaacgttggcgcaacattcgctccagctatgcccgctcaataaagttgcatcacggtgcgaatacgtactatcttaacagcgagctgaagttcctgcaaaagcacatcactcccggagtgcccgttccgctcagaggtcgtaggtcaagacccaagggacaggaggagcacgacgaaggggatcccgaaactcccgtagaggcaatcctcgagatggtgcactccccgagctttctgaattcggagcatgcgcagagccgtcacagcaccgaccctgcatcggcgacggacgttgaggcaacacaatttaataatgaaccatcatcaatcatggatttcgaggacacggtcccggcagaaatgcgcacagagagcgacagcagtgagaaggaggccaagacatcaacccgctgtattgaagcattgccaatcatggatttcgatgacgcattcctgcagggactgcgtcccgaaatcaagcacatgaacttccaccagaagctgtacttcaagcgacgtgtgtacgacctgcttggcgagatattccattccgagcagtcagcctcatcaacccacccagcgcagccgcatcccagggagaatgtcaatggaacgctatccactacctcgagtctctcctcggcgaatccactacagcacatgggacttatgctgcagctgccaaagctggtgtccaaggcatccaaagatttgtag

SEQ ID NO: 40587 - protein, 302 aa, DROSOPHILA
MNTRRRSIAPPPNVYAINAKICHLVKLHPCLYDRHDDNYLRKSTVKNAWKEISNEMRNSVKSCKERWRNIRSSYARSIKLHHGANTYYLNSELKFLQKHITPGVPVPLRGRRSRPKGQEEHDEGDPETPVEAILEMVHSPSFLNSEHAQSRHSTDPASATDVEATQFNNEPSSIMDFEDTVPAEMRTESDSSEKEAKTSTRCIEALPIMDFDDAFLQGLRPEIKHMNFHQKLYFKRRVYDLLGEIFHSEQSASSTHPAQPHPRENVNGTLSTTSSLSSANPLQHMGLMLQLPKLVSKASKDL

SEQ ID NO: 40588 - DNA, 6082 bp, DROSOPHILA
gctgcagcagctcgcggcaggcggcctcctgcagcaactgcaggttgacccgctgaccatggcccttcaagtgggggaacatgctcctttcctcttgccagaagtgttgattcgtatgctctgcggcttccggtcggtcgctaccgtgtccttggtgggcggtttgtgcagtgcgttggtggtgttggtgcaacgcccacggatttcggctgcagaagatcagggacgcgactgtaatcgctgcaaagcagctgatttggactgcgcctgcgctcagcagtgcggtcttacacttacccttatggcacggtcacactgtccgctgctctatgggccattcacactatcacttgcctgcaatttaaaatcaaaacagttgccagatataaattttgttgattaaacaagaatataaagttaagatagaataaaataatagaggagtagtttcaattatttaatctgtgggtagaaagtatttcttatttattttttatgtacagcttttttcatttaacaaaatttgtattttttcaatgctttgcacgctttaacgcaaataagttacagtagtggccagtccagtgtaaactatgctaaacgcacccctctttttcgccagcaaccagtgtcaccacatcctcacaattaaataccaacaaatgccaatttgcatcaagttgcttgtgctgctcatttcagtttaaattgattccgaaattgctgcaagcgcgtaaaataaaatgagcatctgcgattttaaaacggctaaggattgaaaaaaaaactagaacattacaaggacagatgacaaccctgtcgctgcagtcggcactcaagcaacccggaaaagaacaacaaaatattgagaagagcggcgcactcaaaaagagctcaattgccggttataactgtaaattgagaagcgcggaactataaattgccatctccgtgatgagtaaaccccatgcgctgcgcggtgtgctcgccaatttgatcagcgagtcgcagtaagtggattgagtgcacaggtggccagtcgatctagccgttgctcctgcaccgcctctttcccgccattggcaccatagtttactgtcattttttatcccacagatcgcccctaactccggagagcatcattcgggagtttcgggccactagtgatcggcggctgccagcctgcgatctgatcaaagtcctggtgtccatcagcgagaagcgtcccaacttcgcagaggtgaccaaggagatctcgcacattctgcagaataaggatcccatgtacgcactgctggtgttcgtcgagcgatacagcgaatgcaaaccagtctccgagagcagcagttccactagcctttcagcgatgggcttgccgcacggaaacaagacttcggatgttaattccgcagccggttcagtccccaccacattggcaatcgcaagcacctcgacaatcttaaccacatcgcaaaacgtatctggttccaccaggcttagcttgacccagtcccaggactttcccacctcgacgccggtgaattgcaaaaaggccactgaatccgacactacacccgtagtctttgtcaggcgcggcccaatggaccgtaaccgtggagcgggcaaggatgagcgcaacgacttaagtgtggtgagtgcagactaagtatggtgtgctgttcgctgccaattacttggccccttcaaataatcaatgatcaacccacacagatcaaggaacgtgtgcttaatgccgtttccgatcaatccttgagcggctaccgctcggtgaccaacaaaacgggcaacagcccaaagtcaatgccgaatgacctggtgacgctaactgatgtgcccgatgagtaccgcacccatttactgtgggaatactacaaggtggacggggacaaggtgccgagggcagagatcgcggcaatgccgcttctcagccaggagagtatgctgctcgacgagctgctgcactgcctcacgggcataagagaaagcctcctggtgcctcagaagccaattatttctgccgttggcctggccaaatacgacacggactttgacatacacacgcacctcgatcgctcgctgacacaccaggtgcgggaaatcttgccattggcctcctacttcatgggcgtgcagaagataatcgcggctaccgacggcctgggtcaggtgatgaactcattgaatgaggcactgcaggaacttacacacgacttctatgtaaggatgtgcaatcgtgtcgtggcaaaatttttccctaactaatctttttttccaccgagcctagctgataatcgtacaagccgaacaggagctgcgccacaatagattaacattgcagaaactactgtactacctgcagccgacgatgtgggtgatgcatgaggtctggtcctcgttggtgatcattcagctaagcgattcacgggatgccgaagtgttgacgtatttacacgagcggatcaagcggctggaaggcaacaaagatgcacaacagctgattatcggactggtgcgcaaggcggccaagccgtacatgcgaatgctgcagatgtggatccagaagggcgtgatcgtggaccgccaccgggaatttctcgtagtggacaacgaagtgatccatcgcgacgagctgcccgagcactattccgacgattattgggagagacggtataccttgcgcgacgaacaaataccatcgtttctggcaaagtattcggataagatcctgcgcaccggcaagtatctcaatgtgatcagacagtgtggcaagcgcgtaatgcccacgcaagagatgaacctagagttcgacccgaccagcgagcggcacgtgtccgtcatcaacgacgcttactactttgccgcccgcatgctgctggatgtgctgctaacggagaacgacctgatgggtcacctacagtcggtgaagcgttacttgctgctcaaccaaggcgacttcaccatgcagttcatggacgcctgcgaggacgagctgacgaagaacgtggaccacgtgttgcccatgacgctagagaacctgctgggactaacgcttcgcatttcctcggcgcgtaatgatccctacaaagacgatctgcactgcgagctgctgccctacgacctggtcacgcaaatgtccaagatcatgaagaaggaggagaactggcaggcacagcctcgcctcgatcttagcggcctcgagtgcttcgctttcacctacgaggtgaagtggccctgctctttggtgctgaatcacatttccatctccaagtaccaaatgctctttcgacagctcttctactgcaagcacgtggagcgccaactgtgcaagtgggttcccgatccttaaccttttatgcccacgatcatttaagttcttctctcgcaaacaggatttggaaggaaaactcgattgccaggcagttcgagccgcaggcggctagtctctatcgagcggcgttcactctgcgccagcgtatgatgaatgccatccagaacctggagtactacatgatgatcgagatcatcgagcccaactggcacattttcattgaaaagatgaagacggtggagaacgtggataacgttctgcgtctccaccaggacttcctcgactcgtgccttaagaactgcatgctgaccgagtcgtcgcatctgaatcgttcgatcttcaagctctgcaagatctgcctgaagtactgcgagttcatccaggtgagttccagttacagtgcgagggtaccgggtggctaaattgctaaatttttgcgtacaacccttcttcctttgctctgtgcttcgtgctccgtgctccgtgctcttaatgctctatgtctatcccgcttgccaacgcttccaactctatgtggaatccttgctaatccccaccttcgcagatcacgcagcgttactttcaggacgctgagctcaggtcgatggtacgtgatagcgcggacagctccgaatccgaacaggagagcctgcactgcccacaggtattgcgtaggcttgtgctcaaccacgttgttccttgcggttcctgtgttctcgctcccactttcgttatcggtggacccatttccgttttgtgtccagctggattgcataatggcgtggccccgattttgatagcattgtttcttttatttcgaatttggattgcatgctttaagttatttttgattggcttgcctatgcattaggccatttgctttcttttgtttttaaaaccttaaatgcatcttctggtatcattaaattactaatgcagaaataatctacaataagtagattattattaagttttccctgattattattccttcttaatgaatctacttacaaaacgtagtattgtttggaaaaaatgttttgaaattcagttaaaacaatttgtgtaagaccaacttaagcggttaatctatatattttatatacttatttttatattttatatacttatacttttgtgtatacggatgccacaaaattagcctgagttcgggaagaatttgtatatacataagaattccccccaaattcagtgtatttgtgacatcctcacatgtatgttccagtgattaacttgtgatttctttgtcccctgctagattgagaccccgttggatccgacagatacgttttcggagcgggttaggcgctttgatctggaatttacccaactgctgatatcgttcctcaagcagatcaacagcatggcgaagaagaacaccgccgattgcttcatgaatctggtgcaccgcatcaacttcaatgccttctacaccgatcaaatggacaagatgtgtgtagaggatgccattggctaagccagcacgtctagaggaaaggatgtggatgtggatgtggatgtggacgtggaaacggaaacggaaaagacaagaacaaagtattagataaatgaatttcataatcacaagcgcacatttaccatcattccccacgcatgtcttctcatttgccatccaacaaagcgcaccaattgttacccgtttagttatacaaattcgaatatgtatgaaccaataaaccaattaaaatgtccttcgctgctgccgtttgcgttcacacaactgcaatttacggcactggacacgattttcgattgcaacgtaagccagtggcgtagattgcagattgtgccgccaaccaagatattgtacttcgtcgtcaaccaggtcatccgcgataagcttggccactctgtttagaaatgcacaaatatcctaggtagctctcaccactggtttatacatcgaatcagaatgatagctgagatcttggtttccaggatgttcatcatcgtttgctcctgctacggggtttgcggttttcccccatcctgaagcctttcatatacgaagcttatgtcgttggtatttggccagttcttaatttaagctagccacttggatttttggagtggaagcaaatgcaagcaagaaaccatccagaattttaaccaaatttgatgttagtaaactcgtgatgggcatcaatgtggtagctacgctgtaaagtaggcaacaaatatattgttccctgcgaagagagcattattttactaaagatcagtatgagaacgaagaactattgttaagtatgataaagagtgcaagaacatctataaatattatgtgcatgtatatatgtgtattcaatggtttaatatacatatgtatgtatattgcgaatttagtatgccctgatttagtttcaagttcgcactgcgattaagcatgaactcgaaatctgagctctaaaatattattgactgcttttaagtataaagtatatgctatatataatctggcataaataacaagttgtgctgcattcgctttaatcgcatttttctcagcgcccatttcccttagtcgcaatatggcgagtggaattttcctggtttttcatcgttgtccgatggtttctccgctttggagccaccgactgtccaggagcacacatggcataaatatacatatatgtatatatatgtacatacatatgtacgagccgatacacacccacaaaagccaatttc

SEQ ID NO: 40589 - DNA, 2977 bp, DROSOPHILA
gcgagtcgcagtaagtggattgagtgcacaggtggccagtcgatctagccgttgctcctgcaccgcctctttcccgccattggcaccatagtttactgtcattttttatcccacagatcgcccctaactccggagagcatcattcgggagtttcgggccactagtgatcggcggctgccagcctgcgatctgatcaaagtcctggtgtccatcagcgagaagcgtcccaacttcgcagaggtgaccaaggagatctcgcacattctgcagaataaggatcccatgtacgcactgctggtgttcgtcgagcgatacagcgaatgcaaaccagtctccgagagcagcagttccactagcctttcagcgatgggcttgccgcacggaaacaagacttcggatgttaattccgcagccggttcagtccccaccacattggcaatcgcaagcacctcgacaatcttaaccacatcgcaaaacgtatctggttccaccaggcttagcttgacccagtcccaggactttcccacctcgacgccggtgaattgcaaaaaggccactgaatccgacactacacccgtagtctttgtcaggcgcggcccaatggaccgtaaccgtggagcgggcaaggatgagcgcaacgacttaagtgtgatcaaggaacgtgtgcttaatgccgtttccgatcaatccttgagcggctaccgctcggtgaccaacaaaacgggcaacagcccaaagtcaatgccgaatgacctggtgacgctaactgatgtgcccgatgagtaccgcacccatttactgtgggaatactacaaggtggacggggacaaggtgccgagggcagagatcgcggcaatgccgcttctcagccaggagagtatgctgctcgacgagctgctgcactgcctcacgggcataagagaaagcctcctggtgcctcagaagccaattatttctgccgttggcctggccaaatacgacacggactttgacatacacacgcacctcgatcgctcgctgacacaccaggtgcgggaaatcttgccattggcctcctacttcatgggcgtgcagaagataatcgcggctaccgacggcctgggtcaggtgatgaactcattgaatgaggcactgcaggaacttacacacgacttctatctgataatcgtacaagccgaacaggagctgcgccacaatagattaacattgcagaaactactgtactacctgcagccgacgatgtgggtgatgcatgaggtctggtcctcgttggtgatcattcagctaagcgattcacgggatgccgaagtgttgacgtatttacacgagcggatcaagcggctggaaggcaacaaagatgcacaacagctgattatcggactggtgcgcaaggcggccaagccgtacatgcgaatgctgcagatgtggatccagaagggcgtgatcgtggaccgccaccgggaatttctcgtagtggacaacgaagtgatccatcgcgacgagctgcccgagcactattccgacgattattgggagagacggtataccttgcgcgacgaacaaataccatcgtttctggcaaagtattcggataagatcctgcgcaccggcaagtatctcaatgtgatcagacagtgtggcaagcgcgtaatgcccacgcaagagatgaacctagagttcgacccgaccagcgagcggcacgtgtccgtcatcaacgacgcttactactttgccgcccgcatgctgctggatgtgctgctaacggagaacgacctgatgggtcacctacagtcggtgaagcgttacttgctgctcaaccaaggcgacttcaccatgcagttcatggacgcctgcgaggacgagctgacgaagaacgtggaccacgtgttgcccatgacgctagagaacctgctgggactaacgcttcgcatttcctcggcgcgtaatgatccctacaaagacgatctgcactgcgagctgctgccctacgacctggtcacgcaaatgtccaagatcatgaagaaggaggagaactggcaggcacagcctcgcctcgatcttagcggcctcgagtgcttcgctttcacctacgaggtgaagtggccctgctctttggtgctgaatcacatttccatctccaagtaccaaatgctctttcgacagctcttctactgcaagcacgtggagcgccaactgtgcaagatttggaaggaaaactcgattgccaggcagttcgagccgcaggcggctagtctctatcgagcggcgttcactctgcgccagcgtatgatgaatgccatccagaacctggagtactacatgatgatcgagatcatcgagcccaactggcacattttcattgaaaagatgaagacggtggagaacgtggataacgttctgcgtctccaccaggacttcctcgactcgtgccttaagaactgcatgctgaccgagtcgtcgcatctgaatcgttcgatcttcaagctctgcaagatctgcctgaagtactgcgagttcatccagattgagaccccgttggatccgacagatacgttttcggagcgggttaggcgctttgatctggaatttacccaactgctgatatcgttcctcaagcagatcaacagcatggcgaagaagaacaccgccgattgcttcatgaatctggtgcaccgcatcaacttcaatgccttctacaccgatcaaatggacaagatgtgtgtagaggatgccattggctaagccagcacgtctagaggaaaggatgtggatgtggatgtggatgtggacgtggaaacggaaacggaaaagacaagaacaaagtattagataaatgaatttcataatcacaagcgcacatttaccatcattccccacgcatgtcttctcatttgccatccaacaaagcgcaccaattgttacccgtttagttatacaaattcgaatatgtatgaaccaataaaccaattaaaatgtc

SEQ ID NO: 40590 - protein, 819 aa, DROSOPHILA
MYALLVFVERYSECKPVSESSSSTSLSAMGLPHGNKTSDVNSAAGSVPTTLAIASTSTILTTSQNVSGSTRLSLTQSQDFPTSTPVNCKKATESDTTPVVFVRRGPMDRNRGAGKDERNDLSVIKERVLNAVSDQSLSGYRSVTNKTGNSPKSMPNDLVTLTDVPDEYRTHLLWEYYKVDGDKVPRAEIAAMPLLSQESMLLDELLHCLTGIRESLLVPQKPIISAVGLAKYDTDFDIHTHLDRSLTHQVREILPLASYFMGVQKIIAATDGLGQVMNSLNEALQELTHDFYLIIVQAEQELRHNRLTLQKLLYYLQPTMWVMHEVWSSLVIIQLSDSRDAEVLTYLHERIKRLEGNKDAQQLIIGLVRKAAKPYMRMLQMWIQKGVIVDRHREFLVVDNEVIHRDELPEHYSDDYWERRYTLRDEQIPSFLAKYSDKILRTGKYLNVIRQCGKRVMPTQEMNLEFDPTSERHVSVINDAYYFAARMLLDVLLTENDLMGHLQSVKRYLLLNQGDFTMQFMDACEDELTKNVDHVLPMTLENLLGLTLRISSARNDPYKDDLHCELLPYDLVTQMSKIMKKEENWQAQPRLDLSGLECFAFTYEVKWPCSLVLNHISISKYQMLFRQLFYCKHVERQLCKIWKENSIARQFEPQAASLYRAAFTLRQRMMNAIQNLEYYMMIEIIEPNWHIFIEKMKTVENVDNVLRLHQDFLDSCLKNCMLTESSHLNRSIFKLCKICLKYCEFIQIETPLDPTDTFSERVRRFDLEFTQLLISFLKQINSMAKKNTADCFMNLVHRINFNAFYTDQMDKMCVEDAIG

SEQ ID NO: 40591 - DNA, 2864 bp, DROSOPHILA
ggggtcaatcaagaacaggttggaaaaactttcctctgcatcgactcgtatgcaaatgattatgacggaaccccacataaacaaacgggatcagtctggttagtcgaatgagttttccacttcgcaggcaattaattttcgcactcgcttgcaagtggaaaattaattgcgtgttttgcataatcagtaaattggtcgtttattttagtacttaatttgcccaggatcgcaccacaagcagcacctcgttcttccagcgaatcagaggaatcccactccactcctctccaactagtaatataaattatgactctggacaccaacacatgcagcgatctggcgttggttttgcgctcgagcattggcaaattaaacagattcttatttgcaaatcagataagagatcatgccagggaacagcgaccagatacgaattctcagtcgcccagatagacagataccgatatggggattcggctagagctgccttaatatttatcggtcgcgtgagcgtgttacctaattgatgacaacaggtaggcgcttctgtcaagcccagtattatgatggcatcgaaggatcgcatcccggctagcttatgataaccagacacgcaaagcgacaactgggcagcacggagcggagcagcaggtgggatctcctcgactactgtttgaatccgaatttttgaaaatggtatatattacatagatctggccaatgtttatctttaaatatatgtattaaattgaattacattaatgtacaaaaaggaaagtatttttgttaagtgtacatgagcacatatgtgttatttgtaggagatatttgggaaaggtcacaccgattcagcccacattacatttcaagatcaccggaatttaaatgtttacattgccaaataaatgataaggctgttctgcatggagatgtataaaatggatgggttgcagtggaatgcaattcatttccaacagttgaatcgtgatcgtattttgaaatggtagtactacagcttttctgcatgttgttgatccttcgccaaggactagctgacgtggtaacctcgaccaccgaatcacccactaggataaatggaggacagcgcgtgaacgagacggtgcccttccaggtgtccttgcaaatgcagcgacgtggacgctggcagcacttttgtggaggatccattgtgagcggtcagcacgtccttacggcggcccactgtatggagaagatgaaggtcgaggacgttagcgtggtcgtggggacgcttaactggaaggccggtggactacgtcaccggttggtgaccaagcacgtccatccccagtactcgatgaatcctcgcattatcaatgacattgccctggtcaaggttactccgccgttccgcctggagcgatccgatatcagtacaattctaatcggtggctcggatcgcattggcgagaaggttccggtacgcctcaccggctggggatccaccagtccatccacttcctcggcgactctgcccgatcagctgcaggctttgaactatcgcaccatctcgaacgaggattgcaatcaaaagggatttcgggtgactcggaacgagatctgcgcactggctgtccagggtcaaggggcatgtgtggtgagtaaacaaaaagtaatatcacgctaagcggaattaatcatgctttcccaaacttagggcgactctggtggacccttgattaggcccggtaagcagccgcacttggtgggaattgtctcctacggatcatccacctgtgcccagggcagacccgacgtctacacgcgggtgtccagttttctgccctacatcagtcaggtgatcaaccaagacttggcccaataaataccgacctgtagcgcataaataaaccgagtctctgcccgaacttgactaaattcctcgaagtcttgcgttcttggtcacatccccccactttctacgctttggcgactaattaaaaatcttgttcaatattcgccacagccagagggagggtggaggagttcggcagtccgggtgtggcgtccacagagtcgccttgccatcttcgtggtctaggcttggcccgactccagcgaaaacttgggctgccgcctgccagggcgaccatgataaatgcaaaaagcaatttatcgcgcatttaactcaattcagtttctttatggcagcgggatgtggatgcgagcttgaggatgtggagacgtggggatgtggagccggagcgcttggtcgacggagcctgccacaaagtttcgctgacacgcacactgttctgcgaactctggactcctctccaaagaccgggccttgtaattcgatattagattttatgcgcgacaaaaacgaagtgcaaacatttttatgttcccgccgtttctatgctgcaattggtataccaatttgacggggcgccgactttgactttaactttaacttcggtctgggctccactgcgtctgtgtaattaggttcaaataatgtggagctcagcctcttcgcgccacactagtcagcaagatattgtagttcgcacagccctcatggaaggatgatcctgcagaggacccaagtttgccagcagagtgcccgtctcctagctcgtttcacgctctcaatttactggatcaaagctcgccacgctcggcgagcctaacatggaaaatctggccccaaattaactcccatatggtagacggctagcaacgggtcaaatgctcagaagactaaacctaaacaccaaaactccaaccacctacctatccatctcaacgcatctcattcggagggaatctgagtctcgctgggcaccgcgctcagcatataaattcatttagatcaatca

SEQ ID NO: 40592 - DNA, 804 bp, DROSOPHILA
atggtagtactacagcttttctgcatgttgttgatccttcgccaaggactagctgacgtggtaacctcgaccaccgaatcacccactaggataaatggaggacagcgcgtgaacgagacggtgcccttccaggtgtccttgcaaatgcagcgacgtggacgctggcagcacttttgtggaggatccattgtgagcggtcagcacgtccttacggcggcccactgtatggagaagatgaaggtcgaggacgttagcgtggtcgtggggacgcttaactggaaggccggtggactacgtcaccggttggtgaccaagcacgtccatccccagtactcgatgaatcctcgcattatcaatgacattgccctggtcaaggttactccgccgttccgcctggagcgatccgatatcagtacaattctaatcggtggctcggatcgcattggcgagaaggttccggtacgcctcaccggctggggatccaccagtccatccacttcctcggcgactctgcccgatcagctgcaggctttgaactatcgcaccatctcgaacgaggattgcaatcaaaagggatttcgggtgactcggaacgagatctgcgcactggctgtccagggtcaaggggcatgtgtgggcgactctggtggacccttgattaggcccggtaagcagccgcacttggtgggaattgtctcctacggatcatccacctgtgcccagggcagacccgacgtctacacgcgggtgtccagttttctgccctacatcagtcaggtgatcaaccaagacttggcccaataa

SEQ ID NO: 40593 - protein, 267 aa, DROSOPHILA
MVVLQLFCMLLILRQGLADVVTSTTESPTRINGGQRVNETVPFQVSLQMQRRGRWQHFCGGSIVSGQHVLTAAHCMEKMKVEDVSVVVGTLNWKAGGLRHRLVTKHVHPQYSMNPRIINDIALVKVTPPFRLERSDISTILIGGSDRIGEKVPVRLTGWGSTSPSTSSATLPDQLQALNYRTISNEDCNQKGFRVTRNEICALAVQGQGACVGDSGGPLIRPGKQPHLVGIVSYGSSTCAQGRPDVYTRVSSFLPYISQVINQDLAQ

SEQ ID NO: 40594 - DNA, 4220 bp, DROSOPHILA
ccgttgacgggcataaatttcgatccatcctgggacaccccttttcagctgatttgtttagtaaacaagcggattaggcaccacggaaattcgagagcgccccaagttgggaagccatcgaagtgttgccctgatttcggtaaggtgagatactcaaattgggaagtgcccgaaatggtttcattgacaactgtcaccgctccggacgcaagcattcagactgacgtttctatatttggaatcatttcggtaacttgaaatttcccacagtttaccaacagttttcggagagaccacaattaaaatttaattttaaagcacacactaatttagttttttttttcccctgactaaagcgtagtctaattttccaatttgagcaggagtgcaacccctcagttttagtttctggcgtgtccctgtctcgatccttgttccttttttccgatcctgtcgcaggtggctcgttttaatgttttcagtttccgaggggaaagagggcttgcgtgccttttccgcgacacagagatttcttcgggcttggtgtaccaattttatagtttccggatcaaaagatcacatcctgcgggaagtatgacaggatgcttagttgactttggtgggaaagtttcatggcgtttcgtaatattccccaaaacatattcctgtttctttgtggttagctaatgatctgttttgtcatgtaaaaaacataagtaagaattgtctcttggggtgcggtgtgctgagggaatttccaaaataagaactaattaagacaacacgaaggataagttcagtcttgtgattttgtgtaaaaagtattgaaaaacttgagcagcttttcttgtttaagtaatttgttatttcaaaatgatacctaatttctgtcaagtacacactgaaatttgttgaaataattattaccaaattgataccaatttatacaatagtacttaccttccgaaattcccggttcatttgatactggcctattaccatgcatcgatggttctttgccaacgagcgggaggagtgtgagcgaaaaccggaggaagacggtcctagtagcgcttcggagacacaagagccaccacctccaccaccagttccgactactgagtggcccttctgtgtagtctttcacagttcactaaacggtaatgagtatgttgccattagtggcaactgtccctctcttggaaactgggatcccaaggaggtgtacattttggccaagaatgactgcattagctgcctatgcaattgccgtcagtttgaggcaagcttagagataccgcgtaacatcgacatccactatcggtactgcgtcgtgatccacgatcccgagacggatgaggtgtatatacgcttctgggagtcccaattatatcccagagtgattcgaacttgtcagaacatgctgaagaactgcgacgtctttggaaaaccacacgacgatgatgaagcgaaccaggtggatcgcggctgggccaccacagagacaattgtgcacctgaagatcttcaatgctccattctgttggcaacgtcagaaaccgaggctcctgtatgtccatgtgcagcccatgtttgaggtgccggagaatccttgtaacgaaccagccaatcccatcaaaatggtttcgtcgcaaacacgtttatcgcgttatctgagcacccgggaaattaaggcagggaaccagtatcttcaattggcacaagtcgaggtgaccaatctatgtgtccaaaatgctttggccgcgcagcaacgatttggagccagatgtgggccgaaggatatggagctatttcattgttccatcgcttttccggaggaaacgctctaccgactggatttgtacacatacgcgcataaagcaggctatgatgaaccaccgtatcattacgggtacggattcctgatgccagatcagctgctgggcaccgaaggctctgcccgggtgaagatcacttgcgcctccacccaccgtccactaatggagatgtgtgtacgctatctaataattcgacctttgccaaatttccgttgcgatttgagccacagctacgagcgttactggcgcaaaaatcgcctatgcatgaacatcgggcacaaaggatcgggaaatacgtaccggttaggatccgatgtggtaagggagaataccttgtatggtttcaagcaggctgttttggccaatgcagacatggtggagatggatgtccagctcacgcaggatgcccaggtggtggtgtatcacgattttgtactgcgatttatgttgcagagaatgcctagttttgaggatcttctggagaatcaggatctgctgatatttgcctacgaaaatcttaacaaactaatgctcctcgctatgggaggatcaaaacgaaaagacctcattgccgttcccctggaggcattttcctacgatcaactgaaggaggtgaaggtcctgcgattcgctggcagcaaaggctgcgataagtcctgtgatcgaatgctgctggagcagcgcccctttcccctgctcctcgacctcctggatgaggaaaatctacccgtcgacatgggcttcctaatcgagatcaagtggccgcagatgaccaatatgcggcgttgggagagcggcagctttaagcccacgttcgatcgaaacttctatgtggacaccatattggagattgttttaaataaggctggaaagaggcgcatagtcttttgcagcttcgatgccgacatctgtgccatggttcggtttaagcagaatgtatatcccgtgactttactactggaggatccgcactcgccggttcagtatgcagaccaaagggtaagcgtgcaggatgttgccgtgaggttttgcaacagtctggagttccttgggctgacccttcatgctaactcactgctgaacaagccctcgactatggcatacctgcaccagatcaatctggacgcttttgtttatggtagttccaccattgacctggagatccgcaataagctaaagaagcacggagtgctgggaataatctacgatcgtctcgaccaactggaccaagtgggcgaagagctggagggggacaccatgtgcaccattgattcagtgaccacaaggcgcgtgatccaggagacggaggtggaggagtggatccagaagtgtggctacaagccggaaacttccatcgtcgtacataacatttacatcgactgatggttttccccacgttctgtttttgccccggtgccaaataaagtatagaaagttatgtgccccgtgataacagtccaaatacccgtcctgtaatcaccagccaacgtccaagttgaaccataaagacaaaggagcattacatgactaagccgacaatatcccaccagaccaaagccaaagtaacgacaattgtcaatagaaggaccaaacggactggagggctaaccccttcgcacaccccccgcgaattggcaaacatttttcgcaaacactcgcgctgcggatgataagcttatgtgaactattgccgggtagataaacaaaggacctccggatgcggaagctgctggcaggagaaggggttaagacggtgcggtccaaagtcccgttgggcggtcaaacgacatggcatcgtaaatgatatcccgtggcgaatgggtcttctttataggccagtgcacactttagcaacactctgtcgggtcttgggcgcaaccccttctttcgtcctgccgtggtattgatacccttttgcatgtgactcacaccgtcgcgaagacgttctctcagtgggatgtgggtttggttgttgtgcaacttcccccatcccattgtgctatttatcataatttttcaatttaacactgccatacacgagggacacacagctcatatccttcttcctggcatatagtttccaatgtttacttgcgcaaacatcctttgacgaactttgcccattgtccagacttcgctttgatgatgtggcttagccgtacctttgcatttttgcattctcatcgattccatctttcgccatagctgtccgtgtgtgtttgtcctgcccaggaaggacatcgcttccgatcctgcagccatcgtccgttaaggatgacgttattaatgagcattttgacacttacgtcttgacatttgcacagctggccgtttgtctaaggactttcggcgattgcagcgagtggtaaaggtcaactatctg

SEQ ID NO: 40595 - DNA, 2220 bp, DROSOPHILA
atgcatcgatggttctttgccaacgagcgggaggagtgtgagcgaaaaccggaggaagacggtcctagtagcgcttcggagacacaagagccaccacctccaccaccagttccgactactgagtggcccttctgtgtagtctttcacagttcactaaacggtaatgagtatgttgccattagtggcaactgtccctctcttggaaactgggatcccaaggaggtgtacattttggccaagaatgactgcattagctgcctatgcaattgccgtcagtttgaggcaagcttagagataccgcgtaacatcgacatccactatcggtactgcgtcgtgatccacgatcccgagacggatgaggtgtatatacgcttctgggagtcccaattatatcccagagtgattcgaacttgtcagaacatgctgaagaactgcgacgtctttggaaaaccacacgacgatgatgaagcgaaccaggtggatcgcggctgggccaccacagagacaattgtgcacctgaagatcttcaatgctccattctgttggcaacgtcagaaaccgaggctcctgtatgtccatgtgcagcccatgtttgaggtgccggagaatccttgtaacgaaccagccaatcccatcaaaatggtttcgtcgcaaacacgtttatcgcgttatctgagcacccgggaaattaaggcagggaaccagtatcttcaattggcacaagtcgaggtgaccaatctatgtgtccaaaatgctttggccgcgcagcaacgatttggagccagatgtgggccgaaggatatggagctatttcattgttccatcgcttttccggaggaaacgctctaccgactggatttgtacacatacgcgcataaagcaggctatgatgaaccaccgtatcattacgggtacggattcctgatgccagatcagctgctgggcaccgaaggctctgcccgggtgaagatcacttgcgcctccacccaccgtccactaatggagatgtgtgtacgctatctaataattcgacctttgccaaatttccgttgcgatttgagccacagctacgagcgttactggcgcaaaaatcgcctatgcatgaacatcgggcacaaaggatcgggaaatacgtaccggttaggatccgatgtggtaagggagaataccttgtatggtttcaagcaggctgttttggccaatgcagacatggtggagatggatgtccagctcacgcaggatgcccaggtggtggtgtatcacgattttgtactgcgatttatgttgcagagaatgcctagttttgaggatcttctggagaatcaggatctgctgatatttgcctacgaaaatcttaacaaactaatgctcctcgctatgggaggatcaaaacgaaaagacctcattgccgttcccctggaggcattttcctacgatcaactgaaggaggtgaaggtcctgcgattcgctggcagcaaaggctgcgataagtcctgtgatcgaatgctgctggagcagcgcccctttcccctgctcctcgacctcctggatgaggaaaatctacccgtcgacatgggcttcctaatcgagatcaagtggccgcagatgaccaatatgcggcgttgggagagcggcagctttaagcccacgttcgatcgaaacttctatgtggacaccatattggagattgttttaaataaggctggaaagaggcgcatagtcttttgcagcttcgatgccgacatctgtgccatggttcggtttaagcagaatgtatatcccgtgactttactactggaggatccgcactcgccggttcagtatgcagaccaaagggtaagcgtgcaggatgttgccgtgaggttttgcaacagtctggagttccttgggctgacccttcatgctaactcactgctgaacaagccctcgactatggcatacctgcaccagatcaatctggacgcttttgtttatggtagttccaccattgacctggagatccgcaataagctaaagaagcacggagtgctgggaataatctacgatcgtctcgaccaactggaccaagtgggcgaagagctggagggggacaccatgtgcaccattgattcagtgaccacaaggcgcgtgatccaggagacggaggtggaggagtggatccagaagtgtggctacaagccggaaacttccatcgtcgtacataacatttacatcgactga

SEQ ID NO: 40596 - protein, 739 aa, DROSOPHILA
MHRWFFANEREECERKPEEDGPSSASETQEPPPPPPVPTTEWPFCVVFHSSLNGNEYVAISGNCPSLGNWDPKEVYILAKNDCISCLCNCRQFEASLEIPRNIDIHYRYCVVIHDPETDEVYIRFWESQLYPRVIRTCQNMLKNCDVFGKPHDDDEANQVDRGWATTETIVHLKIFNAPFCWQRQKPRLLYVHVQPMFEVPENPCNEPANPIKMVSSQTRLSRYLSTREIKAGNQYLQLAQVEVTNLCVQNALAAQQRFGARCGPKDMELFHCSIAFPEETLYRLDLYTYAHKAGYDEPPYHYGYGFLMPDQLLGTEGSARVKITCASTHRPLMEMCVRYLIIRPLPNFRCDLSHSYERYWRKNRLCMNIGHKGSGNTYRLGSDVVRENTLYGFKQAVLANADMVEMDVQLTQDAQVVVYHDFVLRFMLQRMPSFEDLLENQDLLIFAYENLNKLMLLAMGGSKRKDLIAVPLEAFSYDQLKEVKVLRFAGSKGCDKSCDRMLLEQRPFPLLLDLLDEENLPVDMGFLIEIKWPQMTNMRRWESGSFKPTFDRNFYVDTILEIVLNKAGKRRIVFCSFDADICAMVRFKQNVYPVTLLLEDPHSPVQYADQRVSVQDVAVRFCNSLEFLGLTLHANSLLNKPSTMAYLHQINLDAFVYGSSTIDLEIRNKLKKHGVLGIIYDRLDQLDQVGEELEGDTMCTIDSVTTRRVIQETEVEEWIQKCGYKPETSIVVHNIYID

SEQ ID NO: 40597 - DNA, 3155 bp, DROSOPHILA
gcattaaagtttagttattaaaataagcttgttgaacaattgttagtattaactttgaaattcatttgccgagaatgcttattgacttttgatttattgttctaggaattgggaactccgaacgagaagatctggccaggatacaccgagctcccagccgtgaagaacatgttgtcgcagaactctcagtttaccgagtatcccgtctcgcaactgcgcaagcacttccaggagaagacctctgaaatgggcttgtcgctgctgcagggtctgctgacgtacgatccgaaacaaagactgagcgccgacgcggcactaaagcacggcttcttcaaggagctgccattgcccatcgatccatccatgtttcccacctggccggccaagagcgagttgggagcccgcaaggcgcaagcctcttcccccaaaccgccatccggtggctcgcagttcaagcaactaggccgcgacgagcccatcatcgtgggaccgggaaacaagctctcatctgggattatcactggcaacaagaagagccacggagctggtggatcgtcggctagcacgggatttgtcctgaacgctggaataacgcagcgccagttggccatgggaccgggattcagtctgaagttctgattctgtgtgttttagcccattacgattacgattaattgttatgtatagttagcgatgtaagtggaaaatttcgtttaattgtatgtgtataaatattgttccatatataatttaaaaagccatacaaagcaattgggatgtataatcatttttcacctcaagagcggcaatgccatgtgggtgggtcaattcaaggaatatgaaagttggctataaacatatcgaaaattactccatcgttttattgtgcaaacaacttttcaaggaccaaaactcaacccaccctcaacactccgaatgcgtccacacctgtaactttaaaacttagcctaggggaatactaacgctctacctgaaatgcctaagtggaccacagatagaagtaagtgctttgccacgtgggaatgtaatctttaaggggtttggcaaccaccttagcaatgggcacacttgtggccacaaagtcgaggatccgctccagtctggatttggtgaagctgtcatagaacggcgatcggaccaggaagtacatgatgtttatgcatcgcctgctcagctccagtttttgttgcttggacattaggtcgcgatgctggcggtagaggtgaatgctatacaaatcaatggataatgctaccatatattgcttccaacttctccggccgaacagccccatggcgaccaggtggattagtggcttcgatatatacaggtattctgcttgcaggagtttcctcggaatttgcgtcttcgccgcttcattgttgtctatatgaagcttgaagtcgcggtattgcaggggaggagcaccctccactttacgaatcacacggccagatcgcttcaattggaaggtaatggagtgctgggactgcaataaatcgttcgtggaggaggccacaccatcccccgaattcttcctctgtttggcccttcgattcagtgcggcgatgggcggtgaggtgattatatccgaggttgagtgtttcaagataaagaaacggcccgctgccttgaaggcctgtattagcgctatcaccagccacttgccggattgaccgaaaagccgacgggctgatatctcgatgaaaacctcgctatattcgagcgtcgtcaacgtgacctttagacggtagcaaagtttcgattgcaggtggatcaccgaattctcctcggaattgcgtgccttttcgatgatccggtcgttgtagaacaccagcatgtttgacagtgtatataccagctcactgaccacatttgatgaggaaatgcgacctggaagccggccaatgagatgagtctgtaggctctatgtaagcaaggagttcactttacctgctataaagtaggatacccacttggctgtggtctcaaaatcccccaccacgtcggggtttttgcccacccacgcctcgtacgccttcagcatgcccttcagagtgtccattatatccggaaaatattgtctgttcctccaaataataaaaataatgaggtgtttcggtctacaggtaatcaaatcggtgcagttgtggtgttctggcgttttgaacaaggcgttagtgctttcatgcaacacaaaatagaaggtgacgcaaaatgaatacatatatgaatgcaagcacggagagcgttgattaaacgctttggattaataaaattggtacaaaaataaataccaaataccagtgtcacgagcttatcgccattacactttcaaattttaccacattggtgcttacacgtcatagaaaaagaaactaataattaaggacccacaatttgtaagaaccacatttggcatatctgccaccaacctttcatagccccttttaatgttcttcaatgtaaagatttgcttgtttagtctcggcatcttaattcaagtttcctgattctttatactgcagtatatttttattgggtatattatgcatttaaaattttagcccaggtactatgttctttataatagaaacatttcttaccaaatttttcggtaaaaacatttttccaagttcaaatctttattacgttacaaattaccttaacgttatacataataaccctagaaacgctaatgcattagtaatttcgagagcagcaaagtctttggtcacacttttgtttttgtgcactttgtaatcgaattgctcgtgaattcggattcactccgttttcgtgtgtattagctaggcaagattgaattaagagtcgatatacagatgtccagcaacaacacggacactggggacaccaccgtcatggcgacggctacctcggtgcagaacgatgtcgaggccggcgtagatgagcaattgcctcgagaatcgctggtaatatttgttcaaccccttcaagtttgcctaatctataatccgactattcgccgcagataaccactgcagtcagttttctacaaaacaccaaggtgcgccacacgacacttatccagaagcagcagttcctacggtccaaaggtctcaccgctcacgaaattcagctggcctgtgaac

SEQ ID NO: 40598 - DNA, 1095 bp, DROSOPHILA
attacctgtagaccgaaacacctcattatttttattatttggaggaacagacaatattttccggatataatggacactctgaagggcatgctgaaggcgtacgaggcgtgggtgggcaaaaaccccgacgtggtgggggattttgagaccacagccaagtgggtatcctactttatagcaggtcgcatttcctcatcaaatgtggtcagtgagctggtatatacactgtcaaacatgctggtgttctacaacgaccggatcatcgaaaaggcacgcaattccgaggagaattcggtgatccacctgcaatcgaaactttgctaccgtctaaaggtcacgttgacgacgctcgaatatagcgaggttttcatcgagatatcagcccgtcggcttttcggtcaatccggcaagtggctggtgatagcgctaatacaggccttcaaggcagcgggccgtttctttatcttgaaacactcaacctcggatataatcacctcaccgcccatcgccgcactgaatcgaagggccaaacagaggaagaattcgggggatggtgtggcctcctccacgaacgatttattgcagtcccagcactccattaccttccaattgaagcgatctggccgtgtgattcgtaaagtggagggtgctcctcccctgcaataccgcgacttcaagcttcatatagacaacaatgaagcggcgaagacgcaaattccgaggaaactcctgcaagcagaatacctgtatatatcgaagccactaatccacctggtcgccatggggctgttcggccggagaagttggaagcaatatatggtagcattatccattgatttgtatagcattcacctctaccgccagcatcgcgacctaatgtccaagcaacaaaaactggagctgagcaggcgatgcataaacatcatgtacttcctggtccgatcgccgttctatgacagcttcaccaaatccagactggagcggatcctcgactttgtggccacaagtgtgcccattgctaaggtggttgccaaaccccttaaagattacattcccacgtggcaaagcacttacttctatctgtggtccacttag

SEQ ID NO: 40599 - protein, 341 aa, DROSOPHILA
MDTLKGMLKAYEAWVGKNPDVVGDFETTAKWVSYFIAGRISSSNVVSELVYTLSNMLVFYNDRIIEKARNSEENSVIHLQSKLCYRLKVTLTTLEYSEVFIEISARRLFGQSGKWLVIALIQAFKAAGRFFILKHSTSDIITSPPIAALNRRAKQRKNSGDGVASSTNDLLQSQHSITFQLKRSGRVIRKVEGAPPLQYRDFKLHIDNNEAAKTQIPRKLLQAEYLYISKPLIHLVAMGLFGRRSWKQYMVALSIDLYSIHLYRQHRDLMSKQQKLELSRRCINIMYFLVRSPFYDSFTKSRLERILDFVATSVPIAKVVAKPLKDYIPTWQSTYFYLWST

SEQ ID NO: 40600 - DNA, 4654 bp, DROSOPHILA
acctaaagaatggaacgaattgtcaaaaaacgattttacttttgtcaaataatacccccgttttaattaagaaacatcaacatcattttacttttgtcaacaaataattcacaagtgtttaacaagtattaactataatatatctcacaagaatcggaggactcccgaaagcctgaatatgtatacacttcatatttttatttttgtaaaccaaaaactgcgaaccctataaatatattttgcattccttttcgttttggaaactgcaatttaaaatgcgatttgtgtttttattttggttgtttcctttattgagttttaacaattgcatgatgactttgcattacaattcgcttaactattaataacaattgccttcatttcatagcatttgtattgtgtatttctctcttggtttgaataagttttacttgcgttctgtttagaattaaattattgtaaccgtttgcactcaactttccactagtcctggcttcacgttcacacgttttgcctcgaatttgacaaaaaattgctttctattcttttttaagagtatcggctgcacgctgcacagcacaaggagctcacttaactcaactgaactcaactcaaggggctaaacaaattagagaattaataatcaataaattaaataagattatcattttgcatacgaattatataaacaataataactcaaggtgttggctggatggcgacaaaaatactttactatcgcaagtaaaattggcaatttaacgaattttaacgcttgcaagtttggcctaagcaaattaaataatatacctaggtattcgaacataaaaatactttaggtagtgttagctatatagaaattttgttgttgttttcggggcgagcggtgctgctggcacaatttgtaaaaaggtaggaaacgtaggaaactttcggcaaagtttagtgagtgctgttgttgctgttgctgctgctgctgctacattttttttttttttttggtttggggcgagtgtttaattgctgttgttcatactgcatcatcctccttctctgcgcaatattcctggcgtaattctctgctctgttctcatcggttgttgttatggttggcgatacttgctacagcttatgcggatggtccgtgatccgtcgtctacagcttggcacagatctcgttcgtgaactcggagcacttggcacggccgcccagatcgccggtgaggtatttgccctccttgatggtctcgaaggcggcacgctcgattttatcggcgtacgtgttgagctccatgtggcgcagcatcatgaccgccgacagcaacagggcagtgggattggccaggtccttgccggcaatatcgggggcggttccgtgcacagactcgaacagggcaccgttcaggcccatgttgccggagggcgtcaggccgaggccgcccaccaaaccggcgcacatgtcagacagaatatcaccgtacagattgggcatgacctggcattatggagacggcattagcttagtcgctgatactatactttagcgactgcgtaattcaactcaccagcacgtcgtattttccggggttctggaccatgttcaggcacaccgtatccagatacttctcttcgaactggatttctgggaacttctgggccatgtcgcggacgcagcgcaggaagagaccatcggacatgcgcctgtgagaaatggtaggaaaatagcattagtttcacaacaacaaaaaagagtagctctcgtggccaacttacataatgttcgccttgtgcaccacggtgaccttcttgcggttgttgttcttggcgtactggaaggcgtactcggccacacgcttggaggcttcctcggtgatcagcttgatgctctgaacgacgccgtcgacgatctcgtgctcgatgccggagtactcgccctcggtgttctcacggatggtgaccacgtccacatcgtcgtacagcgtcttgtagccctcgagactgcggcagggacgcacgttggcgtacagattgaactccttgcgcagggccagattcagagaccgatggcccttgccgacgggcgtcatcagaggacccttcaggccgatcttgttcgtgttcaccgagtcaatggcggcctgtgggatgccgaactttccgtcgggtccctgttaacatgtcacgcacaaatgaaataagaagtaaataaataaagctagctcgcaaattgttttatatatgtgtcgtcttctccgacatatgtatgcattttttttttggcttttaacagagcaaattaatatttggcgaaaatattgcatggattcgtatccattgatttggcatttatatcgaatatatggcaatggaatgttaactagagcctggttgtatttcaaatttaccgcccagacgaccgtagttgccacctgttgtcaaacggccacgcgcttcgaaggcgatggcgctcaacttggatttgaaatgtcaagttgaaccactaactctggctgggattacgacacttacccggacgggggtcacgtccacggcctcccactcgatggggacattggcggcggtgaagattttctgcacggccgcagagatctcaggtccgatgccatcgccagggatgagggtgactttcttggtgccggaggagtaggaccggctggcggcgggagtcgcgttgacctggaaaatagcaagaccataggcgggttacagagtgatctacagaaatggtggcgagaaaacgcatagatgggcagcagcaacagcagcagcatctagcgggattacataagtgcccatgccaaacaaaaatcccgtccgccctaccccccgtgccaaacagttcgtcgcgttgaggttagagtgcacaaatgattcccacggcgctgataaggccgcaaatcagggcccaatctcggtaactgattttttcccgcctctcgagtagggggtgggattttcgagggtccgaaccacccgccctgcccgccgttatcgatatctcggccacgcaacgagggagcgagagagagagtgttatgtaaagtgaatgcgaattctaatgctgtgctcttttcgttttcgccggacggacagctgatgtcctggcgaaggaggtggtggcccccactgcggatcccggatggttccgtcgctgccgccgctgttatggaaccaacctggctcactgctggcgtcgcagtcaccgccggagcatcacgcgctgcaatcaaacccagttgattgagctgcaagtgttttgcgtaatgtgttgttgtcgttgggaatcgcggaatcgcagatcattgcatcggtggtttgcagggttggttagcgggcgtggagttggagggcaggagcgtcggacgagaaacaaaatcgcaatgttagtggtagttggccagtactttttggccagcacgtaatcaactgctgtcctgcagaattggtttggtcgctgtatggtggggttaagaggcgcgacgcggggcgggtcaagtcgcttaagcctaaacgggtcttacaattttctgtatgaatctagcagccattgcgttggatcggtttttgcactgattcctgccgtatattatatagaaaaaagtctgtctttttagtctgcgcccgccgtagtcgccaccttgcggaaaactggcgaatctgcggtatatcggtcgataggcatgcgggggcagcgtcgttgccacctggactgcgctcagatgggggtggaattacaaatcacccatatccccgtatttgtatgctctcgcttgcatcagtcacataattgctgtacgagcatcatatgtatggcgtaaaaccacattaaagttggctgtgaataaacagatgtcgaatatcgatgtcgtctgcccgaaattcagtacagcctgccgtgtggcatccctgtacagggcaaaagcgaaatatcggagcggcctaatcgatagtttgtgtatcccttgcaaccgtggctgctacagccacagtttaaattaatttgagcattcgctcagttttctgacgtatattctagaaaaagtgctgagagtgtccatcaaaaaggggcaagcgaagccgtttctcgatctccaacgaaaacggggataggataatccaaggggccgcctgtcgagaagccaggcgagggcaaaaaatcggatcaaccgacagacaaagctgaactgcggtcgtcggcgacaaagtgcgctgtgcccacggacgaccagagagaatcggtacgcgagtgagtttttttttccgcgtttcagtttggatttcagttacctgcgcgcaacaactccactgaccagccgttcgcagcgttccgtatctggagtttctggccaagagtactcctttccaagtagccccagctccgcgtccggcaggccgtactgcgtaagcgggcgaaaacggtacgtgcagtgagatccgtgtggcagcgtcttcggttgtgtgcttgtggggcaccagagtaccaggtaggcgtcctccgagtccctccgtgtccctccgtccagccagattcggattcctgcattcaaatccaaatgcattgccgtttccaaactcagctggcttggccctcacccatacacctatacacgcgtcgctagcacacgcaatacac

SEQ ID NO: 40601 - DNA, 1375 bp, DROSOPHILA
cgactacggcgggcgcagactaaaaagacagacttttttctatataatatacggcaggaatcagtgcaaaaaccgatccaacgcaatggctgctagattcatacagaaaattctcaatcaactgggtttgattgcagcgcgtgatgctccggcggtgactgcgacgccagcagtgagccaggtcaacgcgactcccgccgccagccggtcctactcctccggcaccaagaaagtcaccctcatccctggcgatggcatcggacctgagatctctgcggccgtgcagaaaatcttcaccgccgccaatgtccccatcgagtgggaggccgtggacgtgacccccgtccggggacccgacggaaagttcggcatcccacaggccgccattgactcggtgaacacgaacaagatcggcctgaagggtcctctgatgacgcccgtcggcaagggccatcggtctctgaatctggccctgcgcaaggagttcaatctgtacgccaacgtgcgtccctgccgcagtctcgagggctacaagacgctgtacgacgatgtggacgtggtcaccatccgtgagaacaccgagggcgagtactccggcatcgagcacgagatcgtcgacggcgtcgttcagagcatcaagctgatcaccgaggaagcctccaagcgtgtggccgagtacgccttccagtacgccaagaacaacaaccgcaagaaggtcaccgtggtgcacaaggcgaacattatgcgcatgtccgatggtctcttcctgcgctgcgtccgcgacatggcccagaagttcccagaaatccagttcgaagagaagtatctggatacggtgtgcctgaacatggtccagaaccccggaaaatacgacgtgctggtcatgcccaatctgtacggtgatattctgtctgacatgtgcgccggtttggtgggcggcctcggcctgacgccctccggcaacatgggcctgaacggtgccctgttcgagtctgtgcacggaaccgcccccgatattgccggcaaggacctggccaatcccactgccctgttgctgtcggcggtcatgatgctgcgccacatggagctcaacacgtacgccgataaaatcgagcgtgccgccttcgagaccatcaaggagggcaaatacctcaccggcgatctgggcggccgtgccaagtgctccgagttcacgaacgagatctgtgccaagctgtagacgacggatcacggaccatccgcataagctgtagcaagtatcgccaaccataacaacaaccgatgagaacagagcagagaattacgccaggaatattgcgcagagaaggaggatgatgcagtatgaacaacagcaattaaacactcgccccaaacc

SEQ ID NO: 40602 - protein, 377 aa, DROSOPHILA
MAARFIQKILNQLGLIAARDAPAVTATPAVSQVNATPAASRSYSSGTKKVTLIPGDGIGPEISAAVQKIFTAANVPIEWEAVDVTPVRGPDGKFGIPQAAIDSVNTNKIGLKGPLMTPVGKGHRSLNLALRKEFNLYANVRPCRSLEGYKTLYDDVDVVTIRENTEGEYSGIEHEIVDGVVQSIKLITEEASKRVAEYAFQYAKNNNRKKVTVVHKANIMRMSDGLFLRCVRDMAQKFPEIQFEEKYLDTVCLNMVQNPGKYDVLVMPNLYGDILSDMCAGLVGGLGLTPSGNMGLNGALFESVHGTAPDIAGKDLANPTALLLSAVMMLRHMELNTYADKIERAAFETIKEGKYLTGDLGGRAKCSEFTNEICAKL

SEQ ID NO: 40603 - DNA, 11926 bp, DROSOPHILA
cggcgcacaaaataatataatacacacttactccaccccaacgtacatatatgtgtgcatgtgcatatgtacatcccccacacatatgtatgtacatatgcacatccactctctgatattttattctcgcctgtaattgcttaattctagagtggctctgcgtagaggacatccactttacatatctcctaaaaatcagaaaatatattaaaatgtatctgaagtgtatctgtatgtattcccttatttttcataaataagcgctttatatctataacaaatttttgcacctatcaaagatgtgtagtacacattgagtacctacctataagtatacttttttcgaatagctgtcccttttccattattctctaataaaaaacaattagatactctactgttctaataattctctttttgtactaatatcacatttaaagaaaataaaaaagtattaccaactaactaaaagggtcaataagtatttaaaactacatgttaaataagtataaatatatgaagtcatcttacatgacaaaaacggcagagaatttaattagcagctattcttatctagcaatcagattaagttaaattttttataaatttccgatataaagatcacattcataaaataacatttaatctgacgtgatattagcttgtaaaatataattaagaaaccacttggtctcatatacctttatacacacattaggttaagttcagaggaattttggatccaaaacaaatagaatgaagttaaaaaaaatatgtaaaatatggataattttaccttacatgtaaagtagaaatatgtagcatacttacgagggcatacattcgaactaaggtgtctactttcagggttaagccatacagaaaacggttgaaattgaaatacttaacaacacttaacaactcaatgacatttcgcatacgccacgttgtcaaaaactctccctgaaaaagttgttaataaaaacctcgcttcagaacatttcagggacaattgtcttttattaactcaagagaaataaaattaatattgcaaatatgatgttaaaaaatataccagactaaaacttaaattgcattaaatatataataatgctataaaaaatatataaattaatagctaattgcatgagattattggttacttcgattgttattctttttcgttttcatttgcctttttttggttgacttaactatgatttgtggctaatatctaagtggaatttgattgtaggaaatctcaaaaggtattcgatttgataacaaaattttaaatgaacattcttagcctagtttctgaatcgattttatgctgttggcattttgctaacaattaaactagtatttcataacaaatttcgagtagtggaccattaaaattcgacgaaaatgtaagtatcaatcgatttagaccgtatgtacaactaatgattcgatagattttagatagatgagtgttctttgagaactgctcttggtatacaggctataaattctttggagctatgagattaatgtaacaacagaatctttggtcgtgcgacatacagcgtgtcgcgcctactccatcttcaccactgtttcccggtcaacgccgaacttatgcatcgcatagttggtcacatgctgctcatgttgacccaagagggcggcagtctgctgctgcagctgttgctgctgctgctgatgtctctggaaggcggccagttcgtagtgctcgtccagcgaggccgatcggctgagcattatctctccatgttgctgctgctgatgctgctgctgctgttgttgctgttgcgactgatccatctcttccatcttgatgagagcgggctgctcatcctcctccggagtcaggtagtagggtggggaaggtctcgtgggcttgcacagcgtcattccggcctggtgatacggattctgcagactaataatgttgctgtgactcagggacgataatgtgctcgatgccgtggtcggtgttgaggtgaccataagtcccgccgacgctgtggagcagttggcctgggaggtgagcgacaaggcctccgtcttgatcgccgccgctgccgccgccgctgctgctgctgctgccgccgtaatggagttcggcagcagttgggccagcaactggtggtcgctggtggagccgctgttgctgctgctgctcagttgctgagcttgcagatatttctgtataagtttgttgttattctcattgctactactattgttgttgttgttgttgttgaagatcgagctgttgttgttgttgttattgttattgtggagctggtgagttggcgatggggtgttgaagatggatgtgggtgtgctgggtgagtgctgcatgctgcacgattgctgctgctgatgctgctgcatgttgagcggcgacatttggtagtttgagttgggcgacatgtccagcccggaacagagctgctgctgttgctgctgatgtggatgagtctgatgctgatgtgacatggctgatggcgacaatgaggtggaacccatgctatggggcgagctggccgccgatgagtgctgatcagccattagcagctgctgctgctgctggtactgtggaagctgttgctgcggctgcgatgagtatgagttgtatggtttcagatcgagctgtggtttcatatctgaccaggtgagcggggaacaaaaagaaagcaaacatcactagttaggcatgcacatggaatgaaaagtcgcaggaactcaccgtcattgacatccatctggctgctgtccaggacgacaccaacgttatggcaattggtcaccaatgaaccactttccatgatggcattcaaagcgttctttgactttgacttggacttctcgctcttcgttcctttcggcttgcgcttgcgtttctgtaatggtaagattatatagttatagtgtgcaatattccacatttaatgttagcgagctgtattcttaatcattctccatataattaacaaattattttatatgtgctgtatacattggcttaaacttttatatttaattattgaaccaaatattttctgattattgttatgttaaaaataagttccttttcaagctaataaatacgaatgaactttcagctgcaatctttttttttaaaggatgacttacctgaatggtgtcctttttcatggtcagtggccgtgggacactgtggagcttatagtacaggccgcatgcattgcagacgggctctccggcgggattgcggcgccacaacgaagtgtgggtggtgtggcagttggagcaggaaagtccggctcgctttgaggcgctctagatgttgcaacaagaaatcaacgaattagttaagactagaagcgctcgggatgcagtagcttttcgtgtggaacaacgttttctatggcaactcagtggccaaggaggtttacgggtgtacggatctacagatctacgggtgtacgggttagtcaaaagtggttagaatcgattctgggctaggggttagtgactacttgctctctgttagtcggttttgctattcaaaagggtttcggttggttggtagggttttggtatgggtttggtttggttggttttgtttgatttggtttggtttttggtttcggtatcggtatcggtaattaatgggcgacctaccaagcgtctcgaattggcgcgactaacgtgctcgtcgagcgtcgtcgctgcagttgctgccgttcccgacgccaccgccgaagtcgccgccgaggttgcattcgagcctggacaggagtaggagctggcggcaccactcgtgttagccttactacggccaccgccgcccacattaaatgagttgggtttatagaaatccccgcctgattcagcggccactggaattgagcaatcagaatgttgttggttgtagtacacaagaagcagatgcagatgcagatgcagattgatcagattttctttgtttttgatgtcacttttcgattaaactagttggcattgcgtaataaataataaattcaattaattttttcactctcttggagcattggagcttttcagggggggggggctgggtgaaggtggggcggtggtgctgatgctggcggatgcggatttctataagttacgagtacccactacccactaaacactgagagaggatgttgcacacagaaattttgttccacacaaaagcgtttgttttgattgattggtattggttagtagtaattgctggtggtagttttgtgattttgtgaatttgttttagacatttaccaatcttctaggctgtttaattaggggtcgattcatgccgttcattttcatgtacaagccgcaggcattgcacaaatagtgtcccgtgttatcgcgtcgccataatggggttgaaatcgcaccacaattgacacattctcgcccctcagtgaaataatcggcatcgaataatgcttcaaagattgacatagaaatatcggaataagtcataaggttttgctaggtgtttgtttgatttgagttgatttggtttggttttgcaatgtttgctgttgctgtttttgcatttgcgtattgtgtgtgtattttaatatttagatttgcttttgaggtgtctttttgttggtttgaatttatctcaagagttgaaataaaattaattgaatttattatagagacgtaaggcttaaccactaagtatatgtataaataataaaaatgcactagaaatgagaaagagtgtatgggcattacaacagctgcttacagttggccaccagtggctgatccagttgggtcttggtttgctcaggttatgcaaatatgggtttccttctcgcctggtgtgcgtgtgaaattctacctaaaaccctctctctttcgtttgcccagacaaatgggacaaacaagcatcggaaaggattttggtttgtgtgtacgttcggtgagtgtcttatgtactagtctatactcattcttggttttccgtttcaaatagtaacttacttgctgacaacgatgccgaggcggagagaaaggttccaggatctacgcgtccagtggttccatccgcggcggctgcagctgctgcattagcagccgaaatggcccgcccattccgtatcacattcgagaccactccggctccaacaccgacgcccaactgcgcctgcccggaagaggaggtggcgtagcttaacggatcgaaccaggtatcgttctgcaagtgagtgaagtgtatgctggttaggggggagctcagagcaatcatggcagtgggggcagcactcacctgaccgcgataattggttatcggagcgtaacgttccacggagccactgttggggtatgcgatccgctggaaggctggcagagtaccaccgcccccgccgccactgtggctgctccttggcgatccgtagccgtcctccaaggagctgttgtgtccattgaccgccgccgttgccgcagccaccgctgccgccgtggccgccgaggagctcgagtggtgcagacccgctggccccggactgctgctgctggagttgtggtgctggtgttgattgtggtgatgttgctgctgctgctgctgcagttgctgctgctggtgttgctgatgttgttgctgctgctgctgatggtgctgctgctggagatgggcttgtgtttggttgggggactgcatgccgtactgaatgccattggcagtctgagtaagcaacgagccagcataaacagagctgtaatcaaggaaaaaagttaaaattatgaatttggatgtatggttttattgcattgcttattctttgcaattatacctataacaatagttcttcagatacatattattgtaattcgagaagaacattttaacactttgttcttattttgcccagagaaacgaaaactttgtacgcgtttaaaatcgctgggcacacatttgcacgcgttatgctggcgtttttaaccgcaactgctgctgttattgcctctgtagaatctcactgttactgttgggaatacgaggcgctattaacatttcctgcgttttgtttactttacagtaatgagttggttttgctcgggacggacggaccaccagcgtccaatttttggcatgtttgcagttgagccagcgagggtgtggccataaaacttttaattaaagaataaaagtgtttgcagagttgtttacccccgcaaaataaaaacgtacgtagacgtttgtttgttagccttagccaacagtagcctgtgcaaatatttttgccaagacccggaaagacattccataaacaataacaactaattgctgcgtaagcaaaactttcgtaagtccaacgatctcaaagagactagggatcaaggatcgaagttttggagctttcgttttcacaggtgcacacttattacgcgctggacagagaaggatccttcttagaaattcaatcgaactgatcggcacaatcagtatttgctttttgttgaagaatacaactatctatttattttcaaacggcagcaatggaaggaaactcgcgaaagtgttcagctcagcattggcgttttcattttcgttttgatttatttgtgttttagttttcagttttatttcgggccgagttctctggatgacgagatggaggtggagatggagatggagacggagaccgcgaccgagaagaaagcacaaccgaatcggggcacgcgcgtttgcataatgacttgagtcgggtttagttttatgccaatgcagttgcagttgcagttgtcgctgctgctgcggctgctgctgctgctgcaactgtgattgctattgttgttgccgtgagtgttggcccaaagtaatccaagtcactactcacacacacacacacacacacacaatgtgatcaagtgactaaagaataaagttaaccgaaaaaaatcgcatatctgcgtatgaatgtattcaattatcaaacaaacggcttgcaaataattgactctttgttgccagaatttatacgaccaagtcttgcagctagatgcgcacgctctctgataacagcggtaaccgtatttccagcccgagatgccccacagctacagccaagctataatatatagctgcatatataggaagtctgagtgacaagaaaaagtgcacgacaacgatataactttatcgccgctgcgcggttcacttctgttgtttgtcgcaggtgagtattttgcgtcgacttcttgtttttcacatacttatgagtgtgtatgcatggcaaaaatggcatgtgagctggccagcagcgtgatatcttcttctggtttctcactgccacaaaagcgaaactggccaaaaagtcacatacgaagtgctggccacatcagcgtcaccatcaccatccggcaccagatgacgttatgttaccacatatatgtacaagtgtatatttccgtcatacgaaagatacttttccataactctaatttcacccaattgcgtttctaacatgtttgacttctaaaaatctaacattttggtctgttcctcacatgacttcatatatacttcaactgaatgtgcattcatgcctgtttccatatgcatatgcaaaacacgttttcaatttaaataataacatagggaaaacaaacgaaaaaagctaaaagtatagatgcgaattaccagaaaatagtcgagtaaaacgcgatcggcaatgtgcgggtgcgttgggtccgctgcctcccaccgatgtatttataatttcccgccgtacctaacgtaacgctgctgctccgcttgccactctccttaacccttcatggtgcactgcaacttgggggttgctgagtcagcagaggcagccctgaacacaaaaaaaaaatagacacttacgaagcatttgaggctgtttctgtttctgtgggctccagtttgggtttcgttcgggggtttctatgtcacgggatggctttgggttaccccggctcccaaacagtcacacactcgaaaggtatcctctcaccgaaagcaatagagcttgcaacccgagcacccaaaacaagctagaaaaatgcgctacaatggcaatttgcctttactgttttttttttttttggttttggctctgaagagtcgccgcgagtttcgactgttcaatcaaatgcgggtcgcgcccccttttttgtttggcttttaggagctagcttgccacagtctgtggcacgtgctggttttaggccaaatgtggcagcaacctggacacgtgcaacactagctcacgcatgctggtcggaaaaactaacaaagaaactaagtgaaccatttagatttcctgcatctggtggggaagtcggtgctgcccggactaggatccaaaggggaaaactcatgagtcagacaagccatgcgtcaataattaagacattgcatattcttgtttacgaaattcgagcggcaatttgtgtatattctgctgagttcgagtttgcagatgatttcacagaggcgacgctataaaatgccaagtgcaaagcctctttatttgttgtctcacattgtttactttgatcgtggacaaggttagttttcctaatagaagccgaacaatattcctaaataatcggaaagatgacaagatttatgttaaatggagtatgttaaaataataatcaatccctgaactttatataaataaactttaagtagcatctctgaaggtaaaagtaacattcttgaatattaaataaaatttcctaagatcggcaggacgaatattttgtcgaaaaattttctatacgttaagctacttttctaaaccaaaagtcctgccccactgactttgctcccacgcagggcgtcatgcgtggaatgctcctcatatgagacatctgcggaggcttcacaactgtgttttgtttatgtttttgttgtcccgctggaaacacattcttggagcagaactaacttggtggctagatgaaagtggaacagattttcgcattccgcatattgagtaaaccacctgggaatgccataacgccataaccataaccgactgtatttgggtatggatttgggattgcgagagacggtggaaaagaggagaccgaagtccgagctttggaaccaatacccacaatgggcgcttctgttcggttcgtcactccgcccgagcaaatcgcgccaaggcgggagaaatatgaatcagccggcgcggttctctgttaggtgatcgctgatcgctgatcggagctccgatcatgacttttaacggtgtcgccaagcggtcgaaaggcacgtgcgctcgcccgcttcgtgatagtgagctcattacagtgctccgcggcaagactcacctgttctgcaagctgctgccgagctgggcggccgcaaagtaggcgtcattctccggcgagaggctatcacgctgggtggcgctggtcagctgggtgaagctctgcagggtggacagtgcgtgcgaggacgacggggagtccccgcccgccgaactggtggagttgttgtggtggtgatgatgttgttgctgctgctgctgctgctgttgctggtggtaaagttgttgctgctgctgctgatggtgatgcagttgctgctggtgatggtgctgctgctggtggagttgctcgtgggtgagggcatagggactggagtcctttagcgtatgcatatcggacacggaggtcagcacatggtaatcggtgctgtggccatcctcgaagcactcgtccttcagcgtgtcctggatgacctcgtctatgttgggtgtggtgccctgggccactgctgctgccgctgccgccgccgctgccaaatgctcgtggctagtcatgcccacgcccactccgccaccgcctccggtgtagacgctgtagaacgcaaagttgttccgcattatgggatccgtgctggggtagtgctcgtagagctgggtaggcgtatgatggctgggcggataggagaactgcccgaagaggtggggatgcgatgctgctgccgctgccgccgctgctgctgccgctgatccgctggtcaggtcataggccagccaactggcctggtgttgctcctgcaccacctgctgatgctgttgctgctgcgcctgctgatgctgttcctgctgatggtggcttattaattgctggctgagaaactgttgctgttgctcgtagatctgggcttgttgctgctgctgttgctgttgatcctcagactgatggtagcttatcacttttgttttaacactttcactcgcgtcgttctgcgctttactattattattattattgttagtatttatcgcacttggatcgtcatcgatcgctgcttcagatgttgctgctgtgtcgcttgctgttgcggttgctatttctgttgctgctgtaactgttgatgttgatgttgccgacgcgtttgctgtggtaaccgcttgccttgctgtttcgctgacaactgaagtgagagcctgcgagcgagcggactcaagtgacgataaattcgctgcggcggccgttgctgccgcagtcggcgtcgctgcttctccgttctccgtttcgatcgctatttccgtctcattcgctgctgcatttgatcctgttgctcccgctgttgttgttgccgctaaggctgatgctgttgttgtagctgctaatgctgtcgccgctcgtcctgcctgccgcttgttgttgttggacttggccgtgcggatcttactgtccgccgcattcgaaagcagactaccgccgcccgccttggtcaccgaacccaatcccgatcccgaccctataaccgcccctcccgccgctgccttctccttgggctttgtcgttttcgtcatgattccggcgctccacacgattatccggattctccgccgcaatccacgtacgtgtccgtatccggcgcgattttcacagaaactgatttgatttgagcggcttgcggttcgaacttcgaaatacggaacagcaaagcaacacgaaaaaataaagctcgttaaaaatgttttttttagaaaaccaaatcgagaacaaatctcatcgagcatcctctctccctctcgccatctctgtccattgattacagttgcgtttgcttagcactttgctctacatgccgttacacgagcgccactcgtaatcgtaatcgcatgttggtgcacagaaataaaaatgacgatcatcttaatttctatccttgtcctaagatcactatttattaagttaagtttggtttatctaaagaaataaataaatacatatagtaaatgtagtaaacatgtagtaaatctattcatttatttctttggataaagcaaacttaagataaaatatataataataatacattgaaatatataataaaatataaaaatataatatgactaataaacggaataggaaattagatcttttatttcataaattatatatacacattaaatatacattaaatacacatatgactaaatttatgacatagtttttagattttcaagatttcaacaaggatcaaattcatttcgaaaacatgaatattttcgtctcgtgtacagctttaaatatttcgaaatattcgatgcgagctccacgctcccgcactcgcctactcactctttctctttttgtggatccctctctttggctcctctcttccttcgcttactattcgcttgtgcttgcgcctaatgcctgccttatcgcacttactgcctccgctttgtgctgcgttgctccgcctctcactacatcagcagcaacaacaggcgcggaaagttgaagaaggggtgggtgggggcaggccgaggtagaggccatgccggaacgtgttgttgttgtagctggggcggcctctactgttgctcgattggtgttgttgtggtcgctgttattgtggttggttgac

SEQ ID NO: 40604 - DNA, 4443 bp, DROSOPHILA
cgccggatacggacacgtacgtggattgcggcggagaatccggataatcgtgtggagcgccggaatcatgacgaaaacgacaaagcccaaggagaaggcagcggcgggaggggcggttatagggtcgggatcgggattgggttcggtgaccaaggcgggcggcggtagtctgctttcgaatgcggcggacagtaagatccgcacggccaagtccaacaacaacaagcggcaggcaggacgagcggcgacagcattagcagctacaacaacagcatcagccttagcggcaacaacaacagcgggagcaacaggatcaaatgcagcagcgaatgagacggaaatagcgatcgaaacggagaacggagaagcagcgacgccgactgcggcagcaacggccgccgcagcgaatttatcgtcacttgagtccgctcgctcgcaggctctcacttcagttgtcagcgaaacagcaaggcaagcggttaccacagcaaacgcgtcggcaacatcaacatcaacagttacagcagcaacagaaatagcaaccgcaacagcaagcgacacagcagcaacatctgaagcagcgatcgatgacgatccaagtgcgataaatactaacaataataataataatagtaaagcgcagaacgacgcgagtgaaagtgttaaaacaaaagtgataagctaccatcagtctgaggatcaacagcaacagcagcagcaacaagcccagatctacgagcaacagcaacagtttctcagccagcaattaataagccaccatcagcaggaacagcatcagcaggcgcagcagcaacagcatcagcaggtggtgcaggagcaacaccaggccagttggctggcctatgacctgaccagcggatcagcggcagcagcagcggcggcagcggcagcagcatcgcatccccacctcttcgggcagttctcctatccgcccagccatcatacgcctacccagctctacgagcactaccccagcacggatcccataatgcggaacaactttgcgttctacagcgtctacaccggaggcggtggcggagtgggcgtgggcatgactagccacgagcatttggcagcggcggcggcagcggcagcagcagtggcccagggcaccacacccaacatagacgaggtcatccaggacacgctgaaggacgagtgcttcgaggatggccacagcaccgattaccatgtgctgacctccgtgtccgatatgcatacgctaaaggactccagtccctatgccctcacccacgagcaactccaccagcagcagcaccatcaccagcagcaactgcatcaccatcagcagcagcagcaacaactttaccaccagcaacagcagcagcagcagcagcaacaacatcatcaccaccacaacaactccaccagttcggcgggcggggactccccgtcgtcctcgcacgcactgtccaccctgcagagcttcacccagctgaccagcgccacccagcgtgatagcctctcgccggagaatgacgcctactttgcggccgcccagctcggcagcagcttgcagaacagctctgtttatgctggctcgttgcttactcagactgccaatggcattcagtacggcatgcagtcccccaaccaaacacaagcccatctccagcagcagcaccatcagcagcagcagcaacaacatcagcaacaccagcagcagcaactgcagcagcagcagcagcaacatcaccacaatcaacaccagcaccacaactccagcagcagcagtccggggccagcgggtctgcaccactcgagctcctcggcggccacggcggcagcggtggctgcggcaacggcggcggtcaatggacacaacagctccttggaggacggctacggatcgccaaggagcagccacagtggcggcgggggcggtggtactctgccagccttccagcggatcgcataccccaacagtggctccgtggaacgttacgctccgataaccaattatcgcggtcagaacgatacctggttcgatccgttaagctacgccacctcctcttccgggcaggcgcagttgggcgtcggtgttggagccggagtggtctcgaatgtgatacggaatgggcgggccatttcggctgctaatgcagcagctgcagccgccgcggatggaaccactggacgcgtagatcctggaacctttctctccgcctcggcatcgttgtcagcaatggccgctgaatcaggcggggatttctataaacccaactcatttaatgtgggcggcggtggccgtagtaaggctaacacgagtggtgccgccagctcctactcctgtccaggctcgaatgcaacctcggcggcgacttcggcggtggcgtcgggaacggcagcaactgcagcgacgacgctcgacgagcacgttagtcgcgccaattcgagacgcttgagcgcctcaaagcgagccggactttcctgctccaactgccacaccacccacacttcgttgtggcgccgcaatcccgccggagagcccgtctgcaatgcatgcggcctgtactataagctccacagtgtcccacggccactgaccatgaaaaaggacaccattcagaaacgcaagcgcaagccgaaaggaacgaagagcgagaagtccaagtcaaagtcaaagaacgctttgaatgccatcatggaaagtggttcattggtgaccaattgccataacgttggtgtcgtcctggacagcagccagatggatgtcaatgacgatatgaaaccacagctcgatctgaaaccatacaactcatactcatcgcagccgcagcaacagcttccacagtaccagcagcagcagcagctgctaatggctgatcagcactcatcggcggccagctcgccccatagcatgggttccacctcattgtcgccatcagccatgtcacatcagcatcagactcatccacatcagcagcaacagcagcagctctgttccgggctggacatgtcgcccaactcaaactaccaaatgtcgccgctcaacatgcagcagcatcagcagcagcaatcgtgcagcatgcagcactcacccagcacacccacatccatcttcaacaccccatcgccaactcaccagctccacaataacaataacaacaacaacaacagctcgatcttcaacaacaacaacaacaacaatagtagtagcaatgagaataacaacaaacttatacagaaatatctgcaagctcagcaactgagcagcagcagcaacagcggctccaccagcgaccaccagttgctggcccaactgctgccgaactccattacggcggcagcagcagcagcagcggcggcggcagcggcggcgatcaagacggaggccttgtcgctcacctcccaggccaactgctccacagcgtcggcgggacttatggtcacctcaacaccgaccacggcatcgagcacattatcgtccctgagtcacagcaacattattagtctgcagaatccgtatcaccaggccggaatgacgctgtgcaagcccacgagaccttccccaccctactacctgactccggaggaggatgagcagcccgctctcatcaagatggaagagatggatcagtcgcaacagcaacaacagcagcagcagcatcagcagcagcaacatggagagataatgctcagccgatcggcctcgctggacgagcactacgaactggccgccttccagagacatcagcagcagcagcaacagctgcagcagcagactgccgccctcttgggtcaacatgagcagcatgtgaccaactatgcgatgcataagttcggcgttgaccgggaaacagtggtgaagatggagtaggcgcgacacgctgtatgtcgcacgaccaaagattctgttgttacattaatctcatagctccaaagaatttatagcctgtataccaagagcagttctcaaagaacactcatctatctaaaatctatcgaatcattagttgtacatacggtctaaatcgattgatacttacattttcgtcgaattttaatggtccactactcgaaatttgttatgaaatactagtttaattgttagcaaaatgccaacagcataaaatcgattcagaaactaggctaagaatgttcatttaaaattttgttatcaaatcgaataccttttgagatttcctacaatcaaattccacttagatattagccacaaatcatagttaagtcaaccaaaaaaaggcaaatgaaaacgaaaaagaataacaatcgaagtaaccaataatctcatgcaattagctattaatttatatattttttatagcattattatatatttaatgcaatttaagttttagtctggtatattttttaacatcatatttgcaatattaattttatttctcttgagttaataaaagacaattgtccctgaaa

SEQ ID NO: 40605 - protein, 950 aa, DROSOPHILA
MRNNFAFYSVYTGGGGGVGVGMTSHEHLAAAAAAAAAVAQGTTPNIDEVIQDTLKDECFEDGHSTDYHVLTSVSDMHTLKDSSPYALTHEQLHQQQHHHQQQLHHHQQQQQQLYHQQQQQQQQQQHHHHHNNSTSSAGGDSPSSSHALSTLQSFTQLTSATQRDSLSPENDAYFAAAQLGSSLQNSSVYAGSLLTQTANGIQYGMQSPNQTQAHLQQQHHQQQQQQHQQHQQQQLQQQQQQHHHNQHQHHNSSSSSPGPAGLHHSSSSAATAAAVAAATAAVNGHNSSLEDGYGSPRSSHSGGGGGGTLPAFQRIAYPNSGSVERYAPITNYRGQNDTWFDPLSYATSSSGQAQLGVGVGAGVVSNVIRNGRAISAANAAAAAAADGTTGRVDPGTFLSASASLSAMAAESGGDFYKPNSFNVGGGGRSKANTSGAASSYSCPGSNATSAATSAVASGTAATAATTLDEHVSRANSRRLSASKRAGLSCSNCHTTHTSLWRRNPAGEPVCNACGLYYKLHSVPRPLTMKKDTIQKRKRKPKGTKSEKSKSKSKNALNAIMESGSLVTNCHNVGVVLDSSQMDVNDDMKPQLDLKPYNSYSSQPQQQLPQYQQQQQLLMADQHSSAASSPHSMGSTSLSPSAMSHQHQTHPHQQQQQQLCSGLDMSPNSNYQMSPLNMQQHQQQQSCSMQHSPSTPTSIFNTPSPTHQLHNNNNNNNNSSIFNNNNNNNSSSNENNNKLIQKYLQAQQLSSSSNSGSTSDHQLLAQLLPNSITAAAAAAAAAAAAAIKTEALSLTSQANCSTASAGLMVTSTPTTASSTLSSLSHSNIISLQNPYHQAGMTLCKPTRPSPPYYLTPEEDEQPALIKMEEMDQSQQQQQQQQHQQQQHGEIMLSRSASLDEHYELAAFQRHQQQQQQLQQQTAALLGQHEQHVTNYAMHKFGVDRETVVKME

SEQ ID NO: 40606 - DNA, 5000 bp, DROSOPHILA
gttatcatggtataattaatatttaatatattcttgctgttgttttcttttgcccatttctatgtgttataggtatagtatagtaataggtgatgaagcagaacatgatgtgtgctggtaaaagtttgtaaacttgttctattgcatcgatgcgagacttgtggaagtactaatgtgcgacgaggtgcccaacgtggaggccatgtctccttggtagctgaactgtggcggtgaaaccaaaaattggatgagcatacagaaccccactttaaatgttttcaactagatcttacctgcgggaaaagcggctcttcggctatggagcccaacgggccagtgggatccggcggcgtcaactccacactctctcccgtaaactccttgtcgaagtaccttgtatccgtatcggatgtcacctgaggcttgaaaggcggcggtatctacggtaagcattttaaattcgattaatatatacgaataggtaactgacagatttactgtgccctacttttttcaacactagatctgtccagttaatactcgcaaagaatggatgtgcttgtatctccttgacatcatcctttccacctcccaaacgctttttgggatccttagctagaaggcctgctaacagatttttcgcctcatctgtgatattacgcgggaattttacctcctccaccaaaatcaatgtaaagagcacatcatgatcacgattgtaaaacggaagacgaccacagatctgtaaggaattatttttgtttttaatacttgttaatagtatttgcagatgcaacaaactcaccatctcgtacatgaccacgccagtgccccaccagtccaccgcttggccataatcattgtcatctaatacttccggagctaggtattccggtgtaccgcagaaggttttcgttgtgcggccgtaggtgatgtcctccttgcacagaccgaagtctgcgacctttatgtgaccatctttgtccagcaaaagattttccagctttaagtcgcgataaattatgccctgtgaatgcagatagcccagagcagaaatgatctctgccccatagaaacgtgttcgatcctcagtaaatatgcgttcgtggcttaaatgccaaaagagctcgccaccgttcacgtactgcatcacaaaacacaggcggtcgttggtttgaaacgaatatttgagtgactgcaaaacagggaagacatatattagttttttaacgtaaattatatattactagcaatacttacaatgaggaacggatgatttgtggacttgagcacacgactctcggtcagggtatgggccacctcgtccttttggataataacttcctttttaagaattttgatcgcgtacagcttggcggtagccttctcgcgacacaaaataaccttaccaaaggtgcccttgccgagcaccttgaggaactcaaaattctccaaagtctacaaggagataagatggagtcagctcgatcacgcccttggtcaatgaccaggtgagtggtacttaccactttcttaacgccgctgctattacaagtcgttccctgtacggagaactgctcggaaagctcgtcctcggcaatggtggccatgtccacgtctgtcatgtctgtctgttcagatggcgtcatagccacctcacccacatctatgagccggctggatacgttgcgaatggcctccgtccactgctggcgctctaattctgattcgacggcaaatgtcctttcgattaccgtggtccattgcaggccgcggatgatgaaggtgaatggcttgggccgatcgacggtcatgatctggcagccgcgcaccgtaaagttgttgagcaggaagtccgatggcgtgctggcactatctgccggcttgctgcggtaacccatcagtcttccatcggagtggagcacgaagtagcgctggcgccagttctttatgtgctcgcccctcttcatcagccacccctcctttacgacctgagtctgttccgtaagcgcatgacccgatgtaacgctgggcgagctgaggtcgaaagttgtgtttattgacatggttccggaatcgtgtgtaggggccgcggaggtcctgcttggccaggattgctgccagctgaatttctctgcactgccgctggtggggctgctgtttggatgggtggattggctgtagatgatgttaatgatgttgctccctgtggtggtgggcgattccgggatcctagaggcagatcctggcgctggggcgctggcaaccacagtcgatcgccgctgaagaacaaacggtaggtaattcgtgttgaggctgtttcactaaccctagggacaagctaatgagggacctgtaagaggagtacagtgaatcctttatattcatgctgagtttgaaatacttaaactaagaatgcgatcgacgaaaagaaaaaggctttagcagagggttcgtctagtaacacctttaccttcagggattcaacatgtactagatattaactgatccgccaactgtcgacataaactagtcaaagtggacaaatggagttcccaaatgagctagctatcaaaaaaggggaaacagacactaaaaggctgccaagtctatccagatatatacttcccacatcgcctatctcacgctgatagtaaacaattgttattgtcattttgcatgtttatgacaaatgcagttggcgcttgcgtcagcagctggtgcaaaacatttgcggcatttccgtcgccagaaagggattgaattggattgaggactgtgattctgattgtatcgaattggatgggttggtatggtgtggcatggtatgggattggattcttagtcactggcccacatgcagatgtaggcgccatcgtcgccttgttgttgctgccactttcggcttcaaacgaaattccccgccatgttacgcagcgacacggcgatacgagtgaaaattgttcgcgattgcatttagcgcgaaattaaatcaaaacaagtcgacggcggcgactgttcatgaacttatgtatatgcatatataatacatacatatacatatgtacacatacaggggactcgcaggcggcactcgcactcgtactcgcactcacactggcacaactgcaaaagcaaaagcatattcatttacaatttgcgaaaatgtcaacgacggatggccgccggctgtacaaatgtcgctatctatctaaaactgtaaacaaatgtacataaaataaaaatcgacaaaatacacacacaggcataagcggacaggcgctcgcacaccgaggcagtcacacagacagggctgcattgcaaagtgcgagtgaggccagactgtgggtgcgagggggagggagacagacagtacgcgtgtctgccacaaaggtgtatgagtgtgagtgtatgtgtgagtgtctggccgtgtgcgtgtgattgtctggccgtgtgggtgtgagtggctgagtgagtgaaccaccgagtgtgcgagtgtgtgtgggcagcggcgacctagcagcgcaacatgtcaaatcacttcgtggaaatggaaattgtggaaatgctggtgaaaaatacaagaacccacctagttttgtaaaaaaaaaaacccgacttttgctttccctactgcactgcggtttgttttcctactcgttttggtattttcctttagatggtgacggcagcgacaacgtcacaggccttcttattattgtgcgtgtgttgttgttgctgcttgctattgttgttgttgctgctgctgctgtagttgttgttgtgttaaggtgccagacaccagaggacggaacgaaacacacacaatctcgcactcgcgcactggaagtcgatttccgccacccgggcgtttccacttggtgttttcttgccttccaaagcaacgttgcatcaattgcaaatgcttaaaaacgtagttttcataaacagaagcacgcacacaggcaaagtaaattttccaagtaccgtttagtttttacgcttcactttttttcgataactggctcgataactgattcgatccgcgttgccacctgttttagcgatagttaggcgactgttacggtggaaagatgccagagagagacattatttaagagctgtacaacgcgcaaatatcccttaaatttaaattaaatgttttagaaggcaatagttctgttttctgactgtctaggccgactctttaactagaattcacttcaaatttgaatgtatgaactgcagattaataataatgctgtattgttattaaattcatttttaaaaactttattttatatgctatgtatacaaaactatttcttatatcgacaaattgttataacttttcaaagcataattgatcaaaaatttggaagccctatcaattttatatatggttcctgtccgcactaagtagatactctgataagtatgaccatgtgtaagtagctagaaaaagtcagttctcttttccagtttcccagatcaaatttgatattcacctctttgggcactcttgctcagatttgtttatgcagaacgcgaagtctcctttgaatccgaaaaaaaaacaaaaaacgagtagcgaataaagtgccccattggcacaaaacgaggtaaataacttgcaacccaatcggaagggagaacatagcatgccactttcaaataaacaaataacgactccagcgcgactgtgtgtgcgtgagtccctcccaatgtttgtgtgtgttatcaaaaaaggcgtagaaaagtgcaaaaacaaaggtgttattgactctcaactttctttttctgcctatcgtgtgtatcactgtgggctgtggccgaataagagcgttcgccgaatatgagcaattggaaaagcatgagcataagtaatgaggcagaatcggttgcattcaattagttggagaaatgaaaaatatgaagagatggtgtagagagaagggaagagtgcagtctcgagcaatcaataccaacgcagccacgag

SEQ ID NO: 40607 - DNA, 2425 bp, DROSOPHILA
taaaaactaaacggtacttggaaaatttactttgcctgtgtgcgtgcttctgtttatgaaaactacgtttttaagcatttgcaattgatgcaacgttgctttggaaggcaagaaaacaccaagtggaaacgcccgggtggcggaaatcgacttccagtgcgcgagtgcgagattgtgtgtgtttcgttccgtcctctggtgtctggcaccttaacacaacaacaactacagcagcagcagcaacaacaacaatagcaagcagcaacaacaacacacgcacaataataagaaggcctgtgacgttgtcgctgccgtcaccatctaaaggaaaataccaaaacgagtaggaaaacaaaccgcagtgcagtagggaaagcaaaagtcgggtttttttttttacaaaactaggtccctcattagcttgtccctagggttagtgaaacagcctcaacacgaattacctaccgtttgttcttcagcggcgatcgactgtggttgccagcgccccagcgccaggatctgcctctaggatcccggaatcgcccaccaccacagggagcaacatcattaacatcatctacagccaatccacccatccaaacagcagccccaccagcggcagtgcagagaaattcagctggcagcaatcctggccaagcaggacctccgcggcccctacacacgattccggaaccatgtcaataaacacaactttcgacctcagctcgcccagcgttacatcgggtcatgcgcttacggaacagactcaggtcgtaaaggaggggtggctgatgaagaggggcgagcacataaagaactggcgccagcgctacttcgtgctccactccgatggaagactgatgggttaccgcagcaagccggcagatagtgccagcacgccatcggacttcctgctcaacaactttacggtgcgcggctgccagatcatgaccgtcgatcggcccaagccattcaccttcatcatccgcggcctgcaatggaccacggtaatcgaaaggacatttgccgtcgaatcagaattagagcgccagcagtggacggaggccattcgcaacgtatccagccggctcatagatgtgggtgaggtggctatgacgccatctgaacagacagacatgacagacgtggacatggccaccattgccgaggacgagctttccgagcagttctccgtacagggaacgacttgtaatagcagcggcgttaagaaagtgactttggagaattttgagttcctcaaggtgctcggcaagggcacctttggtaaggttattttgtgtcgcgagaaggctaccgccaagctgtacgcgatcaaaattcttaaaaaggaagttattatccaaaaggacgaggtggcccataccctgaccgagagtcgtgtgctcaagtccacaaatcatccgttcctcatttcactcaaatattcgtttcaaaccaacgaccgcctgtgttttgtgatgcagtacgtgaacggtggcgagctcttttggcatttaagccacgaacgcatatttactgaggatcgaacacgtttctatggggcagagatcatttctgctctgggctatctgcattcacagggcataatttatcgcgacttaaagctggaaaatcttttgctggacaaagatggtcacataaaggtcgcagacttcggtctgtgcaaggaggacatcacctacggccgcacaacgaaaaccttctgcggtacaccggaatacctagctccggaagtattagatgacaatgattatggccaagcggtggactggtggggcactggcgtggtcatgtacgagatgatctgtggtcgtcttccgttttacaatcgtgatcatgatgtgctctttacattgattttggtggaggaggtaaaattcccgcgtaatatcacagatgaggcgaaaaatctgttagcaggccttctagctaaggatcccaaaaagcgtttgggaggtggaaaggatgatgtcaaggagatacaagcacatccattctttgcgagtattaactggacagatctagtgttgaaaaaaataccgccgcctttcaagcctcaggtgacatccgatacggatacaaggtacttcgacaaggagtttacgggagagagtgtggagttgacgccgccggatcccactggcccgttgggctccatagccgaagagccgcttttcccgcagttcagctaccaaggagacatggcctccacgttgggcacctcgtcgcacattagtacttccacaagtctcgcatcgatgcaatagaacaagtttacaaacttttaccagcacacatcatgttctgcttcatcacctattactatactatacctataacacatagaaatgggcaaaagaaaacaacagcaagaatatattaaatattaattataccatgataa

SEQ ID NO: 40608 - protein, 530 aa, DROSOPHILA; identical to SEQ ID NO: 25902

SEQ ID NO: 40609 - DNA, 6222 bp, DROSOPHILA
agtcggttccactttgaatttttaaatttatttcaaatttatctgctttatcttatttcgatttgtgtttttgcacggtcgaccgcttcgatttcattatgttttcttagtatcctggtgtgtttttgggctataattattatactgcataatgcatgatgcattcgcggtgcgggatgtgtgatcatatacaatttgatgtattatataataataacttttgcctatcaactaaacctaagcgtaatttcagaaatattccttcaaatgataaatgtgtacaattatataaattacattatgcctgcgcataggtaactatacaaaacgaggaaagcacaattcattaaataattaattaattaactatgtataaaatggtcttctggcgtctctgcgaagcacctgggacctggggccataggacgagggctaaggattgcggattgacggttgtgggccggagtattgctaactagcgattctagtagttcctttgagcaaacaagtttaacaaatttcgaataataaataacaaagcagtaacaagtcacgagtcaccattttcctccagaaactgggggggaaacggttcggatcgaagcggttgcgatgcccgcatgagacaaattcaataaaaaattgcttcattgcgggtacgcttaaaatttagttgttaaaataaataaattaataactgtaagatctgattgggaactgggactgggactgggacacggactgggtcatggtcttggacaagggcgagaaaaagtgcgaactcatcgtctaagctaatttacagttacattcagttcagtcgtcgctagtttggcagctgaggtggccgtggtctcgacatgctcctgatcccggtcctcgaccaggacagaggtggtgtcactggtggcgccgcctccgctgcgacgcctcctcctgcttctcctatcctgttcctgttcgtttgtgtatctcgttttctgcttccgctgcgctccgtgtcacttctccggcccaaagagcctggccagactcgcgttctgattgctatccatgatgtcagccgtggtgcccatggatcccttggccttgtgcgactgcatgggcggcagattggctatctgcacctcgtgccggaacaactggttcacgctgcgtccgaccagctgggcggtcagctttttgaagatgtccttcttggcgcgatccactttgttgcccttgacgggcgccacggcaatcttttcgtcgaacttttgaatgtcggccgcattcacgctggggatatgctgcagcacttcgctgagaatggggaactgcggacggagcagctcgtagaactgcacgcccagcgtcaccaggcccgattggttggcctcgtgctgaccgtgcacctgcatgccctgcaggacggcggtaaaggccgtgacggccttgttctcgtccattagtttctcggcggccaggaaacgcatcacgggcgctgcgatgttgacagccttcatgctgcacatgccgtcgttccaggcgatggcttttagcaaggtcatgagcacataattgccaatgagtccgttgcgcagcagcttgccgcccaagtcgcttatgatgtccgagagcagtgccgactggattgctcgcgattgcggtgcgctgtccatcgagtgctcctcattctccatggccacagaattgctgttggcattggcgccagctgccacatgatcggctccaatttggccgcccaccagcgcgatctttagcacgtccaaatactcgcgcgtcagcgtgcgattgagctgatcctccagcacctcctgcgtatcgtttacctcgccgtccagctggccgctttcgtagagcgaggcgatgtagatccagcggcgcgtgaggcgttcgcacatcaatggcgccaagtgggcaaacagcggcaccagaacgctgtcgtagaagctgggcgggcacgagtagacgaagggcttgaagaagacccttatgattgggcgcaggcggtaatcgggcaccaagtccatgcggctaaacacattcgtcacaatggcgtccgacagtcccatgagctggtaaagatcgcgtcccagcgatggtccagctgagcccatcaggtggtagcaaccctcggtgaccatcatcatgaaggtctgcatcttttcgaaggccgtcggttcgctgcggatggtcgtgtccaaggggtcggtgggcagagcgcatatgcccattagaagcttcttctcgtgctccatcatcccatggattccacgataaccctcggagagcgcttgcagagcctccggagcaaacagctcattaagcacacgcatcaagctcagcacgtgcgacagcagtggtacaatgtgcttggtggccgggtttctgcagatcgggttgcccagctccgtgcagccaatgacaaatcctccgcgctgtgcgcgctccggatcgtctggccaagtgcagcgcttgaccacgccgaggacgacgtgcagggcatccaagaggcgtgatcggttctggagcgtgacagctccttccacggcgaaaatgggaggcttgtccaggccaacgaagctcatgaagtccaacggggatttgagggcatcgccaaaggccagccactcggtgcgcttatcctgcacgatgtgctcaatgaacagcgtctgccgctcgaagtcgcagaaatggttcgagattaggatgagtgcctcctgcaacgtggtgcgcatcaaacggcacagctgatgcttaccgggctccttgagcaacagctccacgtggccgttgatctgctcgaaaacgggaagcagcagcagcggatacttgtgggccagcttcaccagcagcgaggcggcgtgtcgtcgaagattcttggcggacttggcctgcaccttttccagttcgttggggggcttcatcaccagtgctcggaagatcttgtcaagcactcgcggcaacagacttactccgctcatggccacgcagttggtcgccgtaatctgacaggcggacatgctcagaaagacgaacagggccgaaatgcaggacagcagaatcgagtatgtcagcggattgattgtctccagtttgaggcattcttccaagagtcgcagtcctgccggcacagatgggcgttccgccacgaggagaatgcggcttagcacgccgtccaacacactgaccagcgcatcccattccaggtatactggatccagaacgctgcacgacacgttgccgctcttgacctccgcgtccgcttcaatctgcgcgtttcgcagtcgttgctgcagccactgttcgcagtagccatacgtgaccaacggctgcaccagggtggccaggcggaaaatctcaaggaagtcggtccggcagcggaaaaagtagagcgcgtactcctcttcactatcgtgttctagtcgaatatatgcctccgtggagaggctggcaggcgagctagcggaggcaggatatggcagcttcacgatcctgggcgcaatcgtgtggatgagcttgggaatgtagttgaccatggcgaagtctttggaggagggctcatgcttaagcagcagctgccaaatgagcgccgacccatgcgagaggcccagcgatggatgctggacgagcagcaataggcattcgagaaggacttccaggtgcactggtcgttgcgtggcgtcgtccttgccccaaagcgccaccagttgctgcgccatgccgttcagcacttgcagcaacttcttaaggaagttgaggtgctgctcgacggccagtgtggaacttgtgtcggccggtatctgactggcctggtagatgtagcgcagcggctcctcgttgaacagctgaagcaacggctttcgctccttggtctggcccttgcggttcgtgatctgcgccaggcactcggccgcattgcattggaatgctttgtcgttgagcaggatgcagaggaagtgcatcagtttgccattgctggacatgatgtgctggatgctgacccactcgacgaagccgctcagcgtgagcagtaccatctcgacgacacggctgtgcgcgttcgccttggtgtagttgcacagacgcgttgtctcgcggaacgcagtcacatgctgctccaccaggcgcaggaagaactcgaagatgtcgttcatgttgttgtttagcgcctggtacatgtcctttcgccgctgattcgactcgattgtctgtaatagggccacgtcctccaccagtcgcaagaagaccagaagcaccagctccgtttgggcctcgcccttggtgcaggcctggcttagctccggcagcaggtcggaccactgctgcggccactcgcgcttgatcatctcgacgatgatgcgcgacagcgcgtccttcgtgggcagcagcgagcggtcctccgccgggcccacgcccacgttcagcatcttgatggcattgtccttaatgtacaccttctcctcgtgcgtaatgcaattccatcggtacttgattgtgtactcgatcagctgcaggccaaagtgtcgcacttgctggttagactgcggcgagctggccaggaataggcccacctgggcgcacattggcgactcctccttaaaccgctcacaggccatgtaggcctccaggcgcgcctgttgctgtgtcatcgggttcatgactagatcgatggccgaggccagttcggcggccagagcctcggtgcctccgtgctgggacatcgctagctagcgtctacctgtgggtattgcgttagattggaattgaaacaaatttcctgggtgcggcttcttcctgcaacgggcgccatgtgctccacttacctctgcttgcccctgcccaccgctcgaaacccaaatctcgcctagcctctcgatctccgccgcgatcccctcgtgcgttgtctgtgaccaatgcttttgtggagccagccaaccagccagcgagccagacaacgttttggaagattaaaagagctgccgctacctgtgtgcgtgtgtgctatgtgctatgtgctgtgtgttgtgtggtctgttccgtgtgcgaaatgcggaatgcgtgagctgggattgtggtgtgttggtgttctggttgggattgcctgtgggcaccgatgatcgccctgggtagcgcctattgcctggaacacagcctctggtcaggtctctcacatttgagtcgcatatagaagtagaccactactgaaaccgcttttccggctgggttgttttagaacaatgtgcagcaaatcgcacgggacagggttgacaagcggcgcacgaaagttgccagatagtattgttgctattgtatgtactaagagcttgactcggagctatatatgcctgaattgagtgatacaaggcattacgcttcaaggttgctactatctgtgttcattcggacttcaaatgcaaagccagccggttgagttccttatgaaattcgcgcaatattttcgcaattctgcagcgttgccagtctgctggtgttgaagttgccaggctgcaagtgccggcttctagtcttttcttcaaatgattggcttgcctctcagttacaaacttgtttaagcatgtatatagaaaaaattgaaaatgtacagaaatatatggtaactagtaactcaagtccttgccatcgctaaatttgcgaatctctgtcggacgttagccagcactgggccactcagcgtgcatacacgacaagcaaaacaacggtttttttgtatgccaaatcgaggcggcaacgccaggccgctcaggcactcacacactcacgcacacacaaaacatacacgccgatcaatcggtgcaagagcgctgtatttataattttatttttatttgcaagcggccggcattgatgaaatagagatggagtggcacgaagtggagttggacggtagccgcacgattgcgttcccggagcgcatagtacccggatttggccgggagccgtcggcacatttggacgccggtaagtgtgcacaaaatacggcgtgtgccgaaaccgattcaccaagaatctccgctatccctttacagccgaatacctgggcggcatcatacgcgacgggcaatggggctgggtgacctggcggtatggaagcgatgccactttgctggtctgcagcatgtccaccggcgattacctttcttggcactgcttctggagcgaatccgatgatctggggccgcgcaaaagcattcgctg

SEQ ID NO: 40610 - DNA, 4123 bp, DROSOPHILA
gaaaagcggtttcagtagtggtctacttctatatgcgactcaaatgtgagagacctgaccagaggctgtgttccaggcaataggcgctacccagggcgatcatcggtgcccacaggcaatcccaaccagaacaccaacacaccacaatcccagctcacgcattccgcatttcgcacacggaacagaccacacaacacacagcacatagcacatagcacacacgcacacaggtagcggcagctcttttaatcttccaaaacgttgtctggctcgctggctggttggctggctccacaaaagcattggtcacagacaacgcacgaggggatcgcggcggagatcgagaggctaggcgagatttgggtttcgagcggtgggcaggggcaagcagaggtaatgtcccagcacggaggcaccgaggctctggccgccgaactggcctcggccatcgatctagtcatgaacccgatgacacagcaacaggcgcgcctggaggcctacatggcctgtgagcggtttaaggaggagtcgccaatgtgcgcccaggtgggcctattcctggccagctcgccgcagtctaaccagcaagtgcgacactttggcctgcagctgatcgagtacacaatcaagtaccgatggaattgcattacgcacgaggagaaggtgtacattaaggacaatgccatcaagatgctgaacgtgggcgtgggcccggcggaggaccgctcgctgctgcccacgaaggacgcgctgtcgcgcatcatcgtcgagatgatcaagcgcgagtggccgcagcagtggtccgacctgctgccggagctaagccaggcctgcaccaagggcgaggcccaaacggagctggtgcttctggtcttcttgcgactggtggaggacgtggccctattacagacaatcgagtcgaatcagcggcgaaaggacatgtaccaggcgctaaacaacaacatgaacgacatcttcgagttcttcctgcgcctggtggagcagcatgtgactgcgttccgcgagacaacgcgtctgtgcaactacaccaaggcgaacgcgcacagccgtgtcgtcgagatggtactgctcacgctgagcggcttcgtcgagtgggtcagcatccagcacatcatgtccagcaatggcaaactgatgcacttcctctgcatcctgctcaacgacaaagcattccaatgcaatgcggccgagtgcctggcgcagatcacgaaccgcaagggccagaccaaggagcgaaagccgttgcttcagctgttcaacgaggagccgctgcgctacatctaccaggccagtcagataccggccgacacaagttccacactggccgtcgagcagcacctcaacttccttaagaagttgctgcaagtgctgaacggcatggcgcagcaactggtggcgctttggggcaaggacgacgccacgcaacgaccagtgcacctggaagtccttctcgaatgcctattgctgctcgtccagcatccatcgctgggcctctcgcatgggtcggcgctcatttggcagctgctgcttaagcatgagccctcctccaaagacttcgccatggtcaactacattcccaagctcatccacacgattgcgcccaggatcgtgaagctgccatatcctgcctccgctagctcgcctgccagcctctccacggaggcatatattcgactagaacacgatagtgaagaggagtacgcgctctactttttccgctgccggaccgacttccttgagattttccgcctggccaccctggtgcagccgttggtcacgtatggctactgcgaacagtggctgcagcaacgactgcgaaacgcgcagattgaagcggacgcggaggtcaagagcggcaacgtgtcgtgcagcgttctggatccagtatacctggaatgggatgcgctggtcagtgtgttggacggcgtgctaagccgcattctcctcgtggcggaacgcccatctgtgccggcaggactgcgactcttggaagaatgcctcaaactggagacaatcaatccgctgacatactcgattctgctgtcctgcatttcggccctgttcgtctttctgagcatgtccgcctgtcagattacggcgaccaactgcgtggccatgagcggagtaagtctgttgccgcgagtgcttgacaagatcttccgagcactggtgatgaagccccccaacgaactggaaaaggtgcaggccaagtccgccaagaatcttcgacgacacgccgcctcgctgctggtgaagctggcccacaagtatccgctgctgctgcttcccgttttcgagcagatcaacggccacgtggagctgttgctcaaggagcccggtaagcatcagctgtgccgtttgatgcgcaccacgttgcaggaggcactcatcctaatctcgaaccatttctgcgacttcgagcggcagacgctgttcattgagcacatcgtgcaggataagcgcaccgagtggctggcctttggcgatgccctcaaatccccgttggacttcatgagcttcgttggcctggacaagcctcccattttcgccgtggaaggagctgtcacgctccagaaccgatcacgcctcttggatgccctgcacgtcgtcctcggcgtggtcaagcgctgcacttggccagacgatccggagcgcgcacagcgcggaggatttgtcattggctgcacggagctgggcaacccgatctgcagaaacccggccaccaagcacattgtaccactgctgtcgcacgtgctgagcttgatgcgtgtgcttaatgagctgtttgctccggaggctctgcaagcgctctccgagggttatcgtggaatccatgggatgatggagcacgagaagaagcttctaatgggcatatgcgctctgcccaccgaccccttggacacgaccatccgcagcgaaccgacggccttcgaaaagatgcagaccttcatgatgatggtcaccgagggttgctaccacctgatgggctcagctggaccatcgctgggacgcgatctttaccagctcatgggactgtcggacgccattgtgacgaatgtgtttagccgcatggacttggtgcccgattaccgcctgcgcccaatcataagggtcttcttcaagcccttcgtctactcgtgcccgcccagcttctacgacagcgttctggtgccgctgtttgcccacttggcgccattgatgtgcgaacgcctcacgcgccgctggatctacatcgcctcgctctacgaaagcggccagctggacggcgaggtaaacgatacgcaggaggtgctggaggatcagctcaatcgcacgctgacgcgcgagtatttggacgtgctaaagatcgcgctggtgggcggccaaattggagccgatcatgtggcagctggcgccaatgccaacagcaattctgtggccatggagaatgaggagcactcgatggacagcgcaccgcaatcgcgagcaatccagtcggcactgctctcggacatcataagcgacttgggcggcaagctgctgcgcaacggactcattggcaattatgtgctcatgaccttgctaaaagccatcgcctggaacgacggcatgtgcagcatgaaggctgtcaacatcgcagcgcccgtgatgcgtttcctggccgccgagaaactaatggacgagaacaaggccgtcacggcctttaccgccgtcctgcagggcatgcaggtgcacggtcagcacgaggccaaccaatcgggcctggtgacgctgggcgtgcagttctacgagctgctccgtccgcagttccccattctcagcgaagtgctgcagcatatccccagcgtgaatgcggccgacattcaaaagttcgacgaaaagattgccgtggcgcccgtcaagggcaacaaagtggatcgcgccaagaaggacatcttcaaaaagctgaccgcccagctggtcggacgcagcgtgaaccagttgttccggcacgaggtgcagatagccaatctgccgcccatgcagtcgcacaaggccaagggatccatgggcaccacggctgacatcatggatagcaatcagaacgcgagtctggccaggctctttgggccggagaagtgac

SEQ ID NO: 40611 - protein, 1241 aa, DROSOPHILA
MSQHGGTEALAAELASAIDLVMNPMTQQQARLEAYMACERFKEESPMCAQVGLFLASSPQSNQQVRHFGLQLIEYTIKYRWNCITHEEKVYIKDNAIKMLNVGVGPAEDRSLLPTKDALSRIIVEMIKREWPQQWSDLLPELSQACTKGEAQTELVLLVFLRLVEDVALLQTIESNQRRKDMYQALNNNMNDIFEFFLRLVEQHVTAFRETTRLCNYTKANAHSRVVEMVLLTLSGFVEWVSIQHIMSSNGKLMHFLCILLNDKAFQCNAAECLAQITNRKGQTKERKPLLQLFNEEPLRYIYQASQIPADTSSTLAVEQHLNFLKKLLQVLNGMAQQLVALWGKDDATQRPVHLEVLLECLLLLVQHPSLGLSHGSALIWQLLLKHEPSSKDFAMVNYIPKLIHTIAPRIVKLPYPASASSPASLSTEAYIRLEHDSEEEYALYFFRCRTDFLEIFRLATLVQPLVTYGYCEQWLQQRLRNAQIEADAEVKSGNVSCSVLDPVYLEWDALVSVLDGVLSRILLVAERPSVPAGLRLLEECLKLETINPLTYSILLSCISALFVFLSMSACQITATNCVAMSGVSLLPRVLDKIFRALVMKPPNELEKVQAKSAKNLRRHAASLLVKLAHKYPLLLLPVFEQINGHVELLLKEPGKHQLCRLMRTTLQEALILISNHFCDFERQTLFIEHIVQDKRTEWLAFGDALKSPLDFMSFVGLDKPPIFAVEGAVTLQNRSRLLDALHVVLGVVKRCTWPDDPERAQRGGFVIGCTELGNPICRNPATKHIVPLLSHVLSLMRVLNELFAPEALQALSEGYRGIHGMMEHEKKLLMGICALPTDPLDTTIRSEPTAFEKMQTFMMMVTEGCYHLMGSAGPSLGRDLYQLMGLSDAIVTNVFSRMDLVPDYRLRPIIRVFFKPFVYSCPPSFYDSVLVPLFAHLAPLMCERLTRRWIYIASLYESGQLDGEVNDTQEVLEDQLNRTLTREYLDVLKIALVGGQIGADHVAAGANANSNSVAMENEEHSMDSAPQSRAIQSALLSDIISDLGGKLLRNGLIGNYVLMTLLKAIAWNDGMCSMKAVNIAAPVMRFLAAEKLMDENKAVTAFTAVLQGMQVHGQHEANQSGLVTLGVQFYELLRPQFPILSEVLQHIPSVNAADIQKFDEKIAVAPVKGNKVDRAKKDIFKKLTAQLVGRSVNQLFRHEVQIANLPPMQSHKAKGSMGTTADIMDSNQNASLARLFGPEK

SEQ ID NO: 40612 - DNA, 3466 bp, DROSOPHILA
atggctatcaagcacacgcagcagaggtttatttgccctgcgcgccgttctttgcctgtggaccttgcactttttcccgtttctttaccaaatcctgctgatttggtgaatcgaagcgattgggttggtggtggcacagacattaatggtgatcttcagccactgacccctgttggagctgtgatagctggataacttgttgggcgaatttgtggaaatgggcaacgcgatttcacctgtgccgtcgccaaccatttgccacgtcgcagctgacgttgctgtgaaagcgctgaataccttttactgattagcactttccttcgctttcgttgcagaatcccaaatatctgacaagacatggacaaggttgttaagtttgccgagcctggacgcgccttcgccaaggactcgatccgcctggtcaagcggtgcaccaagcccgaccgcaaggagttccagaagatcgccatcgccactgctgtgggcttctgcatcatgggcttcatcggcttcttcgttaagttgatacacatccccatcaacaatatcatcgtgggctcttaaatgcgctgagtggcaaggaaaccaccaatcatccaatcatccattatagcatacatcagatcaacgtctttttttttcgtttagttaacatgcattatatgtatggaccatgtgcattcagcgaatgcctttctaacaaaattctacacaaacgtacgaaaacgtattgtaatgtttcgatattccattcatgaacaagttagttaataagattcaaatgtaaaaaggaatcacccgtcttcatagcatttgtttggggtgcgcatccccgctaataaatgttaaattgattttccgtgtacaaatgagattcttttaactctgagagacgcaacgttacattgcttgaagaaagtaaagttgtaaatgaagctgataaaccgacatcatcattagaaccaagaataaatgtccagaaaacgtacaagcaatattttgtttaaagctcgttagcctatatttcgtaaatatttaatacctatatattacagaataataatcaagagtatgttagtacgcgtaaccagtaaagcgccgaagcgtacatatttccatcttccgggactgccctcgagtctacgagcctgtcggcctattatcgcacaggttgctccagtcgggaacgtgctcgctctttagatacgtctccttgaccagcgatcgtgtctggatgagatccgtcgcgccgcacaaggcgccgcccagccaggcagtaaagttttgcttgccgacagcattgaaaaacttgaactgcagctcgccatggaagcgttcggcgtagaacggatcctcggtgagcagatgctgcagctcctggcggaggcgggccagcagaccctggaccattgagccgccgcccacgaggaacacactctcgaccagggcacgtcgcacgtctagtgtgcagtcgagaatggagcgcaggatgagatgcggcaggctgtcccgctcgttgctggcctcgaacatgatctcgtaggcagactcccgcaggaggccgggcacctggatgaccgcatcgttgtcgctgacaatgtagtccacgtctggcgcgggagtcggctgattctcgtcgccgttggcgcgggccttggctctttccatggtggtcacaaagcaggttcgcaccttgatgtcctccagcacgctttctgttagcaggctctccttaacgccactctcaaccagctgccgcttgatctccgcgtggatggcgctgcctccgtagctctgatccttgaaggcggccatgatttgcaccccgctgaagacgggcataacgctggtctcgctgtagccaacgtccaccacaagggcagtgggcactgccagcgtagacagcgcaatgagatgcacgggcacgaacagcacggaggagacgtcgaagtggacaaagagcacgcgggccaaggtttcacgcagcacagtggatccgaacacgttctccaccagcacgaacttgcgctccttggggctgaccagtagatgcctagaaggaaattacattgcaatagaaaccaaagccaccgagtcacctacttgaagaagatcgtctgcagaaaatccactagctggtcgtacagctcctccggagtgtcgtagtcgaacagacgcttccggatccccgtcgtggtcatcaccacctccgtgggcatgatcttgcgcggatacgcctccgctgcgaatcccagcctgaaaagggtgcagtgatgacttcataccactttcgccgaattatttgcgtttgcttacttggtgtaggcggtgccaatgtcgaggacaatgggcggcttctcctgcatcacgctctcgtaaatgggcatcttggctgctgtctgctggctgcttgctcctttgctggacgaaccgactagaccatggaatggtatattgttcagttcgcttaatttttggccaaaacaagaagttatcggtgtgcggaaatcatcgattgacgatgtagcgagcaaacaccctgtttccactaatggcatccgttttactggcacgcttttcaaatttctgggtaactttaaaactttgcctattggtttgaaatacattcaatttggtattttggtattttatggcttttaaaacccaacaagataaaattttgaaagtagctcggaatcatttggtgtcagtcgattattctgcttttaagaggtctaactcttacgtacaaatagaatcaactttactttagtttattgcagtgtacatacatatgtatgcttttcagtaagtttacaaaactactttatcgaatttaagaagttaatttcgcgagtttgaagctaataattataatgattcttgtgaaattaaattcatatatcttaagaacaacttttgttcaatataatcgcaaagtctccgggcgcgcttcgtcactacattaactgccgtccacagtgatgttttcttgcatggatatcgtcctgtttgaaattattatattgcgtattactaaaacaagtcggttccactttgaatttttaaatttatttcaaatttatctgctttatcttatttcgatttgtgtttttgcacggtcgaccgcttcgatttcattatgttttcttagtatcctggtgtgtttttgggctataattattatactgcataatgcatgatgcattcgcggtgcgggatgtgtgatcatatacaatttgatgtattatataataataacttttgcctatcaactaaacctaagcgtaatttcagaaatattccttcaaatgataaatgtgtacaattatataaattacattatgcctgcgcataggtaactatacaaaacgaggaaagcacaattcattaaataattaattaattaactatgtataaaatggtcttctggcgtctctgcgaagcacctgggacctggggccat

SEQ ID NO: 40613 - DNA, 1356 bp, DROSOPHILA
cgaactgaacaatataccattccatggtctagtcggttcgtccagcaaaggagcaagcagccagcagacagcagccaagatgcccatttacgagagcgtgatgcaggagaagccgcccattgtcctcgacattggcaccgcctacaccaagctgggattcgcagcggaggcgtatccgcgcaagatcatgcccacggaggtggtgatgaccacgacggggatccggaagcgtctgttcgactacgacactccggaggagctgtacgaccagctagtggattttctgcagacgatcttcttcaagcatctactggtcagccccaaggagcgcaagttcgtgctggtggagaacgtgttcggatccactgtgctgcgtgaaaccttggcccgcgtgctctttgtccacttcgacgtctcctccgtgctgttcgtgcccgtgcatctcattgcgctgtctacgctggcagtgcccactgcccttgtggtggacgttggctacagcgagaccagcgttatgcccgtcttcagcggggtgcaaatcatggccgccttcaaggatcagagctacggaggcagcgccatccacgcggagatcaagcggcagctggttgagagtggcgttaaggagagcctgctaacagaaagcgtgctggaggacatcaaggtgcgaacctgctttgtgaccaccatggaaagagccaaggcccgcgccaacggcgacgagaatcagccgactcccgcgccagacgtggactacattgtcagcgacaacgatgcggtcatccaggtgcccggcctcctgcgggagtctgcctacgagatcatgttcgaggccagcaacgagcgggacagcctgccgcatctcatcctgcgctccattctcgactgcacactagacgtgcgacgtgccctggtcgagagtgtgttcctcgtgggcggcggctcaatggtccagggtctgctggcccgcctccgccaggagctgcagcatctgctcaccgaggatccgttctacgccgaacgcttccatggcgagctgcagttcaagtttttcaatgctgtcggcaagcaaaactttactgcctggctgggcggcgccttgtgcggcgcgacggatctcatccagacacgatcgctggtcaaggagacgtatctaaagagcgagcacgttcccgactggagcaacctgtgcgataataggccgacaggctcgtagactcgagggcagtcccggaagatggaaatatgtacgcttcggcgctttactggttacgcgtactaacatactcttgattattattctgtaatatataggtattaaatatttacgaaatataggctaacgagctttaaaca

SEQ ID NO: 40614 - protein, 378 aa, DROSOPHILA
MPIYESVMQEKPPIVLDIGTAYTKLGFAAEAYPRKIMPTEVVMTTTGIRKRLFDYDTPEELYDQLVDFLQTIFFKHLLVSPKERKFVLVENVFGSTVLRETLARVLFVHFDVSSVLFVPVHLIALSTLAVPTALVVDVGYSETSVMPVFSGVQIMAAFKDQSYGGSAIHAEIKRQLVESGVKESLLTESVLEDIKVRTCFVTTMERAKARANGDENQPTPAPDVDYIVSDNDAVIQVPGLLRESAYEIMFEASNERDSLPHLILRSILDCTLDVRRALVESVFLVGGGSMVQGLLARLRQELQHLLTEDPFYAERFHGELQFKFFNAVGKQNFTAWLGGALCGATDLIQTRSLVKETYLKSEHVPDWSNLCDNRPTGS

SEQ ID NO: 40615 - DNA, 3065 bp, DROSOPHILA
aatatcaatattctaacagaggatattaacaatcccgcaaaagttcataatcatcttttcgctgcatacttttgggctactgtccggatttgctatatttgctatttgctgtgtatatttgatagtagggggtgtccccgaacgaatcttataggttctatatacatatgtaagttctgaccatcacaatcaatcactctactgaatgcaaatggctcatcctgcgaggtgtgtaaacaaaagtcgagaaaattgcgcagaaagcgcatctgctgctatccccgtcccgctcctggccacgcagctggcatgctgctgtcccgctctaggtcgcgtggtgtgcaccaagagcacccagtgctccagaccagcccagcccaacccaggaaaaaaaggtagtgcagcgggtgcagtaacggcaaaacacacattcaaatgcatataatatggacactcatatacagcgcttgcaatagcttcaattacaacaggtttaaatatagacacatggaataaacactaacagccgcagcacaaattgacgcctcaagtcctgggcacacctccgaagttgtactgtttggatttccacaaattgttttgcaggtaaagtcccggcacacagatataaatacagatccacccagtacacttggcacggccagtgcagcgaagtggcgagcggatcaaataaagaaccagaccagaccacatgatgcaaccaacaactggatggggatgatgggatcgggatggatggtttcgcatttgagaccctcacgagtactcctggcatcgtagaaccgcatgattgctatcgcacagcatagtccaaaacaaggaacaaggaacggtatctttcgataccatgaaataccatatcgtgctccaaagtagcagtttcctatgcgatggccatcctgcagctgggcaatcgtcactctcgaggattacccgttctacttactcgtgccggtgccaaatgcgagcacatgccaccttagttgggcgacttggtcggcccggcaactgccgatgcccgacgtgccacctccggtactttgccatccgtatccgcatcctgatccggctgatccccatcgccctgcacctggggggtcttcagctgcggcagggccagcatctggtccatcagatcgaagccgctcttccagatcagcagctgggcgcgcagcttcaatttgctgcgattgcggagcaggtgcttctccattgcgaaccccttgcgggcgcaggcaaagtcgcacgcccgctgccgcagcacggggcagatgtcgttgttgccgtcgcccacatagaagacgtggtcatagcgtatgctgcgccgcaggtcctgctcgatgacaaagtgctccagcacgcggcccttgcacaaattgctggcgctcagcttgcaatccgactgctggtggtgggcgcggaccataagccgtccggaggcatcgaattccgccggattggtaaagatggccacaaagcaatcggccaagttatgtgcccgcagccactcgtcgataaagacgctgttcgagtcactgatgatgatcaggtcgtagtgcagccgcttggccagatgcttgatcaggcgcacgaatccgggcacctcgggtatgccacgaatggtgtccctaatgcgcgcctccgacacctgttgctcgtgcagcaagcgaaacacctcggccatgtactccgtccagcagtcgttttcaaccagctcgttgaccttggcgctcgtcacctccgtgggcagcaggtcgcgcaccacggtgtccgtgttctgggaaacgatcgtgtggtcgaagtcgaaggccgccagtcgacggcgctgctgtttccttagcctgcagctggccacggccgcggccactgcggcgggtgactgctcctggttcgaggacatcgtgtgctccgctcctgctccggctatggatgcgctcagagcgcgcggagagcaagttcgagtgcgagttttgtgcgaggaccagtgtgtccgcgccgcccacgatgctaaatgccaggtcgcctgggcgcaaacaccgttgtgcgtgcgcttggatgtgcaaaataccgattatataccacaaaaatgcaatagtgcaagtcctgtcttgttcttattattatctctatttctaattggaattaggttttgcttcaatataaatataatgttgttaatataatatgttgttgtaaatattatatttgattaaaaatgaaataatataacgcgctctattagttcgattaaatctgtagttctttgtttgaaattcatccagttaccttacttatgtaaagattggtgtgaagcattaaagcattgtgaactcacattttttcaactagttaacgatataatatggttactccccaacgagtaaaaatagttaaggaatgtgaacaaaaattcaactttgaatataataaaattaggctacaaattagctaacgtttggagcattccaaagctttcatagcatccagctgcaaaatagccaagctggcatccctgccaccactgacagctcggccccagtgtagcgtagccctggcgtttgacagccgacgtggagctgtcatcggcaaacacatacgaataacggggtctacgcggcagtcgacgattgtatctcatttagttggaaattctgaattaaagcggaggtatgtgtgtttgcttatttgattttcagctgcgctcgcacagtttttcaattaaaatggtttgaatggctatcaagcacacgcagcagaggtttatttgccctgcgcgccgttctttgcctgtggaccttgcactttttcccgtttctttaccaaatcctgctgatttggtgaatcgaagcgattgggttggtggtggcacagacattaatggtgatcttcagccactgacccctgttggagctgtgatagctggataacttgttgggcgaatttgtggaaatgggcaacgcgatttcacctgtgccgtcgccaaccatttgccacgtcgcagctgacgttgctgtgaaagcgctgaataccttttactgattagc

SEQ ID NO: 40616 - DNA, 1065 bp, DROSOPHILA
cacaacggtgtttgcgcccaggcgacctggcatttagcatcgtgggcggcgcggacacactggtcctcgcacaaaactcgcactcgaacttgctctccgcgcgctctgagcgcatccatagccggagcaggagcggagcacacgatgtcctcgaaccaggagcagtcacccgccgcagtggccgcggccgtggccagctgcaggctaaggaaacagcagcgccgtcgactggcggccttcgacttcgaccacacgatcgtttcccagaacacggacaccgtggtgcgcgacctgctgcccacggaggtgacgagcgccaaggtcaacgagctggttgaaaacgactgctggacggagtacatggccgaggtgtttcgcttgctgcacgagcaacaggtgtcggaggcgcgcattagggacaccattcgtggcatacccgaggtgcccggattcgtgcgcctgatcaagcatctggccaagcggctgcactacgacctgatcatcatcagtgactcgaacagcgtctttatcgacgagtggctgcgggcacataacttggccgattgctttgtggccatctttaccaatccggcggaattcgatgcctccggacggcttatggtccgcgcccaccaccagcagtcggattgcaagctgagcgccagcaatttgtgcaagggccgcgtgctggagcactttgtcatcgagcaggacctgcggcgcagcatacgctatgaccacgtcttctatgtgggcgacggcaacaacgacatctgccccgtgctgcggcagcgggcgtgcgactttgcctgcgcccgcaaggggttcgcaatggagaagcacctgctccgcaatcgcagcaaattgaagctgcgcgcccagctgctgatctggaagagcggcttcgatctgatggaccagatgctggccctgccgcagctgaagaccccccaggtgcagggcgatggggatcagccggatcaggatgcggatacggatggcaaagtaccggaggtggcacgtcgggcatcggcagttgccgggccgaccaagtcgcccaactaa

SEQ ID NO: 40617 - protein, 306 aa, DROSOPHILA
MSSNQEQSPAAVAAAVASCRLRKQQRRRLAAFDFDHTIVSQNTDTVVRDLLPTEVTSAKVNELVENDCWTEYMAEVFRLLHEQQVSEARIRDTIRGIPEVPGFVRLIKHLAKRLHYDLIIISDSNSVFIDEWLRAHNLADCFVAIFTNPAEFDASGRLMVRAHHQQSDCKLSASNLCKGRVLEHFVIEQDLRRSIRYDHVFYVGDGNNDICPVLRQRACDFACARKGFAMEKHLLRNRSKLKLRAQLLIWKSGFDLMDQMLALPQLKTPQVQGDGDQPDQDADTDGKVPEVARRASAVAGPTKSPN

SEQ ID NO: 40618 - DNA, 2874 bp, DROSOPHILA
cagcagattaataggtttcaccgagttatagaaagcatcgaaaagcccaacggtcttagcactaagttgcagattaacgattccctccagatacaatataattccttcgtgttttgtctcctgggcgcactgaaactgcacgcagcccaacagcatgtcctgcggaatatatatttcggtaaaataagaccttaagtaatcgttaattacttacattttcatggtaaaccttattctctctctttaattttatatcgaagagcagtgaactcattttaatcagcaaatgaaaacaagtataacagctgatgtattctacggcgatctggcatcccgggcaccagctgtccatcaagtgggcagtcccaaaacttaggaaacgaaaacaatcccgtttttacataagtttaatttaaacattttcattcaataaaacaaatgcctcgcaatcaaaacgcagagcaggataatccctgcctaaaggtttgtttgctttaagaaatgtaataaataattaattatatctttacaaataggaacaggagctttcatttaaatgcctcaacaaaaacaactttgatcgcgacaagtgcgaaatatattttgccaattataacaattgcaaggagttctgggtgggttcttcaattaaagtgattgttttatggactacatttttatttcccaacagaacaaagtaaaaaccgaaaggagagccaagggaatagctccttatttgccgcccttagaagaacgcgatgggattaaagcagaatatatgaaaggaaaaccccaacaaagctgataaatgtatcttcctatttaattattttgtgtatataaattagctatacatcaggcaccaaagcttgcacaagcatgcattagacctccttgttgtctaaaaggctccatcaaatctgaagatctagatatttttgttatgaataacatttgtatttaactaaacttaaaatgcacatagttcacttatttagccttagctgtgaatagcgtcggcgccaacaatttttaaagcgggcatggcctcctctaacatgaccgtggacaattccagttctagggtctcctttggatcattcaaaatcagtaatttaagtttaggaaaacgatacagacaggccaatccattgctggtgatttgagtgcacgagaggtcgagcacttccaggttagggaagccacctcccgaaatcctatccagacaccagtcatcaaagcttttcacattgtgaaaggacaggaacttaagggagtccaggcagcgcaggttctccagcccctcgtagtaaagttccatgttatcacacctcaaggcctccactttatagcgaggatcaaacttattaggcagtttgaactcgccatctttggaggcccggcgccagtgggtatcgttgatgaacttgacggccccgccgcggtacagtatgaaatgcgccgcagccaattcggcgcccagaatcttgtgcctttccgggacaaactgctgcatgtgccgctcaatacgctcctcccggttctcccaccactgtcgaatgttccgcggacttagatcgatgggcttctgcatcatcacgatgaagtctgaggtttgctccgcattggagaacagcttcagtttgctgttccaatcctccggccggtcgccaatcggagtgcgccacttaagtttctgcttatccgctgccaattccgagcggattctcttcaccgtcgcactgacctcctcctctacctcgcccggctgcgcctgatttgtgggcacagtggatgccgttcgcaggccgcatcgccttaaggagggaaatctacgcgacacgcgctgcaacatccttcgagtgggatatcaatatataaattttagtgggtaaatgtactagagatgcgcatgttatgtgaactgcggcgtgactcacgacgcgatctatagtctaggattgtaatttaataaattatctgcttgctcaaactgaaagctaagtgcaatattatgtagtagaacatatatttcgacagaaatgcagtaaatgcttgttttgtttatttgcgttaggcatgtatataaaattaaaaaaaaaaaaaaaaaaaagtatacataaaaatacaatattttagcccatattttatcacaaaaattacgatttaacagtcagatctgtagatatttttacaaattacttgatacatttaaattgtgtcctactcacgagatgcgcgcatggaatcttagcagctgatgcatcagctgctagcactgaatttcacgacgagttggcaacacaaagccgatgcgacgccatcttgctttagcacgctgaatttcacatttccaccacaagaaaaaagaagagaagaaagaaacgcagacgaccttttgctgaagtgcgtgagataccaccgaaaaaacgaaccaaatcaattaaatgctgattaaccgccagccaaacgattgaaaacaacggtagccaggcgaacgccgcagaaacctgccaacaattacgtgaaccaacgcaagggcacccgtgcaattggcattttaattggcgactttagctgcgaacggcgcgccgaaaatggtcaattcgtctggcagcgaggatggccagttgcggagccccaacgatgtgcactatcacaggtgtgtattatccctggggataaatgcgattggaaaattgttgctgcatacatacataaagaggcgtacatatacacatgctggtgctggtggcgcggcgggaattccgctagaactctagccagattttttgtggcatcccaccgttgacatatcccgcccattcatacagctgtggtcatgatagtagtggttacgggtattttaaaaga

SEQ ID NO: 40619 - DNA, 874 bp, DROSOPHILA
ttgatatcccactcgaaggatgttgcagcgcgtgtcgcgtagatttccctccttaaggcgatgcggcctgcgaacggcatccactgtgcccacaaatcaggcgcagccgggcgaggtagaggaggaggtcagtgcgacggtgaagagaatccgctcggaattggcagcggataagcagaaacttaagtggcgcactccgattggcgaccggccggaggattggaacagcaaactgaagctgttctccaatgcggagcaaacctcagacttcatcgtgatgatgcagaagcccatcgatctaagtccgcggaacattcgacagtggtgggagaaccgggaggagcgtattgagcggcacatgcagcagtttgtcccggaaaggcacaagattctgggcgccgaattggctgcggcgcatttcatactgtaccgcggcggggccgtcaagttcatcaacgatacccactggcgccgggcctccaaagatggcgagttcaaactgcctaataagtttgatcctcgctataaagtggaggccttgaggtgtgataacatggaactttactacgaggggctggagaacctgcgctgcctggactcccttaagttcctgtcctttcacaatgtgaaaagctttgatgactggtgtctggataggatttcgggaggtggcttccctaacctggaagtgctcgacctctcgtgcactcaaatcaccagcaatggattggcctgtctgtatcgttttcctaaacttaaattactgattttgaatgatccaaaggagaccctagaactggaattgtccacggtcatgttagaggaggccatgcccgctttaaaaattgttggcgccgacgctattcacagctaa

SEQ ID NO: 40620 - protein, 284 aa, DROSOPHILA
MLQRVSRRFPSLRRCGLRTASTVPTNQAQPGEVEEEVSATVKRIRSELAADKQKLKWRTPIGDRPEDWNSKLKLFSNAEQTSDFIVMMQKPIDLSPRNIRQWWENREERIERHMQQFVPERHKILGAELAAAHFILYRGGAVKFINDTHWRRASKDGEFKLPNKFDPRYKVEALRCDNMELYYEGLENLRCLDSLKFLSFHNVKSFDDWCLDRISGGGFPNLEVLDLSCTQITSNGLACLYRFPKLKLLILNDPKETLELELSTVMLEEAMPALKIVGADAIHS

SEQ ID NO: 40621 - DNA, 12478 bp, DROSOPHILA
atatatatatatatatatatatatatatatatatatatatgtatatataaatatatatgtttgtttgtgtgtgtgtgtggtgtgtgggtccgtttgttgttgggttatgtgttagcataaattacatttataatacattcttagccatacgattgcagagcggcacccggctccccgatcctcgatccaccgccgagccaagtccctaccccgcttacgaatctaccgaatctaaactaaacgaatcgaaaaaaaaaaggacaagcagctaccgcacatgaagacactacttaggctgtgcttaactacttacatgggctagagggcgtggttcttataaatacacacatatacatacatgttcaaaaattcggcgcataagacgtttaaaatcaaatataatgtctatagaaaatacagatgcacagtgcgcacggtggcggcttagacttagacttggctgagaaatagaaatagacactatttcgattcaaaagcaaacggtaacacgaaacagctagccctacctacagacgtggacaagacccaacccagcgggtggaccaagcctccaaggacacgggaatacaaacgaacaaagccgcacggccaggacagctggacagctggacagacagcactctttcctcggttaaaaacgcaagtgtacaaatctgtttttgcgtgggcgattgcgcgcaattgaactaaaatgcgtcaaatgaattcactagaaacaaatgaagttgtgacttagtgctaggctattcaacttaggcgttaaaaaagtcttaagcataacgtggtctacttggtgttcggggtgcgtgtcatgtgtgtgtgtgtgtttgtgtgtgtttatgcggtcgtttggttgttaacattagcaaagttaagtaacataactataataggaatatttatatgtatatatgtataaaacacaatcaatacaatgcagtactgacaaataaagaataatcgtagtaaaaaaaaaaccttaaatactctctccactcttaatccattctcttccccttgtcgcattcattaatactatgcatctgtgtgtggttttttttttcttattttctttttttgggatggcggctgtgctctgtggttacgaccactttggaggcggcttggtaaaaggggcggcgcgtccggcgcttactataagtccgttagagtacgcttggcacaataacgtatgacccccactcaggcaacaacgggcggcggagctatgcctattggagtggcagcgggtgctcctgcggccgccgtagccgttcccgttgcagtgacattcgccgcgtcctcggtgactccgttcccgctgaagttgctgctgctgctgctgctgcactgcatcgttgtaatattgacagcattacccgcctgccgtctgcctatcgttcccgcaatatttgtggtcaccgtcgtcgcttcaagaacgggcggcagcgatgccacgggcacagctgcctttggactcagtgccgccgttggcgaaagggcgcgtcctccgttggttgtcaggccgggactgggcatcggactgtcatccgtttgcgcggaagtggcctccaagacaggagtaactgctgccgcaccggccgcacccgccgccgactgccgcttggcgggcttgtttcgcgcacatggtacgcagaacatggcggcgtgctcccggatcttcgtcacatgatcgatgcggtactcgtgcacccatttcaagcgcttattgcgcgctgcctttgagcgatccccgttggccgacggtcctccggacgcctgggacagagcggccacctggggcagaccctccggcttggtggccccgcatcgcatgcagaaacagcagcgctcacagctccagcgccctgtaagttttgtaagagggatgtttgttaagtaatctagtctgtatatttcaaatcattcaatcgaacaatttatgtatgttatccatgagcaactaactctccaaatggctttatagacaagccacgaagtacttaccatctgggactgtcctgaggcccaagcagtagatgtggtagcctcggtcgcactgctcgcaatagagcatctttcctggacgttggctgctacggcacttgatgcagcatttgcacccggcgcactgccaattgtagttcctcacgcgacccaccatgcgcggtggcatatcaacgcagctgggatggactgtgggatggcactgattttaggacggaagcggagcaaagtatgggggactacttaccgcgctttcggcatgtgtaacagcggatgaaagcctccggcatgtccctagcattgcgatgctgactgcgcagacagacgccgcaggtggacagcctgaccgacgatgagcactcgttcccatcctcgtcctcgctgcctgctccacttgaggcacccgtcgaactgctgcagctcgatgtgctgctaaagtcgctttcatcgccgctttcctaaaatgcataagaattgttggcgattatttcaactgaagcccatagttatcagaatgcagacaccagtgaaccaaatgtgattcaatttaactcaattcaatgtatttcatcaaatcgaatgaatgtatctctatccaaatcgctcaaattaccgtatcactgctgctcccgttgccgctggacgcggatgagaccgattgagcggaggacgtgctggagctgctagccgtgcgaaccttgtccgtctgctggcgtgtggaccttctgctgcgtcggacgggcgccgttaccgttacggatttgatggcggactgctcttgccccagatccttgggggccggggcggacgttttgatttcatcgctgcctacagcttcggattttgcctgtagcagctgagccatcagatcggtcggcggcttgtccagcgccgtgtccagtgggtaggctctgtaaaagtgaattgttagtgacagtgaaaataatagagacaccacgactgcgtcttacctgagctcggcgggctcaaactggcggtaggccattgagaactggtccggtaccaccgtgagtggataagcgtagtctgagttgcggaaggcctcgtcatagtcgcggggtggcaggagattaggcggtgccgggatattcgcctcttctgccactgcccgtatcaaatccgaagtggagcgctctaggcgtgtacaggtgggcgcggtccttggctgcggctgatttatcgtgaaggtctgcaggtccatgcaggactggcgctcatccttacggctgcatacaagagattagaaggcattagcattaggaagctgctcatttaccaaatgcaactgctagaaagtatagaaagtaactcacgacttgttgaagtaagcgttccacttggtggccgaaagcatggcacggtcgcgagcttgcagacctcgtccggccccgactgtgagtcctagggccttctgcttagcctcgatctcgcgcaaatgctttctgcgaatgtactccttgtactcttcgtacttgtcgaaaaagtccgcgtacatgatgtccaatatgtcggaggcccacacagcggtgatgcccaggtcgcacaacttctcgctaaccagccccttctcctgcagccaattgcgctcctccatgtcgaccgatcggcgtggcagatccgggtacttgcgcttaaagctggtaatgcccagatagagcgccacctgctcttgaatcatgaaggtgtcccgattctttgatgggcagcaacctttaggcggtggccagtcgtactcggcgatgctggaggcgctgtagtcggtgctgcaattcaataaagtcttagacctgctacgttatgagttcgttagaatgcacttactcttcggccacgcaagtttccatcttcttcttctttggacgtttgagagcagaacccagaatcgcgtcggcggactgaccctggttggagtccatcatgctcacattgctcaccatggacgactgtgactcctcgttgttgaggaagtcgggttgcctgcagacgagaaaagaatttattaattacaatttacagtggaaatgaacacatggaagactcacttctgtggcgttagcgggggttccatcaggctggccatcgactgattgctgttgctaagatcggcgctcatacgcgtgtcctcctcaaacacttgcggcgactaaagaagaattagggcggtaggtaattaggaatcatgaattcaaaggacattgcgatctaacgtataccttatatatgtatatatgtatgtatgtacatacatatacatacatatttcaattcgtagtctaggacataacagttcattctcatagaacggtaggaataattatacgattggtacttaacttacttttacttagaattgccaatagcagaaggaaaccctgaaaccctacgaagtaaaaactaaccatttgtaaacacagggtaattgctcaacatgcatacatgcgtacatatgtacacatgtgcgcataattatttatccttgcaatttttggaagccattgctctttgcacatgtttaaacgtgcagcagcgaaaacggcgagcgcagagttgccagctctcaacgaagttcacattcaaagccccgctgagagagtgggcaagagagcaatcgagagtgagagcgagtgcagcagcagcaggtgtggtgaaggtggactactgtcagctcatttacccacacacatgcaaagacacaaacacacacacgtgcgattggcgagagccaaacaaaaacttcagctgattaaaatcgcaggtgaagccaacaacaatcacagcggctgcgctgctcagttcgcagctgcttccttcgccgctcccccccttaaccggcacgccacacgcccccaatagctaatgcagcagcggctcgcttggctttattgttgttgttggctgtgcacttacactaggccgttggcaatgaattcgcgacatggcgcgcgcctttttttaattacgacacgttagccctcagtgtgtgtgagagtttgggtaagtgggcaagatttacgtaatgaaacataaacaagaaggcaatgtaatacaaattgtaaagcccggtagaagccctaactgtactgaccatcttcaacacgatgccccatatccgatgtccgttactgcgagaactaacgagatctcgagccgcaccatcactcgttactgctgctcggtctcgttagtttaaaataacatgcaaacagccccatttcaaaaggtgactccaattcaaggatctacgattctcttatccagcgacaaagtttggcgcatttattatatttttagtttagccaactagtcgccgtcttctaaatattcgcgccacttttcgacgagtcgctctcgatacttggttatgagagaataagtgtggtattatttgcagttttcgaaacaagtggaaccagttaggtcctaattccagttgccccccattaacataactaaatatgttgcaaatatatatataaatgttttactaaagtatataaaatacgctccttcctaggctattcatattcgcacccatttttagagaaatgaaaatccctaaagctaagcactcatcaaatggctttggcgaattgctaagtagttttgcaaaattaacaaaaacatacgcaacttgatcccacttaatataacaatgtttactttaccataagcataacgattacctttaccaagcataaacgaagaccacttaccggactgaacaagcctttaagtctctcgggatcgggctggtgcttgaggccgcccacgcatcgtggtcgactcatggcgatggcctttgctacggcacttgctcctcggctcattcgcggggccctaggctgcgtggcgggcgttgtggaggctgtgcctccgacgctgacagcccgatccaccgaagaagatcctctaccgcggcctcccctggatcgccggccacgaccacgtccccgcgtggggggcataggcaacgcagtttcgtctgaagaggaagagtttacttttggttacttgaagttttaaaggatttaacaaaactttcttacctccggaattgtccagcgcgctggtgtagttgtcctcgtcgtgacagtccggctggctaccgccggtactgccacagctgatgcttgaggggcgcgaggagcgcagctgctgggtggccatgatagaggagaagtcatttggctggaagatgacatcgggcagcggatccgaagaagacagaatcgtcgtcggaggtagcatcgagctgctgccacttccaccgatcacctgctggttggcggcagcgccagaggaggtcgacgaactggacgagcacattgtgaggtcgatctgcgcgctcagggcaaaggatatgctgctattattgttgttgttggactcggactccgaactaccgaactgagccatcgtcggcggcggcaactggctttgttggacactggccttgctctggcgcttccttgtggacttgggcgtgggctgcaggttggtgtttgtgctggtcgtggtgcggcgcgtggctctcagggggcgatggtcgcgagtctttggagattccagagtttcggcaagcccgtcttcaactcttgcatttggcacgcccacagacgactccttttccttagctttcatgtccgcctgctcttggcccacgctcaccatgtcgatggccagtcgcttgcgcagcagttgtacgcgacgcgacttgacagcgctgttggcctcctcctgtggagtgccgggtttgggagtaactgcacctccaccatccggcgagctctggttttggatacgcttcggccgcccacgcttcttgcccgttcctgccggcgtcgctaccggtgggggctgaggcgtcgccggttctagcggatcttgcgcctttgcgtcctcgccttcgacctccgaggacaaggctccattttgatccggcgttgaaatcgactgctgttgggtgggtggaaaaagcgaaccctccagatctgtgttcaggattcgctcgtgcttctgcttgcgcgagcgatgtgacggcggaagcgcctgcagtgattcactgcactttctggcgggatcgtggcaattctgcgtctgctggtcgttctcgtcgttgtccagacgtcgctgtttgctgggagggagctgcgaaaagaaaaactactgtcacggtacaattggttataaataaataagcgacaacgtactctactgctgggagattcgtttccctcgctgttagtgcgtttcaagtggttctcgttgttgttgtcctgggtatccatacgctgttccactccgtgatccattgcgagcttgtgaatagtttggagatgtttgttgagcatcgggttagaatcctcgtccatgtaggctaccctcgggctgccatcaggcgtgtccaggatttcaatggactcgattatggattgggcgggattcgcggcgggcaagggaccaacgactgcctcgctttctgcagcaataacagatcccccaccggtaccgcttccattcgccatcaggcgctccgttagctggggatacttgctggatttgcttttaggcgtggtcgttgtgaagcttttagccggtgccgtcagctggctaagcaatatgttcgaattgggcgacgcagctggcctaacgcgactgtcggcctcctcgggcacataacagccgatcgcagtttgcatccgcaggcagtcgatgagcaaccctttcggcgaaatgcgtcccgtgaagttgttaggcacatgcgttggcgaagagcccggcgacggtgacgaggtcaggtccaccatgtccacaacgttgtgctgggattgggcagacttgctggctttactggccttactcccaccgctggctatgccgttgctggcgggcatgggcggtagattgtgaaaaatcttgggatcgtgctccttggagagcgaatcgtcgatcaccatgtcgtccgaattgcggcgaacgtcgtccgaggctggcgcagctatatctgcgtctgggtcggagaagccgcagaattcctgactactgctgttcgactcgccgccattcgtcatgggagccggcgtgggattgggcgtgggttttgggatagccagcttggaggccgccgttggtggcttctcctcgagcactgcacgcaccttgtgcttcggtgagcataagttcttgatggtcagcttgggcagcggctgcaattgctgctccagcttagccgcctgttcgtcctcgatcatctctatggatttggttttaatggtgagtttggggatgctctgggcgttgtttaggtcgtgcgtcattatgaccgtgtgcacgtgctcctgaccgccgccacctgtcttgattgttaactttggtatctgctgctgctgctgcggaagctcctcactgctgctgatgcagctactaccggctagcgttgtcttgatcatcagcttgggcaccgtctgcatctccgccagtgaggacgacgacgacgatgaggaggaggacgaggcagatgaagacgaggcggatgcgggcgagaggctggacaggtgggcatcgttcttggcgggcatagctgactgggcgccactcacagctgctgagcacgatccagagttggagttggagccggaagcagccggattctcaggcaacttgatggtcagcttaggcaccacgctgcctacgcgcctctcgttcgcggcgcggatggtcagctttggcacaatgtgcggggtgtttcgtagttgttggccgagggtggtagccacctcgtcctcggcgcacgacgaggagcaggaagaggcgtccgcatcgaaggcatcttgctgcttcgcaaccaagcctccttccgctccgccgcagggcagctgaatgcgcaggggctccacgcgcctctcatctccgcccggctgagattcatttgcgtttgagttgggattggcgtgcttggagagcttcaggatgatcttatgtccatcccgctcctcgctctctacctcaagcgccgtagcggccatcggtccacctgctgctcccgctgctgatgctgctgatggtgcttctccggatgctgagctggccgatgcagatgctccagttgtgcttggggcatcgtcgcacggcgtcgtcggcggtggcagcgtcggcggaggcgacgctgtggtgctggttatatggccgggctgattatgctggtgctgcagtgcctcctcccgctgctgctgctgctgtggctctggctcctgttcccggtcccgatctgcattcagctgctgatcccgctgggctggcgacgacgtggagctaactcgctgctcctcctcgctcgtgctgctcgctgccactgacttggcgttgctattagcgctacagttagactgggggcgacctgctgctccggctgatcctgctgtggacgtggcggctgccgattctaccgctgttcccgattccgatcctgatgacgatgtcgctgctaccatctgctgctgacgtaaatcattcattgctatattcgattgtccagtgggccgccagcctgcaaaaagaagtggacgatactttagatcagggtgcatgatagcagtcgataagattcgggactttcaacaactaattcttaaatttgcatgtgaaatcaatcctaaagaaaaccgccaatacagcatataataatgcgtataattgccgctccaagggatgcattttgtttacactaaaaagagacaatttgaaaaggggaacgacctacagacacacacacccacaaatacactcatacatacatacatacatatatgtacatttgtacatacacacttattggagcccaatgaaagaataaaattgaatgaaagccgggtagagttacgaactaattatagcacatgtctaaacaattaaaccgtatttgtaaataccgaaggacgcgcaggtttaaacagtcgccagccgaaaattccgatgaaaatgcaatacgattttccggcgctgaaaaactaccgctcgaaattgccgcgaaaaacttcaagcgaaataaacacaagaagaaccacggcgagggcaacaacaacaacacttaataaataataagcgctgcaaacatgcgcacacagctgtcgactgggggagaacgtgaaaaggcaggaggaagatgaggatgaagcggaatggctatggcgttgagcgcagaggagcgcagcgaagcagcgggataggcaaatactgagaaagccgcgccgccacgaattatggcctgtttgttactggtgtgtgctggcaacactgacgcgaattcaccacgctggcggccaaatccaccacaagcagtcgatgccgctgcatggagaaaatccacacacacacacacacatacgaaggagcacgacacgcacacactcatatgggttggttgccctggcctgcgtatatgtatgcttacatttctactggccaaatgcaagcatctatctatctgcactaggactaatattattgtgagcacgattttagagcgcaatatcgacagccagtgcactggcaacaaaattagcaacaacgacgccgccgccaaagccctgacccaacaccaccactacaaccactaccactaccaataccaacgacaacaacaataacgaacggggcaaagaagaagcagcaacgacaagcaaacggcaaactcaccatgcggcaaagtcgtcgctcagagacagacaaaagaagatggtggagtagaagagcgcctgcttttgatttgcgtgcacaattcgcgattgcgatttggatttgctatttcgtttgcctttgcctttgctggcattggcatgctcatatttctatgcactttgattgatgctgcgcgacgccgtgcggcaattttcttttttaggcgttcggcgttgttgggcgagaagtaaaacacatttttccatacgattcaatgcgatttcgaagcacgggcaacactcgactctcggccgcagtaggcactactcgcacgcacacatcggcggtgcacacgcatgcacacacacacacacaacagcaacagaacggcacacacacacacacgctcagtcgtacgcacacaaaggcagcgacacagagacaagcgcaacgagctctctcagtcgccgttgtcccactttccgtgtattggtttcgattcgtacacttttccacgcacttttaacgattcaaattcgatggtacagaaggcagggcgacacgagagtgcattggaaactggcgcaaacctcaaaaaaatatatccaacacgctggccgcacgcacgactcgtatgcagactggttctcggcgcgcgtcgaacgttcttatgcattcattattgaacggaatgctctgtttcgcctgtctgcttatgtttttttcttttcgattccgaggtactcgtcacgacaaatgaaaatcagtgtggccgttttgcggctgtcagctagatacccggctggcggggaatgtgctaagaaataccacaaaatcgacggggatagccgggatacaaaccagtcggtgcacttgactaccgctaaatgcgtctttactaaattgcatttttagcttttagcatgcaaattatgaactataacctaattaaaatacccattatggttattacttttgatcaatgtaatcatcggtcattcgcaatcacgcgctcacgtccattcattatttctttgcaatgtcatcctttttcaaagatatcaagcctattttcttcaaaattgtagacttttgcattttgcaccaacaaagcatgcgcaagcagttgtatttggcaaatcatgtttgatttcattcagactttgtgttttcgtacggcgggaagtttctctgaaaatttaaatttatgtacatatttacatcgacgctggaaaacaaatagcgcgcttgcgtttcaccaatttccagcggcatttgcgcggttctggccacactgttcggcacacaacataatcctggttgtcgccacttgttttcgatcattttagacttaaaccaatgcaaaaggaatttcctgctaacgttatcgataatcgcaatagacgccaaatcgccagttttacctcttcctttttcgcaggccccgttccgttcagcgaattctcgcccgagctaagtctattgcaagcgtccggctatagaaatcgacgacaaatcgctagttccacctcttccttttcgcaggccccattccgttcagcgaactctcgcccgatctaagcgtccggcgataggaatccacctcttccttttcgcaggtcccgttccgttcagcgagttctcgccgacactaagtgcattgcaagcgtccggcgacagttcttacccagatcttgtcaagttaacacgatgagtgctcaaccgagtccgcatatgaatcctcagcagcagc

SEQ ID NO: 40622 - DNA, 7155 bp, DROSOPHILA
tcgtgacgagtacctcggaatcgaaaagaaaaaaacataagcagacaggcgaaacagagcattccgttcaataatgaatgcataagaacgttcgacgcgcgccgagaaccagtctgcatacgagtcgtgcgtgcggccagcgtgttggatatatttttttgaggtttgcgccagtttccaatgcactctcgtgtcgccctgccttctgtaccatcgaatttgaatcgttaaaagtgcgtggaaaagtgtacgaatcgaaaccaatacacggaaagtgggacaacggcgactgagagagctcgttgcgcttgtctctgtgtcgctgcctttgtgtgcgtacgactgagcgtgtgtgtgtgtgtgccgttctgttgctgttgtgtgtgtgtgtgtgcatgcgtgtgcaccgccgatgtgtgcgtgcgagtagtgcctactgcggccgagagtcgagtgttgcccgtgcttcgaaatcgcattgaatcgtatggaaaaatgtgttttacttctcgcccaacaacgccgaacgcctaaaaaagaaaattgccgcacggcgtcgcgcagcatcaatcaaagtgcatagaaatatgagcatgccaatgccagcaaaggcaaaggcaaacgaaatagcaaatccaaatcgcaatcgcgaattgtgcacgcaaatcaaaagcaggcgctcttctactccaccatcttcttttgtctgtctctgagcgacgactttgccgcatggctggcggcccactggacaatcgaatatagcaatgaatgatttacgtcagcagcagatggtagcagcgacatcgtcatcaggatcggaatcgggaacagcggtagaatcggcagccgccacgtccacagcaggatcagccggagcagcaggtcgcccccagtctaactgtagcgctaatagcaacgccaagtcagtggcagcgagcagcacgagcgaggaggagcagcgagttagctccacgtcgtcgccagcccagcgggatcagcagctgaatgcagatcgggaccgggaacaggagccagagccacagcagcagcagcagcgggaggaggcactgcagcaccagcataatcagcccggccatataaccagcaccacagcgtcgcctccgccgacgctgccaccgccgacgacgccgtgcgacgatgccccaagcacaactggagcatctgcatcggccagctcagcatccggagaagcaccatcagcagcatcagcagcgggagcagcaggtggaccgatggccgctacggcgcttgaggtagagagcgaggagcgggatggacataagatcatcctgaagctctccaagcacgccaatcccaactcaaacgcaaatgaatctcagccgggcggagatgagaggcgcgtggagcccctgcgcattcagctgccctgcggcggagcggaaggaggcttggttgcgaagcagcaagatgccttcgatgcggacgcctcttcctgctcctcgtcgtgcgccgaggacgaggtggctaccaccctcggccaacaactacgaaacaccccgcacattgtgccaaagctgaccatccgcgccgcgaacgagaggcgcgtaggcagcgtggtgcctaagctgaccatcaagttgcctgagaatccggctgcttccggctccaactccaactctggatcgtgctcagcagctgtgagtggcgcccagtcagctatgcccgccaagaacgatgcccacctgtccagcctctcgcccgcatccgcctcgtcttcatctgcctcgtcctcctcctcatcgtcgtcgtcgtcctcactggcggagatgcagacggtgcccaagctgatgatcaagacaacgctagccggtagtagctgcatcagcagcagtgaggagcttccgcagcagcagcagcagataccaaagttaacaatcaagacaggtggcggcggtcaggagcacgtgcacacggtcataatgacgcacgacctaaacaacgcccagagcatccccaaactcaccattaaaaccaaatccatagagatgatcgaggacgaacaggcggctaagctggagcagcaattgcagccgctgcccaagctgaccatcaagaacttatgctcaccgaagcacaaggtgcgtgcagtgctcgaggagaagccaccaacggcggcctccaagctggctatcccaaaacccacgcccaatcccacgccggctcccatgacgaatggcggcgagtcgaacagcagtagtcaggaattctgcggcttctccgacccagacgcagatatagctgcgccagcctcggacgacgttcgccgcaattcggacgacatggtgatcgacgattcgctctccaaggagcacgatcccaagatttttcacaatctaccgcccatgcccgccagcaacggcatagccagcggtgggagtaaggccagtaaagccagcaagtctgcccaatcccagcacaacgttgtggacatggtggacctgacctcgtcaccgtcgccgggctcttcgccaacgcatgtgcctaacaacttcacgggacgcatttcgccgaaagggttgctcatcgactgcctgcggatgcaaactgcgatcggctgttatgtgcccgaggaggccgacagtcgcgttaggccagctgcgtcgcccaattcgaacatattgcttagccagctgacggcaccggctaaaagcttcacaacgaccacgcctaaaagcaaatccagcaagtatccccagctaacggagcgcctgatggcgaatggaagcggtaccggtgggggatctgttattgctgcagaaagcgaggcagtcgttggtcccttgcccgccgcgaatcccgcccaatccataatcgagtccattgaaatcctggacacgcctgatggcagcccgagggtagcctacatggacgaggattctaacccgatgctcaacaaacatctccaaactattcacaagctcgcaatggatcacggagtggaacagcgtatggatacccaggacaacaacaacgagaaccacttgaaacgcactaacagcgagggaaacgaatctcccagcagtagactccctcccagcaaacagcgacgtctggacaacgacgagaacgaccagcagacgcagaattgccacgatcccgccagaaagtgcagtgaatcactgcaggcgcttccgccgtcacatcgctcgcgcaagcagaagcacgagcgaatcctgaacacagatctggagggttcgctttttccacccacccaacagcagtcgatttcaacgccggatcaaaatggagccttgtcctcggaggtcgaaggcgaggacgcaaaggcgcaagatccgctagaaccggcgacgcctcagcccccaccggtagcgacgccggcaggaacgggcaagaagcgtgggcggccgaagcgtatccaaaaccagagctcgccggatggtggaggtgcagttactcccaaacccggcactccacaggaggaggccaacagcgctgtcaagtcgcgtcgcgtacaactgctgcgcaagcgactggccatcgacatggtgagcgtgggccaagagcaggcggacatgaaagctaaggaaaaggagtcgtctgtgggcgtgccaaatgcaagagttgaagacgggcttgccgaaactctggaatctccaaagactcgcgaccatcgccccctgagagccacgcgccgcaccacgaccagcacaaacaccaacctgcagcccacgcccaagtccacaaggaagcgccagagcaaggccagtgtccaacaaagccagttgccgccgccgacgatggctcagttcggtagttcggagtccgagtccaacaacaacaataatagcagcatatcctttgccctgagcgcgcagatcgacctcacaatgtgctcgtccagttcgtcgacctcctctggcgctgccgccaaccagcaggtgatcggtggaagtggcagcagctcgatgctacctccgacgacgattctgtcttcttcggatccgctgcccgatgtcatcttccagccaaatgacttctcctctatcatggccacccagcagctgcgctcctcgcgcccctcaagcatcagctgtggcagtaccggcggtagccagccggactgtcacgacgaggacaactacaccagcgcgctggacaattccggagacgaaactgcgttgcctatgccccccacgcggggacgtggtcgtggccggcgatccaggggaggccgcggtagaggatcttcttcggtggatcgggctgtcagcgtcggaggcacagcctccacaacgcccgccacgcagcctagggccccgcgaatgagccgaggagcaagtgccgtagcaaaggccatcgccatgagtcgaccacgatgcgtgggcggcctcaagcaccagcccgatcccgagagacttaaaggcttgttcagtccgtcgccgcaagtgtttgaggaggacacgcgtatgagcgccgatcttagcaacagcaatcagtcgatggccagcctgatggaacccccgctaacgccacagaagcaacccgacttcctcaacaacgaggagtcacagtcgtccatggtgagcaatgtgagcatgatggactccaaccagggtcagtccgccgacgcgattctgggttctgctctcaaacgtccaaagaagaagaagatggaaacttgcgtggccgaagacaccgactacagcgcctccagcatcgccgagtacgactggccaccgcctaaaggttgctgcccatcaaagaatcgggacaccttcatgattcaagagcaggtggcgctctatctgggcattaccagctttaagcgcaagtacccggatctgccacgccgatcggtcgacatggaggagcgcaattggctgcaggagaaggggctggttagcgagaagttgtgcgacctgggcatcaccgctgtgtgggcctccgacatattggacatcatgtacgcggactttttcgacaagtacgaagagtacaaggagtacattcgcagaaagcatttgcgcgagatcgaggctaagcagaaggccctaggactcacagtcggggccggacgaggtctgcaagctcgcgaccgtgccatgctttcggccaccaagtggaacgcttacttcaacaagtcccgtaaggatgagcgccagtcctgcatggacctgcagaccttcacgataaatcagccgcagccaaggaccgcgcccacctgtacacgcctagagcgctccacttcggatttgatacgggcagtggcagaagaggcgaatatcccggcaccgcctaatctcctgccaccccgcgactatgacgaggccttccgcaactcagactacgcttatccactcacggtggtaccggaccagttctcaatggcctaccgccagtttgagcccgccgagctcagagcctacccactggacacggcgctggacaagccgccgaccgatctgatggctcagctgctacaggcaaaatccgaagctgtaggcagcgatgaaatcaaaacgtccgccccggcccccaaggatctggggcaagagcagtccgccatcaaatccgtaacggtaacggcgcccgtccgacgcagcagaaggtccacacgccagcagacggacaaggttcgcacggctagcagctccagcacgtcctccgctcaatcggtctcatccgcgtccagcggcaacgggagcagcagtgatacggaaagcggcgatgaaagcgactttagcagcacatcgagctgcagcagttcgacgggtgcctcaagtggagcaggcagcgaggacgaggatgggaacgagtgctcatcgtcggtcaggctgtccacctgcggcgtctgtctgcgcagtcagcatcgcaatgctagggacatgccggaggctttcatccgctgttacacatgccgaaagcgcgtccatcccagctgcgttgatatgccaccgcgcatggtgggtcgcgtgaggaactacaattggcagtgcgccgggtgcaaatgctgcatcaagtgccgtagcagccaacgtccaggaaagatgctctattgcgagcagtgcgaccgaggctaccacatctactgcttgggcctcaggacagtcccagatgggcgctggagctgtgagcgctgctgtttctgcatgcgatgcggggccaccaagccggagggtctgccccaggtggccgctctgtcccaggcgtccggaggaccgtcggccaacggggatcgctcaaaggcagcgcgcaataagcgcttgaaatgggtgcacgagtaccgcatcgatcatgtgacgaagatccgggagcacgccgccatgttctgcgtaccatgtgcgcgaaacaagcccgccaagcggcagtcggcggcgggtgcggccggtgcggcagcagttactcctgtcttggaggccacttccgcgcaaacggatgacagtccgatgcccagtcccggcctgacaaccaacggaggacgcgccctttcgccaacggcggcactgagtccaaaggcagctgtgcccgtggcatcgctgccgcccgttcttgaagcgacgacggtgaccacaaatattgcgggaacgataggcagacggcaggcgggtaatgctgtcaatattacaacgatgcagtgcagcagcagcagcagcagcaacttcagcgggaacggagtcaccgaggacgcggcgaatgtcactgcaacgggaacggctacggcggccgcaggagcacccgctgccactccaataggcatagctccgccgcccgttgttgcctgagtgggggtcatacgttattgtgccaagcgtactctaacggacttatagtaagcgccggacgcgccgccccttttaccaagccgcctccaaagtggtcgtaaccacagagcacagccgccatcccaaaaaaagaaaataagaaaaaaaaaaccacacacagatgcatagtattaatgaatgcgacaaggggaagagaatggattaagagtggagagagtatttaaggttttttttttactacgattattctttatttgtcagtactgcattgtattgattgtgttttatacatatatacatataaatattcctattatagttatgttacttaactttgctaatgttaacaaccaaacgaccgcataaa

SEQ ID NO: 40623 - protein, 2006 aa, DROSOPHILA
MNDLRQQQMVAATSSSGSESGTAVESAAATSTAGSAGAAGRPQSNCSANSNAKSVAASSTSEEEQRVSSTSSPAQRDQQLNADRDREQEPEPQQQQQREEALQHQHNQPGHITSTTASPPPTLPPPTTPCDDAPSTTGASASASSASGEAPSAASAAGAAGGPMAATALEVESEERDGHKIILKLSKHANPNSNANESQPGGDERRVEPLRIQLPCGGAEGGLVAKQQDAFDADASSCSSSCAEDEVATTLGQQLRNTPHIVPKLTIRAANERRVGSVVPKLTIKLPENPAASGSNSNSGSCSAAVSGAQSAMPAKNDAHLSSLSPASASSSSASSSSSSSSSSSLAEMQTVPKLMIKTTLAGSSCISSSEELPQQQQQIPKLTIKTGGGGQEHVHTVIMTHDLNNAQSIPKLTIKTKSIEMIEDEQAAKLEQQLQPLPKLTIKNLCSPKHKVRAVLEEKPPTAASKLAIPKPTPNPTPAPMTNGGESNSSSQEFCGFSDPDADIAAPASDDVRRNSDDMVIDDSLSKEHDPKIFHNLPPMPASNGIASGGSKASKASKSAQSQHNVVDMVDLTSSPSPGSSPTHVPNNFTGRISPKGLLIDCLRMQTAIGCYVPEEADSRVRPAASPNSNILLSQLTAPAKSFTTTTPKSKSSKYPQLTERLMANGSGTGGGSVIAAESEAVVGPLPAANPAQSIIESIEILDTPDGSPRVAYMDEDSNPMLNKHLQTIHKLAMDHGVEQRMDTQDNNNENHLKRTNSEGNESPSSRLPPSKQRRLDNDENDQQTQNCHDPARKCSESLQALPPSHRSRKQKHERILNTDLEGSLFPPTQQQSISTPDQNGALSSEVEGEDAKAQDPLEPATPQPPPVATPAGTGKKRGRPKRIQNQSSPDGGGAVTPKPGTPQEEANSAVKSRRVQLLRKRLAIDMVSVGQEQADMKAKEKESSVGVPNARVEDGLAETLESPKTRDHRPLRATRRTTTSTNTNLQPTPKSTRKRQSKASVQQSQLPPPTMAQFGSSESESNNNNNSSISFALSAQIDLTMCSSSSSTSSGAAANQQVIGGSGSSSMLPPTTILSSSDPLPDVIFQPNDFSSIMATQQLRSSRPSSISCGSTGGSQPDCHDEDNYTSALDNSGDETALPMPPTRGRGRGRRSRGGRGRGSSSVDRAVSVGGTASTTPATQPRAPRMSRGASAVAKAIAMSRPRCVGGLKHQPDPERLKGLFSPSPQVFEEDTRMSADLSNSNQSMASLMEPPLTPQKQPDFLNNEESQSSMVSNVSMMDSNQGQSADAILGSALKRPKKKKMETCVAEDTDYSASSIAEYDWPPPKGCCPSKNRDTFMIQEQVALYLGITSFKRKYPDLPRRSVDMEERNWLQEKGLVSEKLCDLGITAVWASDILDIMYADFFDKYEEYKEYIRRKHLREIEAKQKALGLTVGAGRGLQARDRAMLSATKWNAYFNKSRKDERQSCMDLQTFTINQPQPRTAPTCTRLERSTSDLIRAVAEEANIPAPPNLLPPRDYDEAFRNSDYAYPLTVVPDQFSMAYRQFEPAELRAYPLDTALDKPPTDLMAQLLQAKSEAVGSDEIKTSAPAPKDLGQEQSAIKSVTVTAPVRRSRRSTRQQTDKVRTASSSSTSSAQSVSSASSGNGSSSDTESGDESDFSSTSSCSSSTGASSGAGSEDEDGNECSSSVRLSTCGVCLRSQHRNARDMPEAFIRCYTCRKRVHPSCVDMPPRMVGRVRNYNWQCAGCKCCIKCRSSQRPGKMLYCEQCDRGYHIYCLGLRTVPDGRWSCERCCFCMRCGATKPEGLPQVAALSQASGGPSANGDRSKAARNKRLKWVHEYRIDHVTKIREHAAMFCVPCARNKPAKRQSAAGAAGAAAVTPVLEATSAQTDDSPMPSPGLTTNGGRALSPTAALSPKAAVPVASLPPVLEATTVTTNIAGTIGRRQAGNAVNITTMQCSSSSSSNFSGNGVTEDAANVTATGTATAAAGAPAATPIGIAPPPVVA

SEQ ID NO: 40624 - DNA, 3845 bp, DROSOPHILA
agtcgccatccgaatcagagggcagcgatgagcacaccctatgccacgaacggcggccttccgtcgagggcgagtgtgcccaatagccggaacatctacgatggggtgcacaagtcgtggggatcggcggacaatataccgcatcgatcggaggacctaatgccgccgcccaaggcggtggagtatatcagcaagcggaataagtcctcgaagcgttcgtcctatgcatcgaataccaccgattcgccgcgtgattccatctgctcctcgaactccagctcgaatctgaatggtggctatagcagcatgcctacgaccccgaatcagttgcgtgctcccaaggggatcgccgcatccttcgccgtggactccgactcggactccgcctgcggattcgactcaacctggtcggtcaattgtcgcggttcctcgagcagcaatccttcgcaatcctaattacctgaatattgttgttagcacagtctacataccaccatacaacttttaacattgaccatggaatcgtgaaagtatttgtttttcaattaactaatatatatactttaagcattgaccattatttagacgttacattttcttgtgtttgtatctaaaagtttgtatcttaaaagtatccaacatttgttatttcctattttgtgcccttttctagggacatccaatataatgtttcatttaatatgtgtattttttaatcgaaaataaagcttgtatgctttttaatgcatttatgaattaattgtattgatattttatttgttattactcataatacaaatttacccgaatttatttttaaatatccaaatctcaatattttgagcaaaaaattcagaatttaaattttttcgttgcgcgcgcacttttcaaaaataaccgttaagacatttctcataataccgtcgaaaatactgaaaatatggtaaactagaagacagctcttcctcttctcttatttataaacgctacacgtgcggcaaaaaaagtttgttgatttaaatttttgagctgaaataaaacacttgacatgggcaaaaaggacaaaaacaagaagaagggcaaaggggccgagaaaacggccatgaaaacggacaaaaagcaggcggcgcggcagaagaaaatgctggaaaaactgggagaagtacgaacaaaaaaatgcaataaccataacattatgtttactaaacgaataataaacttcacaggcaaatatagctgatatcatccaattgctggaggccaaggagggcaagattgaagccatcagtgaatccgtttgcccgccaccaactccacgatccaatttcaccttagtttgccatccggaaaaggaggagctcatcatgtttggcggcgaactgtacactggcacaaaaaccacagtgtataacgatttgttcttttacaacaccaaaaccgtcgagtggaggcagctgaaatcgccatcgggacccacgcccagaagtggacaccaaatggtggctgtggccagcaatggaggagaactctgggtaagttatcagctaaagagatctccgtgaaaagttaattaccatatgcactctacagatgtttggtggcgagcatgccagtccctcacagctgcagttccatcactacaaggatctctggaagttcgcactgaaatcccgcaaatgggagaggatagctgcgcccaatggaccaagtcctcggagcggacatcgaatgaccgtctccaagaaacgcctgttcatcttcggtggctttcacgacaacaatcagtcgtatcattacttcaatgatgttcacatcttctctttggaatcctatcagtggcttaaagcggagataggaggtgcaattgtgccatctccacgttccggttgctgtattgcagcttctccggagggaaagatctacgtgtggggcggttactcgagggccgccatgaagaaggaggcggacagaggagtaacacacacggatatgtttgtcttgagtcaagatagtaagatttagaatctctgatttatattacttatattaatatctcctgtttccgttcagaaaacgccggcgatgcagacaacaagtacaagtgggcacccgtgaaaccaggtggatataagcccaagccgcgtagcagcgtcggctgcactgtggctgcgaatggcaaggcctataccttcggtggcgttatggacgtcgatgaggacgacgaagatgtgcacggacagttcggcgatgatctcctggccttcgatttgacctcccaaacatggagattgcaggagatccaaactaaaagcagcagcgctgagaaaaaggattcggaggagagcaaagatgtggagatgtcggctgttgataagccagtgaccaccaccacggatggcattttcacggtcaccgttggcggtcccagtaccagtaccacgccattcgtgtccaaaatacccagcctattcgccaaacccaagccgacgaatgtgccatctccgcgcatgaatcccggcatgtgcgtgtgcaagggaacgctgtatattttcggtggcatcttcgaagaggacgacaagcagttgacctacaacgatttctacgccctggacttgcacaaactggaatggaaggtgctaatccccaatagcttgaagggccacgaatgggaggatagcgacagcagcagctccgacgaggagtgcagtggcagcgaggaggatatctccagcagcagctcggacatggacacggattaagaatttccagtgactatatattaaatttggttaacaattgtacacatgtataaaaatggaatattttcaactgctgagtaagctcgaaattctcacagctccagaatctcggtgagaatgcgttgcgtatccttgggagtatataccctatggctgatggttcgaggatcgctatagatctcatagtcattgccgcccggctccgttttatcgccaaagaagtggatttccttgaacttgtagtgcgcttcgatgtgtcgcaggcagtaggtcttgtcccaaccatgcgggaagacatcgaagctgatctgaccaccaatcgagtacgtgagatccacatcggcaaactcctgcttcaggtccttgatcattttctcgcgcaccttgtgctcaatgtcgtactcggcgaacatgttgcgctcctcccgagtgcactgcctgccaatgggacaaacgttcatcatgccattccggaattcgataaaggtgcccctcttgatgggcacatccagttcggacagatagcgcagcacaaagttgatgaaacgcttcaccgtctcctcgcccaaatgcatgatgatattctgctttcccacctcctttccgccctcaatctgcaccagcccattttccgggaatatgaagtcgaactcgttgagtatcttcctgccattcagctgctcgaacatcttctccagatccgagcctccgacgattccgatggtcgccctcggcttaacccgcgagtagaagaactcctcgaactccggagtgaccacggatctgggcatcgttaacgtgccgtccacgtcgaagagcagcaggatttcatcacgcttcaatgcggcggtggtcattttgcatttaaattttgtggtaaatcagcaggtgtttaatatccagatatttatgtccacgtatgattcgagataaagaattttacaagcggcaacgcagtggtgagaaatcccctaaagctttcgatgcaccggcaaggggaaccagttccggaatccaagtgcaatcaaaattaatgttttgaattgccttttacgttaggtttactatttaaaacaatgagagtat

SEQ ID NO: 40625 - DNA, 1664 bp, DROSOPHILA
aaaaaagtttgttgatttaaatttttgagctgaaataaaacacttgacatgggcaaaaaggacaaaaacaagaagaagggcaaaggggccgagaaaacggccatgaaaacggacaaaaagcaggcggcgcggcagaagaaaatgctggaaaaactgggagaagcaaatatagctgatatcatccaattgctggaggccaaggagggcaagattgaagccatcagtgaatccgtttgcccgccaccaactccacgatccaatttcaccttagtttgccatccggaaaaggaggagctcatcatgtttggcggcgaactgtacactggcacaaaaaccacagtgtataacgatttgttcttttacaacaccaaaaccgtcgagtggaggcagctgaaatcgccatcgggacccacgcccagaagtggacaccaaatggtggctgtggccagcaatggaggagaactctggatgtttggtggcgagcatgccagtccctcacagctgcagttccatcactacaaggatctctggaagttcgcactgaaatcccgcaaatgggagaggatagctgcgcccaatggaccaagtcctcggagcggacatcgaatgaccgtctccaagaaacgcctgttcatcttcggtggctttcacgacaacaatcagtcgtatcattacttcaatgatgttcacatcttctctttggaatcctatcagtggcttaaagcggagataggaggtgcaattgtgccatctccacgttccggttgctgtattgcagcttctccggagggaaagatctacgtgtggggcggttactcgagggccgccatgaagaaggaggcggacagaggagtaacacacacggatatgtttgtcttgagtcaagataaaaacgccggcgatgcagacaacaagtacaagtgggcacccgtgaaaccaggtggatataagcccaagccgcgtagcagcgtcggctgcactgtggctgcgaatggcaaggcctataccttcggtggcgttatggacgtcgatgaggacgacgaagatgtgcacggacagttcggcgatgatctcctggccttcgatttgacctcccaaacatggagattgcaggagatccaaactaaaagcagcagcgctgagaaaaaggattcggaggagagcaaagatgtggagatgtcggctgttgataagccagtgaccaccaccacggatggcattttcacggtcaccgttggcggtcccagtaccagtaccacgccattcgtgtccaaaatacccagcctattcgccaaacccaagccgacgaatgtgccatctccgcgcatgaatcccggcatgtgcgtgtgcaagggaacgctgtatattttcggtggcatcttcgaagaggacgacaagcagttgacctacaacgatttctacgccctggacttgcacaaactggaatggaaggtgctaatccccaatagcttgaagggccacgaatgggaggatagcgacagcagcagctccgacgaggagtgcagtggcagcgaggaggatatctccagcagcagctcggacatggacacggattaagaatttccagtgactatatattaaatttggttaacaattgtacacatgtataaaaatggaatattttcaactgctgagtaagctcg

SEQ ID NO: 40626 - protein, 509 aa, DROSOPHILA
MGKKDKNKKKGKGAEKTAMKTDKKQAARQKKMLEKLGEANIADIIQLLEAKEGKIEAISESVCPPPTPRSNFTLVCHPEKEELIMFGGELYTGTKTTVYNDLFFYNTKTVEWRQLKSPSGPTPRSGHQMVAVASNGGELWMFGGEHASPSQLQFHHYKDLWKFALKSRKWERIAAPNGPSPRSGHRMTVSKKRLFIFGGFHDNNQSYHYFNDVHIFSLESYQWLKAEIGGAIVPSPRSGCCIAASPEGKIYVWGGYSRAAMKKEADRGVTHTDMFVLSQDKNAGDADNKYKWAPVKPGGYKPKPRSSVGCTVAANGKAYTFGGVMDVDEDDEDVHGQFGDDLLAFDLTSQTWRLQEIQTKSSSAEKKDSEESKDVEMSAVDKPVTTTTDGIFTVTVGGPSTSTTPFVSKIPSLFAKPKPTNVPSPRMNPGMCVCKGTLYIFGGIFEEDDKQLTYNDFYALDLHKLEWKVLIPNSLKGHEWEDSDSSSSDEECSGSEEDISSSSSDMDTD

SEQ ID NO: 40627 - DNA, 3052 bp, DROSOPHILA
cttgtgtacaccaaattggaacaatgatcaaaaacagcgaagcttcatttccggttattcctatgacagatacatgatatagcggcccgattttaaacgttctcacttaaatactacaatcaataaaaaaaatataattctcgaaaattttaatgcagacagccttaaaacgatgatacctgtttacgtagaaacgttcggatggacagacagacataactatatggactccactgtttttatgggttaataatataactatagactataggaaatgtgaatgaaatcaatatacctgctagcgtattttatttatttccaaatgcagttataagagttgatgttgcagttgccttccaaagtttaacgtttttttataattatactgtttttgaaaatatgtgttcaaaacctgttttttgatttcaaacattttagttttaagtaaagatctaacaatttttatcattaatacaacaagtgtatgtgtttggtggatttcgcacttaccgacaaatttaatgtttgtacactttcgtttcacgaccacagcaccgccgaatttttgaatgagtacctcaaattaaaaaaccaatttcactttatgacacttatcaaacgctttacgcaacataaagcagccggacactaaataattctcgtccagagtgcaaaataaatcgcatgcgaaatagtctatactgcaattcacctggaatcgcagaagcatcctggaaactggccaacaatcagctgattctgagggcgggaaatttaagtgacgagttcataaggatattaatttattatattgttgtaaatgtattcttttctttacttggcaaaacaaatacattagttattttcgggaagattcttatgccaatcaatttataattactacatttttgagataaatgtatttttttcttattacactttcgaggttgtttaacttttatgttcataaaatagctgccatattggaaagtttatttgtttagcgtcctgcagttgttactttgctgggaagaggacctgtcgaacgtttaaggactattttgaagttctcactaaccgtgtagtcctctttaaatacaacaatcagattaagttcaaactctgaaaggaagaaattgaatgtataatgccacgcgtaataataaataaccaatacaatgctcaccgattttgaagttcttcgtgagcaacgtagggcaggtgaacaatctgggcaggaccatatggatgggtagttctagcttcggcagtacattgccgtcggctatttgaatggtctggatttcggtggcatccttggagtacccctcgtcgcaaccgcaggtttccacacgaaccaattgcatctcaatggacttaatggccgcctccgtgtgttgcaccgtaatgctgccagtaatcggagttgttacgcagaattcactccggtccaggcgcccagttataaggaatctcggcatggaaagtctctccttggcgctggcattcttctgcagtgagtccggactcaaactaaaaggaaccactttctttgaatcctcgcttagaggcaccggtttgtattgcacgcagaactgctggattttggtcgtggctttgccaagaaaattcctttttacagtgcaagtgagttggtaattcacgttaatgaatactccgtggtatgtttcatatagaattcgcggttcctttttgcacaccaaaggcagttcgaaatggaactccgaacggccggcgctcagttttccgggcgcagataactccaggctattctgcagcagattaataggtttcaccgagttatagaaagcatcgaaaagcccaacggtcttagcactaagttgcagattaacgattccctccagatacaatataattccttcgtgttttgtctcctgggcgcactgaaactgcacgcagcccaacagcatgtcctgcggaatatatatttcggtaaaataagaccttaagtaatcgttaattacttacattttcatggtaaaccttattctctctctttaattttatatcgaagagcagtgaactcattttaatcagcaaatgaaaacaagtataacagctgatgtattctacggcgatctggcatcccgggcaccagctgtccatcaagtgggcagtcccaaaacttaggaaacgaaaacaatcccgtttttacataagtttaatttaaacattttcattcaataaaacaaatgcctcgcaatcaaaacgcagagcaggataatccctgcctaaaggtttgtttgctttaagaaatgtaataaataattaattatatctttacaaataggaacaggagctttcatttaaatgcctcaacaaaaacaactttgatcgcgacaagtgcgaaatatattttgccaattataacaattgcaaggagttctgggtgggttcttcaattaaagtgattgttttatggactacatttttatttcccaacagaacaaagtaaaaaccgaaaggagagccaagggaatagctccttatttgccgcccttagaagaacgcgatgggattaaagcagaatatatgaaaggaaaaccccaacaaagctgataaatgtatcttcctatttaattattttgtgtatataaattagctatacatcaggcaccaaagcttgcacaagcatgcattagacctccttgttgtctaaaaggctccatcaaatctgaagatctagatatttttgttatgaataacatttgtatttaactaaacttaaaatgcacatagttcacttatttagccttagctgtgaatagcgtcggcgccaacaatttttaaagcgggcatggcctcctctaacatgaccgtggacaattccagttctagggtctcctttggatcattcaaaatcagtaatttaagtttaggaaaacgatacagacaggccaatccattgctggtgatttgagtgcacgagaggtcgagcacttccaggttagggaagccacctcccgaaatcctatccagacaccagtcatcaaagcttttcacattgtga

SEQ ID NO: 40628 - DNA, 930 bp, DROSOPHILA
gatataaaattaaagagagagaataaggtttaccatgaaaatatgctgttgggctgcgtgcagtttcagtgcgcccaggagacaaaacacgaaggaattatattgtatctggagggaatcgttaatctgcaacttagtgctaagaccgttgggcttttcgatgctttctataactcggtgaaacctattaatctgctgcagaatagcctggagttatctgcgcccggaaaactgagcgccggccgttcggagttccatttcgaactgcctttggtgtgcaaaaaggaaccgcgaattctatatgaaacataccacggagtattcattaacgtgaattaccaactcacttgcactgtaaaaaggaattttcttggcaaagccacgaccaaaatccagcagttctgcgtgcaatacaaaccggtgcctctaagcgaggattcaaagaaagtggttccttttagtttgagtccggactcactgcagaagaatgccagcgccaaggagagactttccatgccgagattccttataactgggcgcctggaccggagtgaattctgcgtaacaactccgattactggcagcattacggtgcaacacacggaggcggccattaagtccattgagatgcaattggttcgtgtggaaacctgcggttgcgacgaggggtactccaaggatgccaccgaaatccagaccattcaaatagccgacggcaatgtactgccgaagctagaactacccatccatatggtcctgcccagattgttcacctgccctacgttgctcacgaagaacttcaaaatcgagtttgaacttaatctgattgttgtatttaaagaggactacacggttagtgagaacttcaaaatagtccttaaacgttcgacaggtcctcttcccagcaaagtaacaactgcaggacgctaa

SEQ ID NO: 40629 - protein, 295 aa, DROSOPHILA
MLLGCVQFQCAQETKHEGIILYLEGIVNLQLSAKTVGLFDAFYNSVKPINLLQNSLELSAPGKLSAGRSEFHFELPLVCKKEPRILYETYHGVFINVNYQLTCTVKRNFLGKATTKIQQFCVQYKPVPLSEDSKKVVPFSLSPDSLQKNASAKERLSMPRFLITGRLDRSEFCVTTPITGSITVQHTEAAIKSIEMQLVRVETCGCDEGYSKDATEIQTIQIADGNVLPKLELPIHMVLPRLFTCPTLLTKNFKIEFELNLIVVFKEDYTVSENFKIVLKRSTGPLPSKVTTAGR

SEQ ID NO: 40630 - DNA, 3767 bp, DROSOPHILA
catttaataattttttaatttttatcaaacactacttttgattaataatctgaattcccaaaaaaattgtgtcaaatggtaactttttctaaattccacttgacaaaatatttttgtaatttgagcttatttctaatacctaagtaatttttctgagtacatccatgcagcatgcaatacatgaattatgcggcaattaattaatgaggaatattgaaagctacccacccaacccaaaccaacccaatccccatataaccaccaaaagcgaccaccatcatcttgactcgacccattccgtaggcattgtgcgcctcagggagagagccatatattggtgacccaaattattcaattcatttttatttatttttaattttttgatttgttgcaataattccccgcccctttacagcgagccagagagagcaaaggggtctgcttgtttgtgtaactatttattctaatttgacccgcttattgaggggcccgcccttctgcgccccactcaccccgttggccattaattgatgcagccgcttaaatgatgaatcactttttcattaaaatttgactttgagtgtgacccccatgtgactggcgttgacttttatgtggttaatagttagctttcctattgatggatattccgcaattgtcgcttgtggaaatctagccatgtgtctctttgtttttcttttctttgtctacatttgcaagtacaatgaaccagaatcggtggcttcttcaaacatcaaactcgtgctgtacaagctgacccataaagcacagcataaaaccgataaaagaaaaagtgcacggtacaagaaaaagaatgctgagaatcagaaagcggttgaagatagcacacctgccacctgagaccgaaacgtgaacgtgggcggcaatgtaaagtgtatttaagctggggtgaaggccatcaaatggcagttaaacttttagttcttttataagaacaagcattaagtgcggtctgaaaatgtttcttccaattgcaactcttttgttgatctttacgggggctgcttttgcagcagatcccttcaatcaagtggaggaatttgtggactttgaggatattgacgaagtggccaatactgaatccgaaggagttactgatgttccaatcattacagccacgccaatttcaatccccacaagttctacgaagactggattaacccgtgaatataccgcagacggattaacaacaacgacttccacaacactggcctcaatatctactcactcttcaacgacagctacaacaacaactgattccagcacatctcattcaaagactaatgattccaccacagatgaatctaccacaaccgattttgcgaccctgtcttcaaccacagctcaagcttcaacgagaattttaaaaacaactgtttccactacatcttcaacgacaacaacatccacaacttctccatcgacaagtgactccaccacaaataattctacaactactgaaaccacaactgttccgacaacatcagcttcaacaacagattccagactaacttctttatcaacaactgattctaccacaagcgattctacgactaacgaaattacgacatcgggttccaccaaaaaggatgaaacttccacaactacttcaaccacagccgattctatcacctcctcaccaaacacatctgatttcaccacaacagaatctataaccgagtcttccacgactacaaggagcacatcaattgagaccagcacctcgtcttcaccaacaacagtttccacaacaattggttcaacaacaaataacacaacaacttcggtatcaacggaagattcgccaactaccacaactgaatccactacaaccactgaacaaccatcagaagaagaaataattcttgcactcctggctgaaaatgcaggagccctagatcggtttaatactcagcttgatgctgtcagcgcaattaactggaaaatagacgctgagctggacaaccaggcagagtaccttgatgcaatcgaagtcaccgaggaacttctccgaaaccagacacaggaacttctgctttgggaagtggaacttcttcgaggcgttgtcacctcttttcagaacttagacatttttgccaaccgatcaatcgaagccgtatcagatttaactaggctccaagagcagaataaagatcgtgtaaggaacctcgtagataaacttaacgttacccaaggacaaattctgcgcagaacaaaaggattggatgacagactcaactttgtaaatcaacttctccttggatatatcgagccaaaagtaaatagcttagaggattcgtttgacaatctgaacaaatcgcaaattaattctctaattgaactaaagaacgttcccgaggttagaaatctaacgaaaacttccatcagaaaactgtcattcttagataaccaattggctttgttcaaccagacccaggaaaatagatattactccgtagaagctgtcatcaaagcctggacccccactaatctcaaagagatcaatgatctaactcacgctttaagcatttctcaaaagcgcaccgacttggcaattgccattagcggatctgcggagtataatactgaaacctatccgacccgttttataagctataagggcatagaagatatcaaccaaagtaggaaaactagaaccccacagatcttaggtgctgaagataacgcattggagtcatcgtggaatgttgtggcaccagcataaataaacttgaaacgaaaaccgaatggaacctgaaacaatttaagtttattttattttacattattttattaatagtaatttgaaattctttaaaattggagcaatgtatcaatttcgtctgaaataaaaagattttaaagtgcaacggttgtataaatgcattccctgctacggtttttatgttctcgagctcaaattgttcatggcaaatatgcggactattttggctggctatcaatttacagacaagggaacaccgtgaagctgctgagcgaaactgataccacggatgcaccgagatgtcggggaccccagaacgaatcccagaccaaaactaagccgagaactacaaatgtctttcaggaaggctgagaggatggcgcgaaacaaaagtcaaaacaagcgcaacatgaatgaaccttttaacatacttgtagttactaattccaggtgacaggcgacacaatgagtcgaagtggatttttcatttgtggccattgttgggccctcacgggtatcgggattcggcattcggaattggagggccggaggaggttactggccaacgagcagcccataaacagaggacacaacaaagttgttacaacaacagcatcgcccggtcacaaaagtgaccaaaatcagaggctaccaaagtagtaacagatgctcgatgtgatcggatgcgatgcgaaggtgttggcattggcctttcgaggacccgcaattgggagtcccgcatatctctctgggcacacgacatatccttttccctttcggttcctccgacttcggactatctttcattcttctttatttcgactttttccttcttttttttttttttgtttttggcacaagtcgggcaataaattatcggatacaaaatcgagtccaagccgaagtcaaaacaaaggcataaacactcgacggacgacagagatggcagccaggcacgcactcgaccaattgacgacacaaaagagcaaaacaaagacca

SEQ ID NO: 40631 - DNA, 1767 bp, DROSOPHILA
atgtttcttccaattgcaactcttttgttgatctttacgggggctgcttttgcagcagatcccttcaatcaagtggaggaatttgtggactttgaggatattgacgaagtggccaatactgaatccgaaggagttactgatgttccaatcattacagccacgccaatttcaatccccacaagttctacgaagactggattaacccgtgaatataccgcagacggattaacaacaacgacttccacaacactggcctcaatatctactcactcttcaacgacagctacaacaacaactgattccagcacatctcattcaaagactaatgattccaccacagatgaatctaccacaaccgattttgcgaccctgtcttcaaccacagctcaagcttcaacgagaattttaaaaacaactgtttccactacatcttcaacgacaacaacatccacaacttctccatcgacaagtgactccaccacaaataattctacaactactgaaaccacaactgttccgacaacatcagcttcaacaacagattccagactaacttctttatcaacaactgattctaccacaagcgattctacgactaacgaaattacgacatcgggttccaccaaaaaggatgaaacttccacaactacttcaaccacagccgattctatcacctcctcaccaaacacatctgatttcaccacaacagaatctataaccgagtcttccacgactacaaggagcacatcaattgagaccagcacctcgtcttcaccaacaacagtttccacaacaattggttcaacaacaaataacacaacaacttcggtatcaacggaagattcgccaactaccacaactgaatccactacaaccactgaacaaccatcagaagaagaaataattcttgcactcctggctgaaaatgcaggagccctagatcggtttaatactcagcttgatgctgtcagcgcaattaactggaaaatagacgctgagctggacaaccaggcagagtaccttgatgcaatcgaagtcaccgaggaacttctccgaaaccagacacaggaacttctgctttgggaagtggaacttcttcgaggcgttgtcacctcttttcagaacttagacatttttgccaaccgatcaatcgaagccgtatcagatttaactaggctccaagagcagaataaagatcgtgtaaggaacctcgtagataaacttaacgttacccaaggacaaattctgcgcagaacaaaaggattggatgacagactcaactttgtaaatcaacttctccttggatatatcgagccaaaagtaaatagcttagaggattcgtttgacaatctgaacaaatcgcaaattaattctctaattgaactaaagaacgttcccgaggttagaaatctaacgaaaacttccatcagaaaactgtcattcttagataaccaattggctttgttcaaccagacccaggaaaatagatattactccgtagaagctgtcatcaaagcctggacccccactaatctcaaagagatcaatgatctaactcacgctttaagcatttctcaaaagcgcaccgacttggcaattgccattagcggatctgcggagtataatactgaaacctatccgacccgttttataagctataagggcatagaagatatcaaccaaagtaggaaaactagaaccccacagatcttaggtgctgaagataacgcattggagtcatcgtggaatgttgtggcaccagcataa

SEQ ID NO: 40632 - protein, 588 aa, DROSOPHILA
MFLPIATLLLIFTGAAFAADPFNQVEEFVDFEDIDEVANTESEGVTDVPIITATPISIPTSSTKTGLTREYTADGLTTTTSTTLASISTHSSTTATTTTDSSTSHSKTNDSTTDESTTTDFATLSSTTAQASTRILKTTVSTTSSTTTTSTTSPSTSDSTTNNSTTTETTTVPTTSASTTDSRLTSLSTTDSTTSDSTTNEITTSGSTKKDETSTTTSTTADSITSSPNTSDFTTTESITESSTTTRSTSIETSTSSSPTTVSTTIGSTTNNTTTSVSTEDSPTTTTESTTTTEQPSEEEIILALLAENAGALDRFNTQLDAVSAINWKIDAELDNQAEYLDAIEVTEELLRNQTQELLLWEVELLRGVVTSFQNLDIFANRSIEAVSDLTRLQEQNKDRVRNLVDKLNVTQGQILRRTKGLDDRLNFVNQLLLGYIEPKVNSLEDSFDNLNKSQINSLIELKNVPEVRNLTKTSIRKLSFLDNQLALFNQTQENRYYSVEAVIKAWTPTNLKEINDLTHALSISQKRTDLAIAISGSAEYNTETYPTRFISYKGIEDINQSRKTRTPQILGAEDNALESSWNVVAPA

SEQ ID NO: 40633 - DNA, 4882 bp, DROSOPHILA
cgatcggccgctgtctatgaagaactgaaaagcgtccagacccatcttgccgcggaacctattcggacgaccgcgcaggaataggctgtggcccctcgagatgcgcgtgggatcaatgtactccatggagacctgcagcagccgcatcatgctcacggcaatgctcttgtaggcctcggacgaggccagcgaactggcttcactgtacaggctgctgatcacgcgtccattgaagggttttttggtgatgctggcctccagggagccggtgccatcatcgatcatgaacttcatgaacgactcgttgtgcgttccattgccagttacaaaggcgtagatgatgcaggtgcagaagtgaatcggatgcacgtcgtctgtgatgaacacattctcgttctccggatcctgagttgcgcgctcaatctgggatatggtcagcggcacgttgtcgtggacctccggaccacatttgcccgtggacttttcactctgttgattcttgcgtatcacgaagttatccagctggctttctatgtcctcgaaactctgattaaaatccattctatttgcttagtctgcgatttcaaaggggatttctttattgcagtgcattttgcattagcgccaaaaaaaaaaacagttgtgagcatgggcgtagacttcgtattttcttacaaataatattaattaaaattaattttgtgagcaattttcacacaattgtattataagttaaaaccagggtcacattaatttgcagaaccgcgcaatattttctttttaacccccttacaaattttcagttgttttgactacgcccctgctaatttttacttattaaattcaaagtctaaaaacattgtcaccagataatacgagtatacactatatggacaaacgtaaaatcgttaatagaatatatatattcaaccattatttcaccaccgagagaaattcatttgcacaaaacgccaggttggcagcaccatcattgcgcacagcaagtgggcaaactcgttgtatcgcttgtgaaatttaaggaaaagtacactttgttcaaaactaacgaagagaatcgcaatatctgccgatcttggaatgtctggtggtccatccataacgataaaaagccaaccaatcgatggtaacaacacgggcaacgctgcggcgcaacagcagcagcaggcagcgaatggcgcagcaaccgctggtgcatctggagccgctggcagcgcccagaatccaggacacggaggagctgcgtccggcgctggcagtgtgccggcagagggaacgcgccagaacagcctacagcgcattcagcagcgaaagcaaaaggtcttcaatctgcccgtgccacagaaactggccaaattgtcgatgtattccgcctgccagtctgagggatgccgttgcaccggctggaagacaccgcaggaaaatcgccaccgtgacgtcgagtcctcctactgtccggagttcaacgaggagtgccgcaacaccagctgtcgccattcgctgagatcgcacatagcccatctggacaatatatccagttccagcatgaacgagctactgggcgccattatagacatggagaacctattcatgtccatgcagcgcgtcgaggacgaggacaccaagaaggtgtaccagtacctcttccgtttgctgcgccagtgcgtcctcacgcgccagcaggcggtcatccggggtcctctcggcgatccaccattcgagacgccgtgcatcaccaaggctgtgctctcgttggtcttctacaagtacaatcacctgagcacgcctgaactccaaaccatgaccgaggtggccaagacgttcttgaactttctgaaccactacaactttgaatcgccgtcgaccaggagaggagatctcacccacgaggatgcctctaactacaaaatcaactacaccaggtggttggtgttctgccacgtgcccgccttctgtaactccctgcgccaatgtgaaacgtccctagtgtttggacgaacgctcctgcgcaccgttttccagtgcatgtcgcagcagctgaaaaagaagtgcatctccgagcgggatcgctttcccgaggacaagcgttcgatcatcacgctgatgccgaagtttttggaaacgcttcgcgccgaattgctcaaggatgattcgcccatctgggataccagctaccgcccgtcaaattcctttgtcatccagcagagaaagcgtaaccaggaggtggcaaatgtacccattggtcccagtgcagcaagcattggtggaaacaagaggaccagtgtgggtgaaccgctccacaagcgaatcaaaaaggagcccaccgatcgtccaagcaggttggtaatcagttttttcttctttcaatacatttactaatcgtcctgccgcagtgagaatttggatgacctgcctgcggatgtagtaatgcgcgccatgaaatcggtgtccgagtcgaagaccaccaacaaagcggaaattctctttccggttaatgtgtcgcgggatgagaacgtcaaggcggaggagcagaagcgagccattgagttccatgtggtgggcaattcgctgaccaaaccggtggacaagcagactgttttgtggctactgggcctgcagctcgtatttgcctatcagctacccgagatgccgcgcgagtacatcagccagttggttttcgacaccaagcacaaaacactggcgctcatcaaggaaaaccaacccatcggcggcatctgtttccgcccgtttccgtcgcaaggcttcaccgagatcgttttctgcgcggtcaccatgtcggaacaagttaagggctatggcacgcacttgatgaaccacttgaaggactacagcatacagaggggtatcaagcatctgctcacattcgccgattgcgatgccatcgggtacttcaagaagcagggtttctccaaggacatcaaattggcgcgaccagtttatgcgggctacatcaaggagtacgatagtgctactctcatgcactgcgagctgcatccaagcattgtgaacacgcagttcatagctggttagtcaaagaatggacaaggaatccatggtcccattttacactccaattcttcctttcagtaattcgcagtcagagcgagattctgaaggagctgatcgcacagcgccacaacgaggtgcagaaagtaagacccggcttgacttgcttcaaggagggcctgcccgtgattcccgtggaatcgattcctggtctgcgggagatcggttggaagccgcaaaatcgtccggcgcgctcatcgcgacccctcgaggaatccaccgatccggagaagctggccacgtcctttgcatccgtgctgcaatccgtgcgccagcacaccaccgcctggcccttcctgcgcccggtgaccgcggccgaagttccggactactacgatcacattaaatatcccatggacctgaagaccatgggcgagcgcctgaagaagggttactaccaaacgcgccgcctgttcatggcggacatggcgcgcattttctccaactgtcggttctacaattcgcccgacaccgagtattatcggtgtgccaactccctggagcgctacttccagaccaagatgcgcgagctggggctgtgggacaaatgatgcagtgattccgaggagccctgcataaggccgaacatttaatcgaactaaattattatattaattctatttatttttagaattctccccagctaaagaaaaacccatatagttagtttgtcgttatagatacttaggttaagctcagtgtgtccgtcttgttcacagacgcgttgtgtctttgggaagaataaatcagatctatcgcctactcattaaccacgaatccacccactctcccttcatccagtggacaaaaccaatgctggtcaaatgatgtgtaaccactacgtttttgtcttaactctttatttcacttttgatttcctacattcattgtttcgcatgcttttaaagttagagttcttctcatttgtttttattttggtttagtaaataatttcagttataaaattatatcttaggggcgggagtttaatcgaatctctaggacattgtacaaaggctcatgcatacataaatacgtggctccacatctgcgtttcatcctttccaaggctgcaccggaaatggcaaaggatatcgtggatatgccgatggtacaatgaaaatgttaaccgtagttgcttactgcttgaattcaattatcctttattacatggtatatttagtttttaatttccatacgtggtagtctttacaatttagccattacttgcgaaacgtgctttcttttcagtgttcaactcgataattgcgtatttatatacaaacatacatatgtggagctaatcagagtgagcatatatggagatatacatattacatacaattagatacataatttatgattacataatattgaaatgtttgtggtgactccgccagctcatcctcatcctcatccctcttctctctgccagcgtgttaactggccaaactggactgggcttgtgctgaatacaaatatatatctggatacaaggataacaaacaaatatctaaagggattcagctggagatacgcgtactttactcgcttttgaaggcctcgatttcaagcgcagcagccagtgaatcacacaatcaatcttaacatttacattgagaacatcatcaccataggtatcgtatcttttcaaatcgattcgaatcgtaagtataatttcccttgcccaaccgagatcagagaaaataaactgtacgaaaaccgaaaatttgggcttttctttttggacaaatttgctaatgattggttgttttct

SEQ ID NO: 40634 - DNA, 2766 bp, DROSOPHILA
gcaagtgggcaaactcgttgtatcgcttgtgaaatttaaggaaaagtacactttgttcaaaactaacgaagagaatcgcaatatctgccgatcttggaatgtctggtggtccatccataacgataaaaagccaaccaatcgatggtaacaacacgggcaacgctgcggcgcaacagcagcagcaggcagcgaatggcgcagcaaccgctggtgcatctggagccgctggcagcgcccagaatccaggacacggaggagctgcgtccggcgctggcagtgtgccggcagagggaacgcgccagaacagcctacagcgcattcagcagcgaaagcaaaaggtcttcaatctgcccgtgccacagaaactggccaaattgtcgatgtattccgcctgccagtctgagggatgccgttgcaccggctggaagacaccgcaggaaaatcgccaccgtgacgtcgagtcctcctactgtccggagttcaacgaggagtgccgcaacaccagctgtcgccattcgctgagatcgcacatagcccatctggacaatatatccagttccagcatgaacgagctactgggcgccattatagacatggagaacctattcatgtccatgcagcgcgtcgaggacgaggacaccaagaaggtgtaccagtacctcttccgtttgctgcgccagtgcgtcctcacgcgccagcaggcggtcatccggggtcctctcggcgatccaccattcgagacgccgtgcatcaccaaggctgtgctctcgttggtcttctacaagtacaatcacctgagcacgcctgaactccaaaccatgaccgaggtggccaagacgttcttgaactttctgaaccactacaactttgaatcgccgtcgaccaggagaggagatctcacccacgaggatgcctctaactacaaaatcaactacaccaggtggttggtgttctgccacgtgcccgccttctgtaactccctgcgccaatgtgaaacgtccctagtgtttggacgaacgctcctgcgcaccgttttccagtgcatgtcgcagcagctgaaaaagaagtgcatctccgagcgggatcgctttcccgaggacaagcgttcgatcatcacgctgatgccgaagtttttggaaacgcttcgcgccgaattgctcaaggatgattcgcccatctgggataccagctaccgcccgtcaaattcctttgtcatccagcagagaaagcgtaaccaggaggtggcaaatgtacccattggtcccagtgcagcaagcattggtggaaacaagaggaccagtgtgggtgaaccgctccacaagcgaatcaaaaaggagcccaccgatcgtccaagcagtgagaatttggatgacctgcctgcggatgtagtaatgcgcgccatgaaatcggtgtccgagtcgaagaccaccaacaaagcggaaattctctttccggttaatgtgtcgcgggatgagaacgtcaaggcggaggagcagaagcgagccattgagttccatgtggtgggcaattcgctgaccaaaccggtggacaagcagactgttttgtggctactgggcctgcagctcgtatttgcctatcagctacccgagatgccgcgcgagtacatcagccagttggttttcgacaccaagcacaaaacactggcgctcatcaaggaaaaccaacccatcggcggcatctgtttccgcccgtttccgtcgcaaggcttcaccgagatcgttttctgcgcggtcaccatgtcggaacaagttaagggctatggcacgcacttgatgaaccacttgaaggactacagcatacagaggggtatcaagcatctgctcacattcgccgattgcgatgccatcgggtacttcaagaagcagggtttctccaaggacatcaaattggcgcgaccagtttatgcgggctacatcaaggagtacgatagtgctactctcatgcactgcgagctgcatccaagcattgtgaacacgcagttcatagctgtaattcgcagtcagagcgagattctgaaggagctgatcgcacagcgccacaacgaggtgcagaaagtaagacccggcttgacttgcttcaaggagggcctgcccgtgattcccgtggaatcgattcctggtctgcgggagatcggttggaagccgcaaaatcgtccggcgcgctcatcgcgacccctcgaggaatccaccgatccggagaagctggccacgtcctttgcatccgtgctgcaatccgtgcgccagcacaccaccgcctggcccttcctgcgcccggtgaccgcggccgaagttccggactactacgatcacattaaatatcccatggacctgaagaccatgggcgagcgcctgaagaagggttactaccaaacgcgccgcctgttcatggcggacatggcgcgcattttctccaactgtcggttctacaattcgcccgacaccgagtattatcggtgtgccaactccctggagcgctacttccagaccaagatgcgcgagctggggctgtgggacaaatgatgcagtgattccgaggagccctgcataaggccgaacatttaatcgaactaaattattatattaattctatttatttttagaattctccccagctaaagaaaaacccatatagttagtttgtcgttatagatacttaggttaagctcagtgtgtccgtcttgttcacagacgcgttgtgtctttgggaagaataaatcagatctatcgcctactcattaaccacgaa

SEQ ID NO: 40635 - protein, 813 aa, DROSOPHILA
MSGGPSITIKSQPIDGNNTGNAAAQQQQQAANGAATAGASGAAGSAQNPGHGGAASGAGSVPAEGTRQNSLQRIQQRKQKVFNLPVPQKLAKLSMYSACQSEGCRCTGWKTPQENRHRDVESSYCPEFNEECRNTSCRHSLRSHIAHLDNISSSSMNELLGAIIDMENLFMSMQRVEDEDTKKVYQYLFRLLRQCVLTRQQAVIRGPLGDPPFETPCITKAVLSLVFYKYNHLSTPELQTMTEVAKTFLNFLNHYNFESPSTRRGDLTHEDASNYKINYTRWLVFCHVPAFCNSLRQCETSLVFGRTLLRTVFQCMSQQLKKKCISERDRFPEDKRSIITLMPKFLETLRAELLKDDSPIWDTSYRPSNSFVIQQRKRNQEVANVPIGPSAASIGGNKRTSVGEPLHKRIKKEPTDRPSSENLDDLPADVVMRAMKSVSESKTTNKAEILFPVNVSRDENVKAEEQKRAIEFHVVGNSLTKPVDKQTVLWLLGLQLVFAYQLPEMPREYISQLVFDTKHKTLALIKENQPIGGICFRPFPSQGFTEIVFCAVTMSEQVKGYGTHLMNHLKDYSIQRGIKHLLTFADCDAIGYFKKQGFSKDIKLARPVYAGYIKEYDSATLMHCELHPSIVNTQFIAVIRSQSEILKELIAQRHNEVQKVRPGLTCFKEGLPVIPVESIPGLREIGWKPQNRPARSSRPLEESTDPEKLATSFASVLQSVRQHTTAWPFLRPVTAAEVPDYYDHIKYPMDLKTMGERLKKGYYQTRRLFMADMARIFSNCRFYNSPDTEYYRCANSLERYFQTKMRELGLWDK

SEQ ID NO: 40636 - DNA, 4902 bp, DROSOPHILA
tttacatttcaattatgtcgatttcaatcgacataaattgttggtcaacacatcagttgagattatgcaatgagcaaagcgacaaaagcactggcaaatacatacatttctgagacgaagcaaacaatagcgtaaaatgcatttatttatgcaaagagacaggagacgcagcacacaaaaaaagttcgaaatttccgtgccaaaaacgattttggctcaagtggtgtcgtgtttgtgaagctaattagatgggagttagcccaatccattcaacggccattcaaagcgaagtggtgcaaaatgatgcgcaagccaaagaaacgccacccatcgcccaccgatcgtccccccctcccctttttttgcaccactttggccacttatcattcacggttgctggttaaacagccactgaagattaggccattctccccgtgctccaatttataaatgggttacagattgctcttaaaatatatacatacataggtgcaaattcacgagtatctacttaaatcaaaaattctagcaagtcgctagaattctactaatctactaatcttaacatttaagtttttagcttaaaatacttctggcctaaccattttccaatctattcaaaacatttaaaaggaatttttcaaaatgaatcaatctctaaatttattgcctctgtagtacagggtattcaaatttcgacttgcatacaatcagctccgttgattgttacaatgtttctcacactaaaaatcctgaaaataaaaagttaaattaaaagaaagtatatggtttttataaagaaaaaagaagtgttcaacagtaggacttcatggaataaacattttcgagtgtagtactgccgccaaaccaaaaaaaaagccccaccactcattctctctttttggggtacggcgctctcatcgaattgagtggatggatcgatgcgactctcggttcgtatataaggcggggttccccaatgcttttgacattccagttgatcagtgccagccgatcggtcggtagagagaagtgcgtcgcgagtccaaaaaagaaaatcgagcccgcagaaagtgccagtgaatagactgataaagcaaacaaaaatgaaagctttcattatcgccggagtgtgcgtgttgagcgtgctgagcctgggatccgctcagttccagaacggacgtctggagccgccgaatccgcagctctgtgcccagcgtgtcattcacgagaagactcccgatggcaaggggtgagtcagcaggatatgctcaccaaaacataaactatagggtttgcttctctccccgcagttacttcttctcgtggcgcgaccctcagctgaagggcgtggaggaggactggctgaccgccaggaactactgccgcaggcgctgcatggactccgtttccctggagaccagtttggagaacgagtggatcaagcagtatgttgtgcgcgagaatgtaagtacaaatttcaggggctataacgatgaaaataaattaaggcaagaaatgataagagaaatcgaaagacttaggaaacgaactcaagtataggtgttgtcatgaatagcacacaaatgcgcacacgcaaagctaatcttttatctcaactttcataaatatttactccgaaaatgttgagtctataaatggattgtcccaagtcaataaattaaaccttacgtaagtcccacttatgatattggaaccatgtccaaactaataaattgatctgaacttcaatgcacctgtttgttaaacatttaagcattgatagatcaaacaaatgaccgaaaataccattgaaatgtgcaactcattcactatgtatatgtttttttttccggcgaaaggctattataaatgcaaaatcaaacactaataaatggaccgcatcaatgtggacttttacaccttaaagtcgaaaaagcttgccaataatttattgtacctgcatctattagattttgtttccgttgttttctcacctgttttgcatgacattatgtcacctttcttaatttgtttggcaagttaaataacgtcagtttagccgcgtgtgaactgtttagcgcgttttatttggcagctcagacaagacacaacaaaacgctgaccttaattccgaggatgctgggggggcacacaataaaaataattgcgaaatccctgacactaacatcgctccacaaagttcaatgtgaaattgcgcataaaaactgaacggaaaggcaaaatacgcatcataaatacagaaaaactttcccagttgttgcctctgtaattttgcacacgaatggaatcgtctgatattatgcaacgctcttcggatgaacaagtgtcaagtttggagttgtggtcagccgggctcatctcatcccatctcatctgccatcttccgactcattgcccacatcccatctccggttttgcggcatgggaaggcactggcggtcgaattaaaatcgaaagtacatgtgtgcgatgggaaagcctggccggaaaagctgatcaacaaaattacttagcaaaattagcaagctgcgaacacgcaaccgaattcatttgttttacattttgcgtataagatccaaaaggaaattgaatgcaaaccataggcgataaaaagtcgaagatggaaagtaactcatgatcatcgaatattaatatattaaccacatatcaaccaacatataagacaacaaatctttttttagatgtccaatggaaacgcagtactttccattaaaattttccgcttcctgctaagttgcatctcccaccaccgacttctctgcaagacttttatttaactattagtaggacaggtgtataaacatcactcatttaggtttccgcaacgggtaaaatgcattcattgtctgagttttaaacaattacattgcaatctggaccccttaaatgaaacgctaaaaccgccagcgacaaaaccgaaatcaatgtccataaatctatttcagctttacgctcattggagttttccaaaagggcagacatccacatcgagtcgtctgggtctctttggtttttttttttttttttttttgggtgctgcccccttaacaaaacaatttttatggcccatcaggtgaaagtgactgatgatcgcttaactgcggctgcgcagcggcttttgcttttgcttctgctcacttgaaatgttgacagtatcgggtgcgccagctccaaaagggcgcggactcggattcggaatgggaatgggtatgggtatatgggttcgctttcagcgataaaaatggttgtttgggcgtgacaggcccaaaagagttgctaactggaatttctaccactattttgttcgtcgatgccagccctgcattttcttgcgtaggtgggggattgatgggggaaatttctatttctatttcagtatctgcaaggggcaatgaactattgatactatttcattgattcagtttccttggatggatatttgaattttgtcctggtttcagtacattaatgagaacactactctcacgttgcaggtgaaatacatctggaccagcggccgcttgtgtgacttcaagggctgtgaccgccccgatctgcagcccacaaacatcaacggttggttctggaccgccacactgcagaaactggcaccaaccactgagaggaaccagggcgattggtcgcccaccggaggcattggcctgccccagccggacaaccgcgagtacaagcagaatggagcgccggagaattgtctcgccctgctgaatcagttctacaacgatggcgtaaactggcacgatgtggcatgccatcacaagaagagcttcgtctgcgaggagaacgatgctctgctgaagtatgtgcgctacacgaaccccaatctgcgcatctaagaggatcgcgatcaggatcagaatccgaatgcgaatgtgggctggcggaaggaccagcgacactctccaagtaaaaccaaaaatgatatttcccaaatcggcagcgggaacgatgatcgatgtcaactatatgtctaatctccgattgtctttgaatgcaaagttttctggccaaattgctgcatgatatacttacttatgaaccctatcctggtaaccaccttccaattctctgcgctctgttctgtctcatcaactagtttaattcttaattttgtattaatttatgattttctttaattataataaaagattcgaaacgattttgataagtggacaacggcattatttatttttttgttaatttgatatagcattgaacgtttaaattgatttatttaaggatattatgatagaatcataaatacctcttttccagggtagaggttagatattaataaatgctttttattaaatctacagatcctaagaaccctctttcaaattgtatgatattgttcagcgctgcagatatgaatataaatctgttccgagttttgttttccatacgatgaaataattgtacaaatttgaattataaaaaccaaaaaaaagttctgtttcaagctgagccatttgaagtataacacaagagaaaatgctacagtcgagtttcccgactaccagatatccgttactcaagtagtgggatttttctgggatatctatagattgggaaatacatacatacattgttttattcaacctttaaaaaaataaagccacaaaataaagtgtttcgaacttgaaattctgacgccaagaagtatgctatgattttgatagtagataagctttagtatcttatgcgttttgtatattacgatcatgaaatgaacggtgaaaactagtacatgcacacaattttgatgagtgattgttgagaacgaaagattgaatgaaaatgaaaaccctttttttttgggcaacactagaacat

SEQ ID NO: 40637 - DNA, 982 bp, DROSOPHILA
atcagtgccagccgatcggtcggtagagagaagtgcgtcgcgagtccaaaaaagaaaatcgagcccgcagaaagtgccagtgaatagactgataaagcaaacaaaaatgaaagctttcattatcgccggagtgtgcgtgttgagcgtgctgagcctgggatccgctcagttccagaacggacgtctggagccgccgaatccgcagctctgtgcccagcgtgtcattcacgagaagactcccgatggcaagggttacttcttctcgtggcgcgaccctcagctgaagggcgtggaggaggactggctgaccgccaggaactactgccgcaggcgctgcatggactccgtttccctggagaccagtttggagaacgagtggatcaagcagtatgttgtgcgcgagaattatcgggtgcgccagctccaaaagggcgcggactcggattcggaatgggaatgggtatgggtatatgggttcgctttcagcgataaaaatggttgtttgggcgtgacaggcccaaaagagttgctaactggaatttctaccactattttgttcgtcgatgccagccctgcattttcttgctacattaatgagaacactactctcacgttgcaggtgaaatacatctggaccagcggccgcttgtgtgacttcaagggctgtgaccgccccgatctgcagcccacaaacatcaacggttggttctggaccgccacactgcagaaactggcaccaaccactgagaggaaccagggcgattggtcgcccaccggaggcattggcctgccccagccggacaaccgcgagtacaagcagaatggagcgccggagaattgtctcgccctgctgaatcagttctacaacgatggcgtaaactggcacgatgtggcatgccatcacaagaagagcttcgtctgcgaggagaacgatgctctgctgaagtatgtgcgctacacgaaccccaatctgcgcatctaa

SEQ ID NO: 40638 - protein, 291 aa, DROSOPHILA
MKAFIIAGVCVLSVLSLGSAQFQNGRLEPPNPQLCAQRVIHEKTPDGKGYFFSWRDPQLKGVEEDWLTARNYCRRRCMDSVSLETSLENEWIKQYVVRENYRVRQLQKGADSDSEWEWVWVYGFAFSDKNGCLGVTGPKELLTGISTTILFVDASPAFSCYINENTTLTLQVKYIWTSGRLCDFKGCDRPDLQPTNINGWFWTATLQKLAPTTERNQGDWSPTGGIGLPQPDNREYKQNGAPENCLALLNQFYNDGVNWHDVACHHKKSFVCEENDALLKYVRYTNPNLRI

SEQ ID NO: 40639 - DNA, 3628 bp, DROSOPHILA
cttgcctacgaagtgggtctgctggtccagaaactggccggcggagttggccccccattgacgaagcccaacagcagtgcccacctgtagagcggaatgacgaactaacctctcacgggaatcgacaattgacacagatcctggatggagcaataaatctctttactctaaggtgctcaataacttaaaaaaaaaacaacttaactctcaaacgcatttattctgcaaatgttcactgtcttttgtgttctaaagatgacatattttttgccattatttataaagttcttttcaagtttatttatacatatgtacattgtgaaagttgcaattttatgtccttcgctattttgtaattgaagaatttaatgaaaatgcaaccgctacgttgatttttttgttgagctgctagcggtaactattgaaattataaaagaattgatagtagagattaatgaacctaatcaagtttgtattgctattttctataaaagtattttttaaacaatctaaagatccttttactttaggtcgaatataaatcagttttcacttcatttggaatttactatgctgtacgcacaatttatggcaaatttaaatcactgtcccggcaaataaattaaaattttgccaacttttatttttaaacttaacattttaataaatgttaatggagctggcagaattgaaacgcgccatctggcggtcagtagcggagacatgtaggacagtaattgataaggactactgttaactgttacaatgtaagcaaatacttcaaaactgttatacttgtgttaattaaagcatacgttcaaaagtcgagttgagttattgaatgttaactgttcgtagttcgaaagttatctaatttagctaactaatttagcaattgtttataaaaaagttttacttgaatattattaatactcggtatatctatgcaaatggtattaaaagtatattttcgcatgccggatggtttactcgtctaaaactcagccggtcacaccgtctgattgccgtgctgtcactttggctgatgcaattgcagtttttttagttaaaacaaaattagtttccagtcaactagtattcaaacagcccagacacaatggacgcggaagacgtaagttcccggaacaccggctagtgcgtttcatacgcggaaaacttgcgtggaaaattcgcatattatcgtacatgtgcgcccttgtttgcgtatgtgtatgtgtgtatttacacatttgtgtatgagaactgggcgaacattgaggttatgtttgcttgatccggatttaaaccatattgaaattccaatgattttcgcagggttttgatcccactttgctgaaaaagaagaagaagaagaagaccacgttcgatctggacgcggcattgggtctggaggatgacaccaagaaggaggatccccaggatgaggcatcggcggaaggaggtgccgccgccgaggaggataatctagatctggagagtttcggcaagaagaagaaaaagaagaagaagcccttcaacatggacgaaatcgaagcggccatacccagctttggcggcgatgatgtggccgccagcgaggagcccgaggaggaggagatcaatctggacatggacttctcgatggccaaaaagaagaagaagagcaagaagaaggaactggacgagctgtttgcggaccaagcggacgacgacaagagcgaagacaaagagaacggtacggtgacgaattgcagagcagccagggaagcttagggttatagaatcatcccaaccaagattggcagccatataagcttgttgtcacttgacaaaggcaaagctatacgattcttaaagtgtataacttggctttcgccttttccgaagcattaaaactcagtgtatgaagtgaactagaaatgcttagccagtgagttagcatgtagctgttccaactttaaatagactccagatttcaaagctctcacttagcaaataagcttataccatacccttttaaataacgttttcatccgtttacagacgaggacaacagctcaacctggtttggctccgaccgcgattacacatacgacgagttgctgaagcgggtcttcgaaatcattctcgacaagaatccggacatggccgccggccgaaagccaaagttcgtgatgcgaccgccgcaggtgctgcgcgtgggaaccaagaagacctcctttgccaacttcatggacattgcgaaaacgctgcatcgcctgcccaagcatctgctcgatttcctgctggccgagttgggtaccagtggctccatggacggcaaccagcagctgatcatcaagggccgtttccagcccaaacagatcgagaatgtgctgcgtcgctacatcaaggagtacgtcacctgtcacacctgccgctccccggaaacgatattgcagaaggacacgcgtctcttcttcctgcagtgcgaatcctgtggctcccgctgctcggtggccagcattaagtcaggtttccaggctgtcaccggcaaacgtgccgccatacgagcaaaaacaacctaaattctccttatttaaaactttttgaatttttattaccagtaaaatttcaatacaaaaaaccaacgatactatttatttgttgtattctgcattgttttatgccttcgttgccagtcggttaggtagtctacgaagccaatttccatattccgcgatcggccgctgtctatgaagaactgaaaagcgtccagacccatcttgccgcggaacctattcggacgaccgcgcaggaataggctgtggcccctcgagatgcgcgtgggatcaatgtactccatggagacctgcagcagccgcatcatgctcacggcaatgctcttgtaggcctcggacgaggccagcgaactggcttcactgtacaggctgctgatcacgcgtccattgaagggttttttggtgatgctggcctccagggagccggtgccatcatcgatcatgaacttcatgaacgactcgttgtgcgttccattgccagttacaaaggcgtagatgatgcaggtgcagaagtgaatcggatgcacgtcgtctgtgatgaacacattctcgttctccggatcctgagttgcgcgctcaatctgggatatggtcagcggcacgttgtcgtggacctccggaccacatttgcccgtggacttttcactctgttgattcttgcgtatcacgaagttatccagctggctttctatgtcctcgaaactctgattaaaatccattctatttgcttagtctgcgatttcaaaggggatttctttattgcagtgcattttgcattagcgccaaaaaaaaaaacagttgtgagcatgggcgtagacttcgtattttcttacaaataatattaattaaaattaattttgtgagcaattttcacacaattgtattataagttaaaaccagggtcacattaatttgcagaaccgcgcaatattttctttttaacccccttacaaattttcagttgttttgactacgcccctgctaatttttacttattaaattcaaagtctaaaaacattgtcaccagataatacgagtatacactatatggacaaacgtaaaatcgt

SEQ ID NO: 40640 - DNA, 1117 bp, DROSOPHILA
ctcagccggtcacaccgtctgattgccgtgctgtcactttggctgatgcaattgcagtttttttagttaaaacaaaattagtttccagtcaactagtattcaaacagcccagacacaatggacgcggaagacggttttgatcccactttgctgaaaaagaagaagaagaagaagaccacgttcgatctggacgcggcattgggtctggaggatgacaccaagaaggaggatccccaggatgaggcatcggcggaaggaggtgccgccgccgaggaggataatctagatctggagagtttcggcaagaagaagaaaaagaagaagaagcccttcaacatggacgaaatcgaagcggccatacccagctttggcggcgatgatgtggccgccagcgaggagcccgaggaggaggagatcaatctggacatggacttctcgatggccaaaaagaagaagaagagcaagaagaaggaactggacgagctgtttgcggaccaagcggacgacgacaagagcgaagacaaagagaacgacgaggacaacagctcaacctggtttggctccgaccgcgattacacatacgacgagttgctgaagcgggtcttcgaaatcattctcgacaagaatccggacatggccgccggccgaaagccaaagttcgtgatgcgaccgccgcaggtgctgcgcgtgggaaccaagaagacctcctttgccaacttcatggacattgcgaaaacgctgcatcgcctgcccaagcatctgctcgatttcctgctggccgagttgggtaccagtggctccatggacggcaaccagcagctgatcatcaagggccgtttccagcccaaacagatcgagaatgtgctgcgtcgctacatcaaggagtacgtcacctgtcacacctgccgctccccggaaacgatattgcagaaggacacgcgtctcttcttcctgcagtgcgaatcctgtggctcccgctgctcggtggccagcattaagtcaggtttccaggctgtcaccggcaaacgtgccgccatacgagcaaaaacaacctaaattctccttatttaaaactttttgaatttttattaccagtaaaatttcaatacaaaaaacc

SEQ ID NO: 40641 - protein, 312 aa, DROSOPHILA
MDAEDGFDPTLLKKKKKKKTTFDLDAALGLEDDTKKEDPQDEASAEGGAAAEEDNLDLESFGKKKKKKKKPFNMDEIEAAIPSFGGDDVAASEEPEEEEINLDMDFSMAKKKKKSKKKELDELFADQADDDKSEDKENDEDNSSTWFGSDRDYTYDELLKRVFEIILDKNPDMAAGRKPKFVMRPPQVLRVGTKKTSFANFMDIAKTLHRLPKHLLDFLLAELGTSGSMDGNQQLIIKGRFQPKQIENVLRRYIKEYVTCHTCRSPETILQKDTRLFFLQCESCGSRCSVASIKSGFQAVTGKRAAIRAKTT

SEQ ID NO: 40642 - DNA, 4621 bp, DROSOPHILA
ctgctctgcacggatggtactcgtgccgagatccaggactacaagcgctgcaatctgggcaaggttaaggccaatgctgtggtcacccgcggcggagtcaactacaacgagacccagatgaatgcctacatcaatctgctgacctatgcccaacaactgtacggtcgcaaggaagtggacgccttcagtttcagcatgttctcctcgccgatcgggcactatgatctgatcttccaggacgccacgcggcagctgcaagtaattccgcccaataagcgcaggtatgatgcctatttgggcagcgattttatgcgagcacgccgcatcaccgactgctatgctggtgcctcccagttggcattatccgtgggcctgctcctcgtgggttcgctggttgcaatgctctaagccactagactcacttagatttcagaattctacaagcatctctagcacaaagagaaaacatatcaacatttttacattccaaatatgattaagttaaatgtgaaatcccttccgtccgaaaatgaaactctaactagccgaaaaatatctgttgaaggctatagtttataatttataaagtcctgtgccttattatagtatttgtttgtgtacataccaactaagaccgtccaaaaaatgtacctaggagatgtaagccgaatcttttacaaccgcttatgtaagtatacaaataaaataactagataaaggagttattttgcttattttgaattagtatcatttgaagaatcctaatatcttgaccgcaattgtagccgccaaattcaaattgaatatgtgcgctaacatcgctttgaaacatagatgttattgaaatttacgctggtaaatattgcatttaaccttaaaacactctgtattgtttataaagccagtaaaatgtttgaaattaaagaaaatagcgtagttacaagtttcagcgcagtgtgaccgcttggccgcataagcaagggtggaacagtgccgcgaaacgacggtcacacccgcctgcacacatctgtggaattgttaaatttcgaaagtccggaaaaaccggacggaacctttcacctcgctctggaccagtggcaccgccctcgagtatcgcaagatgtctattaacctgcgcaccgtctacgccttcgcccgcgagatgtacccaaagacctccaaggagaccatccaatatggaacagctggctttcgcggcaagtgagtagttgcctccattaacgatcttaataatcatcataatcattatgctaacacacccacacgatgcacacgttggcgcatttgattagcacacggcgattgttggtggtttttttttttttttgataaatgggcggttgcagggctgtgatgttggaatttggcgtttatttttagatattgttcaccttttatcaatggacatgcccttctttcgccgttatgtctgcctgtatgtgcgtaagtgtgcgtgcatgtgcatatgtgcatacatactgacgcacagtcgcgggcagcgaactagtgccacatgtgcaagttgcaatattttcaaatctcaatgattaataacttgttatttgtgaaaaatgaaccaactaagtatttgattacatagtttgtggtttccgcgcccttattttctaaccactttacagccagataacaaagtttccatgacacacctactgataaaagcaattgcaacgcctaaaatgagcaatacacagtgcttctataggcttatcaatccagcgaagataaaatagatagctaaagtgataacacacatataaacaaacaacattaggtacaaaacattttccaactccaaaatacaagctaaaagatacttttgtatctaaacaaaatcctgatgtaataactccgcattttttttttagggctgagttcctggacagcgtgatgttccgcatgggcgttctggccaccctgcgttcccggtatcgcggaggctccgtcatcggtgtgatgatcacggcatcgcacaatccggagccggacaacggagtgaagctggtcgatcccaagggcgagatgctggaggccagctgggaggcgatagccaccgatctggtcaacgtcagcgaccaggagctggagcagcaggtggccaagatcataaaggacaacaatatcgatgtgacgaccagttcccaggtgtttgtgggcatggacaacagataccacagtccgcggctgctgaaagcggtggccgatggcgtgatagcgctaaagggtaacgtcaaggagtacggcattgtgaccacacccatgctgcactacttcgtggtggcggcgaataccaaggaggcatacggcaagcccaccgaggagggttactacgacaagctgatcaaggcattcgaactgctgcgcaacgggcgcctggagaacggcaactatcgcaatagcatcatctacgatggtgccaacggtgtgggtgcgcgcaagatgctgcagttcatcaagcgcatgaagggcaccctcaacgtgacggtcattaatcagggcatcggtgtcggcaagatcaacgaggactgcggcgccgactacgtgaaggtgcagcaaagtccgccgaaatccatgcccgaggatgtgaagccgtacacgagatgcgtcagcgtggatggcgatgccgatcgggtggtgtacttctttaccgacgacaagggtgagttccatctgctcgatggcgatcgcatagccaccctaatcgccggctatctcatggaactggtcacacaatccgagattagcctacggctgggcctggtgcaaactgcctacgccaatggtgcatccacggactacatagtggaccagctgaagtttcccgtttcgtgcgtacccacgggcgtgaagcacctgcaccacaaggccttggagtacgacattggtgtttacttcgaggcgaatggccacggaacgattgtgttcagtgacaatgctaaggcgacgattgcccaggtggcccaaactaaggagagtgccaagacgttgctgctgctcatcgatcttatcaacgagaccgtgggcgatgccatatccgacatgctgctggtggaaacaatcctaaatcacaagggctgggatgtccaggattggatctcgtcgtacaacgatctgcccaaccgacagctaaaggtgaaggtgcaggatcgcaatgtcatcgagacgacggatgcggaacgcgtgtgcgtaaagcccgaaggtctgcagacggaaatcaaccaggtggtggcgaaatacaagcggggacgctccttcgttcgcccctcgggcaccgaggatgtggtgcgcgtctatgccgaagcagccaccaaagaggtaaggcttataagttaactcttagcactagatcaaaacactctacttactatcttttttttacgacaggacaccgataatcttgcctacgaagtgggtctgctggtccagaaactggccggcggagttggccccccattgacgaagcccaacagcagtgcccacctgtagagcggaatgacgaactaacctctcacgggaatcgacaattgacacagatcctggatggagcaataaatctctttactctaaggtgctcaataacttaaaaaaaaaacaacttaactctcaaacgcatttattctgcaaatgttcactgtcttttgtgttctaaagatgacatattttttgccattatttataaagttcttttcaagtttatttatacatatgtacattgtgaaagttgcaattttatgtccttcgctattttgtaattgaagaatttaatgaaaatgcaaccgctacgttgatttttttgttgagctgctagcggtaactattgaaattataaaagaattgatagtagagattaatgaacctaatcaagtttgtattgctattttctataaaagtattttttaaacaatctaaagatccttttactttaggtcgaatataaatcagttttcacttcatttggaatttactatgctgtacgcacaatttatggcaaatttaaatcactgtcccggcaaataaattaaaattttgccaacttttatttttaaacttaacattttaataaatgttaatggagctggcagaattgaaacgcgccatctggcggtcagtagcggagacatgtaggacagtaattgataaggactactgttaactgttacaatgtaagcaaatacttcaaaactgttatacttgtgttaattaaagcatacgttcaaaagtcgagttgagttattgaatgttaactgttcgtagttcgaaagttatctaatttagctaactaatttagcaattgtttataaaaaagttttacttgaatattattaatactcggtatatctatgcaaatggtattaaaagtatattttcgcatgccggatggtttactcgtctaaaactcagccggtcacaccgtctgattgccgtgctgtcactttggctgatgcaattgcagtttttttagttaaaacaaaattagtttccagtcaactagtattcaaacagcccagacacaatggacgcggaagacgtaagttcccggaacaccggctagtgcgtttcatacgcggaaaacttgcgtgga

SEQ ID NO: 40643 - DNA, 1866 bp, DROSOPHILA
acgacggtcacacccgcctgcacacatctgtggaattgttaaatttcgaaagtccggaaaaaccggacggaacctttcacctcgctctggaccagtggcaccgccctcgagtatcgcaagatgtctattaacctgcgcaccgtctacgccttcgcccgcgagatgtacccaaagacctccaaggagaccatccaatatggaacagctggctttcgcggcaaggctgagttcctggacagcgtgatgttccgcatgggcgttctggccaccctgcgttcccggtatcgcggaggctccgtcatcggtgtgatgatcacggcatcgcacaatccggagccggacaacggagtgaagctggtcgatcccaagggcgagatgctggaggccagctgggaggcgatagccaccgatctggtcaacgtcagcgaccaggagctggagcagcaggtggccaagatcataaaggacaacaatatcgatgtgacgaccagttcccaggtgtttgtgggcatggacaacagataccacagtccgcggctgctgaaagcggtggccgatggcgtgatagcgctaaagggtaacgtcaaggagtacggcattgtgaccacacccatgctgcactacttcgtggtggcggcgaataccaaggaggcatacggcaagcccaccgaggagggttactacgacaagctgatcaaggcattcgaactgctgcgcaacgggcgcctggagaacggcaactatcgcaatagcatcatctacgatggtgccaacggtgtgggtgcgcgcaagatgctgcagttcatcaagcgcatgaagggcaccctcaacgtgacggtcattaatcagggcatcggtgtcggcaagatcaacgaggactgcggcgccgactacgtgaaggtgcagcaaagtccgccgaaatccatgcccgaggatgtgaagccgtacacgagatgcgtcagcgtggatggcgatgccgatcgggtggtgtacttctttaccgacgacaagggtgagttccatctgctcgatggcgatcgcatagccaccctaatcgccggctatctcatggaactggtcacacaatccgagattagcctacggctgggcctggtgcaaactgcctacgccaatggtgcatccacggactacatagtggaccagctgaagtttcccgtttcgtgcgtacccacgggcgtgaagcacctgcaccacaaggccttggagtacgacattggtgtttacttcgaggcgaatggccacggaacgattgtgttcagtgacaatgctaaggcgacgattgcccaggtggcccaaactaaggagagtgccaagacgttgctgctgctcatcgatcttatcaacgagaccgtgggcgatgccatatccgacatgctgctggtggaaacaatcctaaatcacaagggctgggatgtccaggattggatctcgtcgtacaacgatctgcccaaccgacagctaaaggtgaaggtgcaggatcgcaatgtcatcgagacgacggatgcggaacgcgtgtgcgtaaagcccgaaggtctgcagacggaaatcaaccaggtggtggcgaaatacaagcggggacgctccttcgttcgcccctcgggcaccgaggatgtggtgcgcgtctatgccgaagcagccaccaaagaggacaccgataatcttgcctacgaagtgggtctgctggtccagaaactggccggcggagttggccccccattgacgaagcccaacagcagtgcccacctgtagagcggaatgacgaactaacctctcacgggaatcgacaattgacacagatcctggatggagcaataaatctctttactctaaggtgctcaataactt

SEQ ID NO: 40644 - protein, 549 aa, DROSOPHILA
MSINLRTVYAFAREMYPKTSKETIQYGTAGFRGKAEFLDSVMFRMGVLATLRSRYRGGSVIGVMITASHNPEPDNGVKLVDPKGEMLEASWEAIATDLVNVSDQELEQQVAKIIKDNNIDVTTSSQVFVGMDNRYHSPRLLKAVADGVIALKGNVKEYGIVTTPMLHYFVVAANTKEAYGKPTEEGYYDKLIKAFELLRNGRLENGNYRNSIIYDGANGVGARKMLQFIKRMKGTLNVTVINQGIGVGKINEDCGADYVKVQQSPPKSMPEDVKPYTRCVSVDGDADRVVYFFTDDKGEFHLLDGDRIATLIAGYLMELVTQSEISLRLGLVQTAYANGASTDYIVDQLKFPVSCVPTGVKHLHHKALEYDIGVYFEANGHGTIVFSDNAKATIAQVAQTKESAKTLLLLIDLINETVGDAISDMLLVETILNHKGWDVQDWISSYNDLPNRQLKVKVQDRNVIETTDAERVCVKPEGLQTEINQVVAKYKRGRSFVRPSGTEDVVRVYAEAATKEDTDNLAYEVGLLVQKLAGGVGPPLTKPNSSAHL

SEQ ID NO: 40645 - DNA, 3728 bp, DROSOPHILA
tgctcaccgattttgaagttcttcgtgagcaacgtagggcaggtgaacaatctgggcaggaccatatggatgggtagttctagcttcggcagtacattgccgtcggctatttgaatggtctggatttcggtggcatccttggagtacccctcgtcgcaaccgcaggtttccacacgaaccaattgcatctcaatggacttaatggccgcctccgtgtgttgcaccgtaatgctgccagtaatcggagttgttacgcagaattcactccggtccaggcgcccagttataaggaatctcggcatggaaagtctctccttggcgctggcattcttctgcagtgagtccggactcaaactaaaaggaaccactttctttgaatcctcgcttagaggcaccggtttgtattgcacgcagaactgctggattttggtcgtggctttgccaagaaaattcctttttacagtgcaagtgagttggtaattcacgttaatgaatactccgtggtatgtttcatatagaattcgcggttcctttttgcacaccaaaggcagttcgaaatggaactccgaacggccggcgctcagttttccgggcgcagataactccaggctattctgcagcagattaataggtttcaccgagttatagaaagcatcgaaaagcccaacggtcttagcactaagttgcagattaacgattccctccagatacaatataattccttcgtgttttgtctcctgggcgcactgaaactgcacgcagcccaacagcatgtcctgcggaatatatatttcggtaaaataagaccttaagtaatcgttaattacttacattttcatggtaaaccttattctctctctttaattttatatcgaagagcagtgaactcattttaatcagcaaatgaaaacaagtataacagctgatgtattctacggcgatctggcatcccgggcaccagctgtccatcaagtgggcagtcccaaaacttaggaaacgaaaacaatcccgtttttacataagtttaatttaaacattttcattcaataaaacaaatgcctcgcaatcaaaacgcagagcaggataatccctgcctaaaggtttgtttgctttaagaaatgtaataaataattaattatatctttacaaataggaacaggagctttcatttaaatgcctcaacaaaaacaactttgatcgcgacaagtgcgaaatatattttgccaattataacaattgcaaggagttctgggtgggttcttcaattaaagtgattgttttatggactacatttttatttcccaacagaacaaagtaaaaaccgaaaggagagccaagggaatagctccttatttgccgcccttagaagaacgcgatgggattaaagcagaatatatgaaaggaaaaccccaacaaagctgataaatgtatcttcctatttaattattttgtgtatataaattagctatacatcaggcaccaaagcttgcacaagcatgcattagacctccttgttgtctaaaaggctccatcaaatctgaagatctagatatttttgttatgaataacatttgtatttaactaaacttaaaatgcacatagttcacttatttagccttagctgtgaatagcgtcggcgccaacaatttttaaagcgggcatggcctcctctaacatgaccgtggacaattccagttctagggtctcctttggatcattcaaaatcagtaatttaagtttaggaaaacgatacagacaggccaatccattgctggtgatttgagtgcacgagaggtcgagcacttccaggttagggaagccacctcccgaaatcctatccagacaccagtcatcaaagcttttcacattgtgaaaggacaggaacttaagggagtccaggcagcgcaggttctccagcccctcgtagtaaagttccatgttatcacacctcaaggcctccactttatagcgaggatcaaacttattaggcagtttgaactcgccatctttggaggcccggcgccagtgggtatcgttgatgaacttgacggccccgccgcggtacagtatgaaatgcgccgcagccaattcggcgcccagaatcttgtgcctttccgggacaaactgctgcatgtgccgctcaatacgctcctcccggttctcccaccactgtcgaatgttccgcggacttagatcgatgggcttctgcatcatcacgatgaagtctgaggtttgctccgcattggagaacagcttcagtttgctgttccaatcctccggccggtcgccaatcggagtgcgccacttaagtttctgcttatccgctgccaattccgagcggattctcttcaccgtcgcactgacctcctcctctacctcgcccggctgcgcctgatttgtgggcacagtggatgccgttcgcaggccgcatcgccttaaggagggaaatctacgcgacacgcgctgcaacatccttcgagtgggatatcaatatataaattttagtgggtaaatgtactagagatgcgcatgttatgtgaactgcggcgtgactcacgacgcgatctatagtctaggattgtaatttaataaattatctgcttgctcaaactgaaagctaagtgcaatattatgtagtagaacatatatttcgacagaaatgcagtaaatgcttgttttgtttatttgcgttaggcatgtatataaaattaaaaaaaaaaaaaaaaaaaagtatacataaaaatacaatattttagcccatattttatcacaaaaattacgatttaacagtcagatctgtagatatttttacaaattacttgatacatttaaattgtgtcctactcacgagatgcgcgcatggaatcttagcagctgatgcatcagctgctagcactgaatttcacgacgagttggcaacacaaagccgatgcgacgccatcttgctttagcacgctgaatttcacatttccaccacaagaaaaaagaagagaagaaagaaacgcagacgaccttttgctgaagtgcgtgagataccaccgaaaaaacgaaccaaatcaattaaatgctgattaaccgccagccaaacgattgaaaacaacggtagccaggcgaacgccgcagaaacctgccaacaattacgtgaaccaacgcaagggcacccgtgcaattggcattttaattggcgactttagctgcgaacggcgcgccgaaaatggtcaattcgtctggcagcgaggatggccagttgcggagccccaacgatgtgcactatcacaggtgtgtattatccctggggataaatgcgattggaaaattgttgctgcatacatacataaagaggcgtacatatacacatgctggtgctggtggcgcggcgggaattccgctagaactctagccagattttttgtggcatcccaccgttgacatatcccgcccattcatacagctgtggtcatgatagtagtggttacgggtattttaaaagaataccataaattattttttgatcaataattggatcgacacagctcgattgtgtttgaaactaataatagtgcattttagctttttttccgtttttaaatgacgaaatgaataatttaattactttcaataaaccattaaaggttaggatattaatttaaaaaattgcaaatgtgtatgcattgacttcattggcaaatccaactattattttgaccacacgtgtacccataactgtt

SEQ ID NO: 40646 - DNA, 404 bp, DROSOPHILA
aaacaatcccgtttttacataagtttaatttaaacattttcattcaataaaacaaatgcctcgcaatcaaaacgcagagcaggataatccctgcctaaaggaacaggagctttcatttaaatgcctcaacaaaaacaactttgatcgcgacaagtgcgaaatatattttgccaattataacaattgcaaggagttctggaacaaagtaaaaaccgaaaggagagccaagggaatagctccttatttgccgcccttagaagaacgcgatgggattaaagcagaatatatgaaaggaaaaccccaacaaagctgataaatgtatcttcctatttaattattttgtgtatataaattagctatacatcaggcaccaaagcttgcacaataaaaaaaaaaaaaaaaaa

SEQ ID NO: 40647 - protein, 85 aa, DROSOPHILA
MPRNQNAEQDNPCLKEQELSFKCLNKNNFDRDKCEIYFANYNNCKEFWNKVKTERRAKGIAPYLPPLEERDGIKAEYMKGKPQQS

SEQ ID NO: 40648 - DNA, 2662 bp, DROSOPHILA
tggagctgaacaagaagctactgaacaccatggagggtgaacaattgaagccggagtttgttaagctcaatccacagcacaccattcccacgctggtggacaacggattctccatctgggagtcccgggccatcgccgtctatctggtggagaagtacggcaaggatgactatctgttgcccaacgatcccaagaagcgtgccgtgatcaaccagcgtctgtacttcgacatgggaactctgtacgaaagctttgccaaatactactatccccttttccgcactggaaagcccggatcggatgaggacttgaagagaatcgaaaccgcgtttggatttctcgacaccttcctggagggccaggagtatgtggctggcgaccagctcaccgtggcggacattgccatcctgtccactgtctccacgttcgaagttagtgagttcgacttcagcaagtactccaatgtctccaggtggtacgacaatgccaagaaggtgactccaggatgggatgagaactgggagggcctcatggcgatgaaggcgttgttcgatgcccgtaaattggcggctaagtgatcggtatcacaactatttattgtttatttatgaaactgttgaattaaacgaaataaattattattatgtgttgttcagagtaattaaaaatataatatgttaggggagaagcacactatttttcaaggcatattaaatatcaataaccagaagagaataatataagagaatatacatatgtgtacatatgtgccacaatgattccctgaaattctatagtctgatattacagagagcacaaaacccgaataattcgaacagtttgcacaaacacataaagcaaatatattggggcgcgctcttttctctagaaaacatatacatacatatacaacatgtacatacatgtgtgtgagcatagctttataggcagaagctctagggggtcccaggcagttaatttcttcctctcgaacgggcaagtcgaatcgatcgcacattccgacatggactgcccttggtcggcgcttgccgctccgttctgatggtgggcaaggccctgggtctagaatttaataagaagataatcaatacgctgaaaggggagcaaatgaatcccgatttcatcaagatcaacccgcagcactcgattcccacgctggtagacaatggtttcaccatttgggagtcgcgtgccattctcgtttacctggtggaaaagtacggaaaggatgacgcgctgtaccccaaggatattcagaagcaggcggtgatcaatcaacgcctttacttcgacatggcgttgatgtatcccaccctggccaactactactacaaagcatttaccaccggtcagtttggcagcgaggaggactacaaaaaggtccaggagactttcgatttcctaaacacattcctggagggtcaggactacgtggctggggaccagtataccgtcgccgacattgccattctcgccaatgtctccaatttcgatgttgtgggattcgacattagcaaatatccgaatgtggcccgatggtacgaccatgtcaagaagattacccctggatgggaagaaaactgggcaggagctctggatgtaaagaagaggatcgaggagaaacagaatgctgctaaataattcatttataacgattttattatcattttattatttatttattttattagttgccacagatattgaataaagtgagaagactttacttagaatctgtttttaaagagaatttgttgctaagtgccaaagcattcaagctaatggcaataattgcattatcagagcaatgattagaggttattaaacttttgccgagtatttatagaacaccagtttttttttttttttttgatttgacgctcaacaattctgcatacgattaacaaattacgatgacgagttgtttcccaattattgtatatcgatcaaatcaggaagatagtacatttcgaaatatcgctatataagtgagaaccattgctggtcgcaatcagttttgctcttccgcttcagcgaataggcaaccgtaatcgccccagcaacatggatttctactactcccctcgaagcagtggatcccgcaccattatcatggttgccaaagctcttggactggaactgaacaaaaagcaactgcgtatcacagaaggggaacacctcaagccagaattccttaagctcaatccccagcacaccattcccacgctggtggacaatggattcgccatttgggagtcccgtgccatagccgtctatctggtggaaaagtacggcaaggacgactccctttttcccaatgatccccagaaacgcgcattgatcaatcagcgattgtacttcgatatgggaaccctgcatgactcctttatgaagtactattacccattcatccgtactggtcagcttgggaatgccgagaattataagaaggtcgaagctgcctttgaattcctggacattttcttggagggccaggactacgtggctggtagccagctaactgtggccgacatcgccatcctctccagcgtttccactttcgaagtggttgagtttgacatcagcaagtatccaaatgtggcacgttggtacgccaatgccaaaaagatcacacccggat

SEQ ID NO: 40649 - DNA, 662 bp, DROSOPHILA
gtcgaatcgatcgcacattccgacatggactgcccttggtcggcgcttgccgctccgttctgatggtgggcaaggccctgggtctagaatttaataagaagataatcaatacgctgaaaggggagcaaatgaatcccgatttcatcaagatcaacccgcagcactcgattcccacgctggtagacaatggtttcaccatttgggagtcgcgtgccattctcgtttacctggtggaaaagtacggaaaggatgacgcgctgtaccccaaggatattcagaagcaggcggtgatcaatcaacgcctttacttcgacatggcgttgatgtatcccaccctggccaactactactacaaagcatttaccaccggtcagtttggcagcgaggaggactacaaaaaggtccaggagactttcgatttcctaaacacattcctggagggtcaggactacgtggctggggaccagtataccgtcgccgacattgccattctcgccaatgtctccaatttcgatgttgtgggattcgacattagcaaatatccgaatgtggcccgatggtacgaccatgtcaagaagattacccctggatgggaagaaaactgggcaggagctctggatgtaaagaagaggatcgaggagaaacagaatgctgctaaataa

SEQ ID NO: 40650 - protein, 199 aa, DROSOPHILA
MVGKALGLEFNKKIINTLKGEQMNPDFIKINPQHSIPTLVDNGFTIWESRAILVYLVEKYGKDDALYPKDIQKQAVINQRLYFDMALMYPTLANYYYKAFTTGQFGSEEDYKKVQETFDFLNTFLEGQDYVAGDQYTVADIAILANVSNFDVVGFDISKYPNVARWYDHVKKITPGWEENWAGALDVKKRIEEKQNAAK

SEQ ID NO: 40651 - DNA, 2648 bp, DROSOPHILA
tacatacatctactttctcgattccgtttgccggtgattcgctttgtgtacagctgcgctgatctttctccgatctccgctttagaatacatattataccataaaactgaatatgttcaagtttagattgatatataaaaaagtaataaattattattattaaatttatgaagatctggggtgtgtccacatgtactcttacttccatatgacggcttgaacatacttttgaacatatttttcgaaatgtcaacaaaaaatgttgaaaatttttcctgttcttccacttgttttctcttgttcttattgaagtttgatttttaacatttaaaaaaccttcgtatgcatttgatttaatgaatcctctttgttttaattattttgctcggagcactataaaaacagaaattaaaatatcgatatatttatatataaacatataatataatatgattaccatatccgttactcagctagtgtgaatgtgaacgcgaaatttcatcatttttcatttttcattttctttttttgtttactacaataatacaattcatatataacacctttaagctattttatttcatcaccctttgtttgctgcctgtagtgtatggtaccaattttgtgactcatggaagtttacttatttaaatcgctccattccccttacgataaccatctaatcatacaaactagcataagctcgaacagaagtatacacattatgcacttgaaattatcattagcgctttcgtggcaccccttattagtcataatatgtacatacctcaaaaccgaaaagaacaaaagtttgaaaaagtttattctagccatgactggcattttttccaattgcaagacaaacaaaccacgcaagcataagcaaatgggtggagataattggtcgagcatttccctataaaagaaattaggtttactgggaattgtcaggcgtagttcagcactcagcaggttaacaaccagttgcaatatccccaacatggacttttactacatgccaggtggtggaggatgccgcacggtcatcatggtggccaaggctctcggcctggagctgaacaagaagctactgaacaccatggagggtgaacaattgaagccggagtttgttaagctcaatccacagcacaccattcccacgctggtggacaacggattctccatctgggagtcccgggccatcgccgtctatctggtggagaagtacggcaaggatgactatctgttgcccaacgatcccaagaagcgtgccgtgatcaaccagcgtctgtacttcgacatgggaactctgtacgaaagctttgccaaatactactatccccttttccgcactggaaagcccggatcggatgaggacttgaagagaatcgaaaccgcgtttggatttctcgacaccttcctggagggccaggagtatgtggctggcgaccagctcaccgtggcggacattgccatcctgtccactgtctccacgttcgaagttagtgagttcgacttcagcaagtactccaatgtctccaggtggtacgacaatgccaagaaggtgactccaggatgggatgagaactgggagggcctcatggcgatgaaggcgttgttcgatgcccgtaaattggcggctaagtgatcggtatcacaactatttattgtttatttatgaaactgttgaattaaacgaaataaattattattatgtgttgttcagagtaattaaaaatataatatgttaggggagaagcacactatttttcaaggcatattaaatatcaataaccagaagagaataatataagagaatatacatatgtgtacatatgtgccacaatgattccctgaaattctatagtctgatattacagagagcacaaaacccgaataattcgaacagtttgcacaaacacataaagcaaatatattggggcgcgctcttttctctagaaaacatatacatacatatacaacatgtacatacatgtgtgtgagcatagctttataggcagaagctctagggggtcccaggcagttaatttcttcctctcgaacgggcaagtcgaatcgatcgcacattccgacatggactgcccttggtcggcgcttgccgctccgttctgatggtgggcaaggccctgggtctagaatttaataagaagataatcaatacgctgaaaggggagcaaatgaatcccgatttcatcaagatcaacccgcagcactcgattcccacgctggtagacaatggtttcaccatttgggagtcgcgtgccattctcgtttacctggtggaaaagtacggaaaggatgacgcgctgtaccccaaggatattcagaagcaggcggtgatcaatcaacgcctttacttcgacatggcgttgatgtatcccaccctggccaactactactacaaagcatttaccaccggtcagtttggcagcgaggaggactacaaaaaggtccaggagactttcgatttcctaaacacattcctggagggtcaggactacgtggctggggaccagtataccgtcgccgacattgccattctcgccaatgtctccaatttcgatgttgtgggattcgacattagcaaatatccgaatgtggcccgatggtacgaccatgtcaagaag

SEQ ID NO: 40652 - DNA, 648 bp, DROSOPHILA
atggacttttactacatgccaggtggtggaggatgccgcacggtcatcatggtggccaaggctctcggcctggagctgaacaagaagctactgaacaccatggagggtgaacaattgaagccggagtttgttaagctcaatccacagcacaccattcccacgctggtggacaacggattctccatctgggagtcccgggccatcgccgtctatctggtggagaagtacggcaaggatgactatctgttgcccaacgatcccaagaagcgtgccgtgatcaaccagcgtctgtacttcgacatgggaactctgtacgaaagctttgccaaatactactatccccttttccgcactggaaagcccggatcggatgaggacttgaagagaatcgaaaccgcgtttggatttctcgacaccttcctggagggccaggagtatgtggctggcgaccagctcaccgtggcggacattgccatcctgtccactgtctccacgttcgaagttagtgagttcgacttcagcaagtactccaatgtctccaggtggtacgacaatgccaagaaggtgactccaggatgggatgagaactgggagggcctcatggcgatgaaggcgttgttcgatgcccgtaaattggcggctaagtga

SEQ ID NO: 40653 - protein, 215 aa, DROSOPHILA
MDFYYMPGGGGCRTVIMVAKALGLELNKKLLNTMEGEQLKPEFVKLNPQHTIPTLVDNGFSIWESRAIAVYLVEKYGKDDYLLPNDPKKRAVINQRLYFDMGTLYESFAKYYYPLFRTGKPGSDEDLKRIETAFGFLDTFLEGQEYVAGDQLTVADIAILSTVSTFEVSEFDFSKYSNVSRWYDNAKKVTPGWDENWEGLMAMKALFDARKLAAK

SEQ ID NO: 40654 - DNA, 5076 bp, DROSOPHILA
tctatggaccagtcggcgctccgctcctggtatgtaaatataaatttggccccggcatttcgctccagcagaaaagcaactgtgaccacgatatcctcgaacacgctgggatcgtagaagcagtctgctgcaatgataaggtccagaggcggcagtcggaacacgctgttcagcagcaggccccaactcaggcccaccacatcgatatcaacgcccggctgcagttgattggccaggcaggactttcggatatgggccagtgacttgggcagaatgcagttgtcagtaagtaccacttgggcgcggcatttggccgccagaatgccgggcagggcggtgccgcttcccagctccaggatgcgcttgcccgccagtgtctgtcggcgctcccacaggaagtgggctaaaattggtgcgcaaggccatgtgtagaaggagtaggcaccctgaagcagctgtaggcggacactttagatactacacgaacacctggttctaaggattacctcaggtattttgatctccagtcgctcggcgggtgatccgctgaagacaaacttgcggatatgctcggcagtggctgtggccgccacaatgtcattgtcctcgctgccgctcttcatgtggaaacgcatcttagctcaagcatgcaggagtattactattttcactaaactaaagttatttttcagcgttttgtttacaacctgtttgattagcgatgtcacttcgttgcgataacttaatcgataaaaattgaggcgagtgaagcaaatagtgaccgaagggtgacttcagtagcagttgacattttaagccaccatttctaagcttcaattaaaaacgtttttgggtatcccaattcgtccagtttatttaaaggtatgcatcccaattgaaagtggctgcagctgagcgctcctctaaacaaaattctcgtgaccgcgattgctgctgaacgatgactagtgtataagcaatcgaatatcgcaaatcttgtatgatcactgtggtgttttgcttttccgattgccatggagggattcagattcttggaagaatgagctccgtaaataaaataaagcttaacgaaaacaacaagatgcactcttttgggaactgggagcggtgccggaatctgggagagggcggattcggcctagtgatccattggcgaaaccgaacaacgggccgtgaaattggtgagctataaacaccttatgggctaacactaatatacatatacatataaatattttaaggattttctttttcgcaaacacacattaccagcccccaaacaccctccccctttccagccttactcataaataaataaattttttgttgtattttgtatatatccaaataataaaaccataaaaacaacatacatatacatatgaacatgtttgttgtccaacaattcccagaaaccgagctgaggcatgcgtttccgggtggtccactgatagtgatagagggctcgagttttgcgcgtttggtgtggtctccgcattagatatgtcgcttatagcctttcggctgagttagccgatatggcagatattttaagcgtcagtcttaagtgtttatttattttccacatagccaccaagcacataaaggagatgggggccctgagtgccgatcagcaagtcaagctcagcgagcgttggaacaaggagctgaactggtctcgtcagtttaaaaactttccccatattgtggctggcgtggacatcgaggatccggactttttggagtacctgaatggcatgtttagtgccaagttgcctgttattgtgctggaatactgtaacggtggagacgtgaggaagcgtctgcagagcccggagaatgctaatggtctgacggagttcgaggtgcggcagatactgggagccctacgtaaggccctacattttctgcactcgcagtgtgggatttgccaccgcgatttgaagccggacaatatagtaatccaacgtggagttgatggcaaaaaaatctataagctaaccgattttggactcgcccgaggaactcccgaccagaccatggtgcagagcgtggtgggcacccgacattactatgccccagaagtggtggaaaatggtttttacaactcgaccgtggatttatggtccttcggagtaattgcctatgagctggtcactggtgagctgcccttcatcccccatcaaacccttaaaaacattatactcaatctgataaaaaagcccgccaaatgcattgctatcacagaggatccggaggataacactcgtttcgtgaatcagtttgaactgccacagacgcaccatctgtcgcggccctgggctgctcagttcaccaaatggctggcaagcccgttaaactcaaactacaaggaacgcggtcaactagcagctaataacgttccagtcgtcttcgctgacctggacaaaatactcaatatgaatgtgctaactatttttgctgttaacaactgcgaacgacttgagtatgcggtctctgcggagatgactatgaaggatctaattgcgttgattgtcctggacactggaatggacgaaaaggaactgtacttcgtgctgcccacttcccatccgcacaaaacgattacgcctaaaagtacgcccttgcagctgtatgtggaggagtggagtgacacaagcaaagattcacgaaagtggactaagcgcagcaatccacctgtgatgttgtacatctttcaggtcaagaaagagtgtgactacaaaatacctgaacccattctatcaattctttctcgaaagtttatcgctaacaaatttaagacgaaggaaagatggctgcaaaaacgtgttgtcttggatatgctctacgtgctaaccaaagagcaagcaagatacgaaatgctcgtgtcaggaataaacgagcgagcgttgtcgttggaagacgaaatgatggaaaactcgtttatagacagcatcgataagcagcgtatcataatctcctttgcctatgatcagctaacaagcttgctaaaagaagcccaagcaaagattccgtcccgccaggtagcagttcttactatactccttaatcccgtagtaattcagtgtttttttccagcttatcagcagtgcacagtgggagaagcttaaccgcaattataatttcattatacaaagcgcaaaatcaattaggtctttcttggaagcctgcttgcgggaagccaaggacatggttaaaaccaccaatcaactacggaaagaagtttgcgagaaagacctattcgattggtaaggtttttatatcaaatgaccagaccaatatgtataatgcagcgtttttattttttaattcttagcgctcgattttataagaaatatctctgcaatggtgcgataatttcgccatcagagttaaataatgacgccgaggaattcgcaaaatctcgtttcaagttatataacgagggcgaggctagacatctgcccaagtctatcgatcacatgcattacttatattttaagaccaaggagtccatcccggtccttctacaacaattttgcgacatcaagaaggagatatttcagattaacttgcagatgttgatgtcagcctcaagcacaccacctccgaagcttgagctaagcgcagcgatggaccgcctagctataagctctggctcacccagctcggatccatttgactctctacgcacgataaacgctatcgaagaggcagaaaggattaacaacatgtaagttaatacagaaaactgttaaaaatttactaataaatcatttgggttacagacttgttaatgaaatgaaaattgatcactattagtgtgcattctggtcgaccatacattttaatttgatttcaatcaaaccgcataaatatttctccattcgaaatcatacaaatgtgtatttcgattttttgttattgcccgcttatccaattaattagctttattagtttcatagaatctttaatgttctcatttggaaacgtttttttttttgtttagaaatatgtgttacgaacattgaaataaatgacaaaccttattttttactagctacgctttttcactggaaaacccaagtgtttacacgacttaatttatgttcgcggtatcgtgaaatagtgcacttgcatttgatctgatttccagatgtgtatgttactatatcaatacttgctatatattcaatccacagtagattatataattttatgacatatatatatgtatgtatatatatatatagacagaccgcttaatttctgaataaacagctgtatatagcttggcttggtcaattgaaatgaaacttgctgaggattgcaatgtcacgggaaattgcacatgcggcagaacagagaattagtcggcttttggccatgccagacgttgctataaaagaaaatcgaacaactgggcagccaccagaagccgaaagccagtgaccactgccagagcttcaaggagatcgcaaggaaacacaaaatgaaccaatactttttgacgggcttgcttttggtgctaggagtagtactacatatagactggacaacagccaaacctccggcgaaaaaggcggatcagctgcgtacgtaaatcaatttgtctttcttatatttttactaacaatcgcgtgagtatagtgatattttgaaacttaacaattatttaaatcggaataatgaaaaagtaaaattatattgttgtttcttccttttagcatcctttcttaaggtatgccatcgcaatgcacccgacctagacacctgtgttcgagaatcttatgaggaactacgtccaaggcttatggaaggtataccagagctatatatacctgccatggagccgctggttgttcctcaggtcaagatggaccaggactccggggccatatatttgcactcagtgtaccgaaatgtcaaagtcacaggcatctcaaagcacacggtcaatgagctgcgtctggagccttcaaagctcaagttcattttgtctctgaccttcccaaagctgcatatggaatcggactacagcattaaggtcagtag

SEQ ID NO: 40655 - DNA, 2499 bp, DROSOPHILA
atgatcactgtggtgttttgcttttccgattgccatggagggattcagattcttggaagaatgagctccgtaaataaaataaagcttaacgaaaacaacaagatgcactcttttgggaactgggagcggtgccggaatctgggagagggcggattcggcctagtgatccattggcgaaaccgaacaacgggccgtgaaattgccaccaagcacataaaggagatgggggccctgagtgccgatcagcaagtcaagctcagcgagcgttggaacaaggagctgaactggtctcgtcagtttaaaaactttccccatattgtggctggcgtggacatcgaggatccggactttttggagtacctgaatggcatgtttagtgccaagttgcctgttattgtgctggaatactgtaacggtggagacgtgaggaagcgtctgcagagcccggagaatgctaatggtctgacggagttcgaggtgcggcagatactgggagccctacgtaaggccctacattttctgcactcgcagtgtgggatttgccaccgcgatttgaagccggacaatatagtaatccaacgtggagttgatggcaaaaaaatctataagctaaccgattttggactcgcccgaggaactcccgaccagaccatggtgcagagcgtggtgggcacccgacattactatgccccagaagtggtggaaaatggtttttacaactcgaccgtggatttatggtccttcggagtaattgcctatgagctggtcactggtgagctgcccttcatcccccatcaaacccttaaaaacattatactcaatctgataaaaaagcccgccaaatgcattgctatcacagaggatccggaggataacactcgtttcgtgaatcagtttgaactgccacagacgcaccatctgtcgcggccctgggctgctcagttcaccaaatggctggcaagcccgttaaactcaaactacaaggaacgcggtcaactagcagctaataacgttccagtcgtcttcgctgacctggacaaaatactcaatatgaatgtgctaactatttttgctgttaacaactgcgaacgacttgagtatgcggtctctgcggagatgactatgaaggatctaattgcgttgattgtcctggacactggaatggacgaaaaggaactgtacttcgtgctgcccacttcccatccgcacaaaacgattacgcctaaaagtacgcccttgcagctgtatgtggaggagtggagtgacacaagcaaagattcacgaaagtggactaagcgcagcaatccacctgtgatgttgtacatctttcaggtcaagaaagagtgtgactacaaaatacctgaacccattctatcaattctttctcgaaagtttatcgctaacaaatttaagacgaaggaaagatggctgcaaaaacgtgttgtcttggatatgctctacgtgctaaccaaagagcaagcaagatacgaaatgctcgtgtcaggaataaacgagcgagcgttgtcgttggaagacgaaatgatggaaaactcgtttatagacagcatcgataagcagcgtatcataatctcctttgcctatgatcagctaacaagcttgctaaaagaagcccaagcaaagattccgtcccgccagcttatcagcagtgcacagtgggagaagcttaaccgcaattataatttcattatacaaagcgcaaaatcaattaggtctttcttggaagcctgcttgcgggaagccaaggacatggttaaaaccaccaatcaactacggaaagaagtttgcgagaaagacctattcgattgcgctcgattttataagaaatatctctgcaatggtgcgataatttcgccatcagagttaaataatgacgccgaggaattcgcaaaatctcgtttcaagttatataacgagggcgaggctagacatctgcccaagtctatcgatcacatgcattacttatattttaagaccaaggagtccatcccggtccttctacaacaattttgcgacatcaagaaggagatatttcagattaacttgcagatgttgatgtcagcctcaagcacaccacctccgaagcttgagctaagcgcagcgatggaccgcctagctataagctctggctcacccagctcggatccatttgactctctacgcacgataaacgctatcgaagaggcagaaaggattaacaacatgtaagttaatacttgttaatgaaatgaaaattgatcactattagtgtgcattctggtcgaccatacattttaatttgatttcaatcaaaccgcataaatatttctccattcgaaatcatacaaatgtgtatttcgattttttgttattgcccgcttatccaattaattagctttattagtttcatagaatctttaatgttctcatttggaaacgtttttttttttgtttagaaatatgtgttacgaacattgaaataaatgacaaaccttatttttt

SEQ ID NO: 40656 - protein, 741 aa, DROSOPHILA
MITVVFCFSDCHGGIQILGRMSSVNKIKLNENNKMHSFGNWERCRNLGEGGFGLVIHWRNRTTGREIATKHIKEMGALSADQQVKLSERWNKELNWSRQFKNFPHIVAGVDIEDPDFLEYLNGMFSAKLPVIVLEYCNGGDVRKRLQSPENANGLTEFEVRQILGALRKALHFLHSQCGICHRDLKPDNIVIQRGVDGKKIYKLTDFGLARGTPDQTMVQSVVGTRHYYAPEVVENGFYNSTVDLWSFGVIAYELVTGELPFIPHQTLKNIILNLIKKPAKCIAITEDPEDNTRFVNQFELPQTHHLSRPWAAQFTKWLASPLNSNYKERGQLAANNVPVVFADLDKILNMNVLTIFAVNNCERLEYAVSAEMTMKDLIALIVLDTGMDEKELYFVLPTSHPHKTITPKSTPLQLYVEEWSDTSKDSRKWTKRSNPPVMLYIFQVKKECDYKIPEPILSILSRKFIANKFKTKERWLQKRVVLDMLYVLTKEQARYEMLVSGINERALSLEDEMMENSFIDSIDKQRIIISFAYDQLTSLLKEAQAKIPSRQLISSAQWEKLNRNYNFIIQSAKSIRSFLEACLREAKDMVKTTNQLRKEVCEKDLFDCARFYKKYLCNGAIISPSELNNDAEEFAKSRFKLYNEGEARHLPKSIDHMHYLYFKTKESIPVLLQQFCDIKKEIFQINLQMLMSASSTPPPKLELSAAMDRLAISSGSPSSDPFDSLRTINAIEEAERINNM

SEQ ID NO: 40657 - DNA, 7288 bp, DROSOPHILA
tagcgaggatcaaacttattaggcagtttgaactcgccatctttggaggcccggcgccagtgggtatcgttgatgaacttgacggccccgccgcggtacagtatgaaatgcgccgcagccaattcggcgcccagaatcttgtgcctttccgggacaaactgctgcatgtgccgctcaatacgctcctcccggttctcccaccactgtcgaatgttccgcggacttagatcgatgggcttctgcatcatcacgatgaagtctgaggtttgctccgcattggagaacagcttcagtttgctgttccaatcctccggccggtcgccaatcggagtgcgccacttaagtttctgcttatccgctgccaattccgagcggattctcttcaccgtcgcactgacctcctcctctacctcgcccggctgcgcctgatttgtgggcacagtggatgccgttcgcaggccgcatcgccttaaggagggaaatctacgcgacacgcgctgcaacatccttcgagtgggatatcaatatataaattttagtgggtaaatgtactagagatgcgcatgttatgtgaactgcggcgtgactcacgacgcgatctatagtctaggattgtaatttaataaattatctgcttgctcaaactgaaagctaagtgcaatattatgtagtagaacatatatttcgacagaaatgcagtaaatgcttgttttgtttatttgcgttaggcatgtatataaaattaaaaaaaaaaaaaaaaaaaagtatacataaaaatacaatattttagcccatattttatcacaaaaattacgatttaacagtcagatctgtagatatttttacaaattacttgatacatttaaattgtgtcctactcacgagatgcgcgcatggaatcttagcagctgatgcatcagctgctagcactgaatttcacgacgagttggcaacacaaagccgatgcgacgccatcttgctttagcacgctgaatttcacatttccaccacaagaaaaaagaagagaagaaagaaacgcagacgaccttttgctgaagtgcgtgagataccaccgaaaaaacgaaccaaatcaattaaatgctgattaaccgccagccaaacgattgaaaacaacggtagccaggcgaacgccgcagaaacctgccaacaattacgtgaaccaacgcaagggcacccgtgcaattggcattttaattggcgactttagctgcgaacggcgcgccgaaaatggtcaattcgtctggcagcgaggatggccagttgcggagccccaacgatgtgcactatcacaggtgtgtattatccctggggataaatgcgattggaaaattgttgctgcatacatacataaagaggcgtacatatacacatgctggtgctggtggcgcggcgggaattccgctagaactctagccagattttttgtggcatcccaccgttgacatatcccgcccattcatacagctgtggtcatgatagtagtggttacgggtattttaaaagaataccataaattattttttgatcaataattggatcgacacagctcgattgtgtttgaaactaataatagtgcattttagctttttttccgtttttaaatgacgaaatgaataatttaattactttcaataaaccattaaaggttaggatattaatttaaaaaattgcaaatgtgtatgcattgacttcattggcaaatccaactattattttgaccacacgtgtacccataactgttgcatgtgtgtatgcagaaagtggacaattttccaccaaccatctttataagttgactataacgaatagtacatgctaattcttgatacgaaatttgcgtttgtacaaagaacattcgcccccaatatatacatgtatatcaccccaacatccctttcgcgcttgtttgctctccttgaaaatgataaccaaaataccaaatcaaaagaaaacaaaaccaatttttgacgattaaaaacttattgattttattgaatcgtttaattgacttgaattttttcgttgcaaataggccaaaaagtgtgtacttgtcccaagaccgaggcgcgcgatggccaacaacaaacctaataataatcgtaataaaagtaaaaataaaaaccaaccaaaaaaaaaaaatgaaaataaaaacgaacgaaaaagtgcaagctagaggcaaaattcgagtttaaaactgtgcacctgcagtgtcaatggcagacgggaccgaatcttctcaagccaacctacattaatctcgcttgacccgccgctgtcaagttatatgtgttccgagaaccgaatacagaaaacccgagattcgcaatagagatccgataagctccgaaccgatggatcgatcgattcgatccctctcatatgctgctggcggtaaattgtaatactctgtattaatctcaattgaatgaaacacacacaatattgtatttatactactttgctaatgcctctttccaagtcctgtctcaatgtctttcgtgtctctctgtttctcaaaagataactactcccattcccagcaggttgcgcagtcagtcgtgtaagtgtttgcattttacagcccttgggagctttggcgctccgagctccatggaatagttacgggatccgggatcaggtaagtactccatttgatagcactcaatggtgggtcgatttttagttttgtgtttgtttatattcctattaaaacaatttataaaagactaagcttagaaaatctattaccagattcacagacatatgcgaacatttgttcttaaacgactccgtgattacttgtctccatggcttccaaccttgtttacttgccctcaaatcgacccaccaaatttcacccgttgctgctcaaatatggaacaaaaacgccaattatctgagcaacaccgagtcgattgcctcaaataaatcactaatgattcgcttatgtactgcaccaaagtttctgtatctaatctcgaaagaattccagagctagcgtggactcgagcttttaatgtctccaagggctagagtaaaatgtaatccaaacaccgactgcagcaaaacacgcaacctgcaacgagcaacatgcaacacggtcagagcagcgcctgttctactgggtcttcagcaggcatcggtccagaatcatcagcagatgggacggacaccacttaaagcatgacaccataattttggactttctctcttacttttagccgaggcgaggaggatgagcacgagggcgacgctgatgccttgtacattcaaccaccgcaggccagccgagaatcaggatccggtcccaggcgcgagaagaagaaacattcccgcgagcgtcgacgccacaaggagcgtgatgacgtaggcggtgctgcactagcactagaacgggatcatcgatatgactatcggagccgggaggagcactaccaccaccaccaacgcgaacggagcagcaatgcggctgcagcctatgcgaaacaccacctgggccatgcctaccattaccctcagccgcctcaacagcagcaacagcctctaccgccggcgcccagctatgctgcccaccattatcatcatcaccagcatttaagtggagctcgagctgctccccgcgaataccattcctatccatcgggctaccattcgggcagtcgacacggcgactacccaatggaggagccaacgcgacgcagcagtaagtacgcggagagcaaggatgctgagagcctggaacaggatctgcgatcgaggttgctgaaaaagcgccataactacgttaaggattatgaaacggaggagaactatgagcatcgggtcgagagaagtgatcgccgggagggaggacgcaaagagcgggagagaactgtgcgaagtacccacaagcaaaaccgtcacgaccgagtcattgagctgctggacagtcctgagcaggagcaccaccatcagcaccagcacaaatcgcatcgcagcaagtggcgcgaggaggttgaggttatcagacgaaaggtgcccgaggacttggagctgttggctcgcagggaaaaacttcttgccgctgaacgggaaagccgccagcgaaaacagacggctcgtgaggaactggaagctcggcgggagttgctccgcgagcgaaacgagcacagtgatgcacttagtccaacaacagtggctgcaagtgtaaccgcaggtctgaacattcatgtgaagaggaagtccaagccggataactatgagaaggaaatcaaactcaagaagcggcgggaagatgatatcgaggttatccgagatgatgacgatgaggaaagcgaggagagcgactcaaacgaggaggttcctgagcaagacagcgaaggaagcgcaacagagtctggaagcgaagacagctatgctagcaaaaagaagagcaagattaaatccaagtctcaattggaagacgatgacgaggatttacccttacccgacagtccacttagcgtgggtgagctatacaagtcgcccaagcaacgtcagcgatctcgctctgtaagctccaagagcagctcccagtccagtcgaagcagtcggtccagatcccgttctagaagtcaaagcagcctagaggatgaggtagatcgtcaagacgtgggggcagatgcctcacccagcagcagcacacgcagcgaggaacgtggaatgacccaagagcagccggaagagaagcccgaggagaaactcaaagagaaacagaagtctctggaggagcaaattccgtgcgatgacaagggcattcccctgcccaactattatcccggtgtgcagggctgccggtctgtggaggaattccagtgtctaaaccgcatcgaagagggaacctatggagtggtatatcgagccaaggacaaaagaaccaatgagattgtggctcttaagcgtctgaaaatggagaaggaaaaggagggatttccgataacatcactcagggagatcaacactcttctcaagggtcagcacccgaatattgtgaccgttcgcgagatcgtggtcggatccaacatggataagatatttattgtgatggactatgtagaacacgacctgaaatccctgatggaaacgatgaaaaatcgtaagcagagctttttccccggagaagtcaaatgtctgacgcagcagcttctgcgggcggtggcccacctccatgacaattggatattgcatcgtgacctgaagacctccaatctcctcttgtcccacaagggcattctcaaggtgggtgatttcggattggcaagggagtatggatcgccgatcaagaagtatacctcacttgttgtcactctctggtatcgtgcacccgagctccttctctgctcgccggtttactccacgcccatagacgtctggtcggtaggctgcattttcgccgaattcttgcagatgctgccgctctttccgggaaaatctgaaatcgatgagcttaacaggatctttaaggtaagctgtggttgagcattaaagtttagttattaaaataagcttgttgaacaattgttagtattaactttgaaattcatttgccgagaatgcttattgacttttgatttattgttctaggaattgggaactccgaacgagaagatctggccaggatacaccgagctcccagccgtgaagaacatgttgtcgcagaactctcagtttaccgagtatcccgtctcgcaactgcgcaagcacttccaggagaagacctctgaaatgggcttgtcgctgctgcagggtctgctgacgtacgatccgaaacaaagactgagcgccgacgcggcactaaagcacggcttcttcaaggagctgccattgcccatcgatccatccatgtttcccacctggccggccaagagcgagttgggagcccgcaaggcgcaagcctcttcccccaaaccgccatccggtggctcgcagttcaagcaactaggccgcgacgagcccatcatcgtgggaccgggaaacaagctctcatctgggattatcactggcaacaagaagagccacggagctggtggatcgtcggctagcacgggatttgtcctgaacgctggaataacgcagcgccagttggccatgggaccgggattcagtctgaagttctgattctgtgtgttttagcccattacgattacgattaattgttatgtatagttagcgatgtaagtggaaaatttcgtttaattgtatgtgtataaatattgttccatatataatttaaaaagccatacaaagcaattgggatgtataatcatttttcacctcaagagcggcaatgccatgtgggtgggtcaattcaaggaatatgaaagttggctataaacatatcgaaaattactccatcgttttattgtgcaaacaacttttcaaggaccaaaactcaacccaccctcaacactccgaatgcgtccacacctgtaactttaaaacttagcctaggggaatactaacgctctacctgaaatgcctaagtggaccacagatagaagtaagtgctttgccacgtgggaatgtaatctttaaggggtttggcaaccaccttagcaatgggcacacttgtggccacaaagtcgaggatccgctccagtctggatttggtgaagctgtcatagaacggcgatcggaccaggaagtacatgatgtttatgcatcgcctgctcagctccagtttttgttgcttggacattaggtcgcgatgctggcggtagaggtgaatgctatacaaatcaatggataatgctaccatatattgcttccaacttctccggccgaacagccccatggcgaccaggtggattagtggcttcgatatatacaggtattctgcttgcaggagtttcctcggaatttgcgtcttcgccgcttcattgttgtctatatgaagcttgaagtcgcggtattgcaggggaggagcaccctccactttacgaatcacacggccagatcgcttcaattggaaggtaatggagtgctgggactgcaataaatcgttcgtggaggaggccacaccatcccccgaattcttcctctgtttggcccttcgattcagtgcggcgatgggcggtgaggtgattatatccgaggttgagtgtttcaagataaagaaacggcccgctgccttgaaggcctgtattagcgctatcaccagccacttgccggattgaccgaaaagccgacgggctgatatctcgatgaaaacctcgctatattcgagcgtcgtcaacgtgacctttagacg

SEQ ID NO: 40658 - DNA, 3239 bp, DROSOPHILA
atttccaccacaagaaaaaagaagagaagaaagaaacgcagacgaccttttgctgaagtgcgtgagataccaccgaaaaaacgaaccaaatcaattaaatgctgattaaccgccagccaaacgattgaaaacaacggtagccaggcgaacgccgcagaaacctgccaacaattacgtgaaccaacgcaagggcacccgtgcaattggcattttaattggcgactttagctgcgaacggcgcgccgaaaatggtcaattcgtctggcagcgaggatggccagttgcggagccccaacgatgtgcactatcacagccgaggcgaggaggatgagcacgagggcgacgctgatgccttgtacattcaaccaccgcaggccagccgagaatcaggatccggtcccaggcgcgagaagaagaaacattcccgcgagcgtcgacgccacaaggagcgtgatgacgtaggcggtgctgcactagcactagaacgggatcatcgatatgactatcggagccgggaggagcactaccaccaccaccaacgcgaacggagcagcaatgcggctgcagcctatgcgaaacaccacctgggccatgcctaccattaccctcagccgcctcaacagcagcaacagcctctaccgccggcgcccagctatgctgcccaccattatcatcatcaccagcatttaagtggagctcgagctgctccccgcgaataccattcctatccatcgggctaccattcgggcagtcgacacggcgactacccaatggaggagccaacgcgacgcagcagtaagtacgcggagagcaaggatgctgagagcctggaacaggatctgcgatcgaggttgctgaaaaagcgccataactacgttaaggattatgaaacggaggagaactatgagcatcgggtcgagagaagtgatcgccgggagggaggacgcaaagagcgggagagaactgtgcgaagtacccacaagcaaaaccgtcacgaccgagtcattgagctgctggacagtcctgagcaggagcaccaccatcagcaccagcacaaatcgcatcgcagcaagtggcgcgaggaggttgaggttatcagacgaaaggtgcccgaggacttggagctgttggctcgcagggaaaaacttcttgccgctgaacgggaaagccgccagcgaaaacagacggctcgtgaggaactggaagctcggcgggagttgctccgcgagcgaaacgagcacagtgatgcacttagtccaacaacagtggctgcaagtgtaaccgcaggtctgaacattcatgtgaagaggaagtccaagccggataactatgagaaggaaatcaaactcaagaagcggcgggaagatgatatcgaggttatccgagatgatgacgatgaggaaagcgaggagagcgactcaaacgaggaggttcctgagcaagacagcgaaggaagcgcaacagagtctggaagcgaagacagctatgctagcaaaaagaagagcaagattaaatccaagtctcaattggaagacgatgacgaggatttacccttacccgacagtccacttagcgtgggtgagctatacaagtcgcccaagcaacgtcagcgatctcgctctgtaagctccaagagcagctcccagtccagtcgaagcagtcggtccagatcccgttctagaagtcaaagcagcctagaggatgaggtagatcgtcaagacgtgggggcagatgcctcacccagcagcagcacacgcagcgaggaacgtggaatgacccaagagcagccggaagagaagcccgaggagaaactcaaagagaaacagaagtctctggaggagcaaattccgtgcgatgacaagggcattcccctgcccaactattatcccggtgtgcagggctgccggtctgtggaggaattccagtgtctaaaccgcatcgaagagggaacctatggagtggtatatcgagccaaggacaaaagaaccaatgagattgtggctcttaagcgtctgaaaatggagaaggaaaaggagggatttccgataacatcactcagggagatcaacactcttctcaagggtcagcacccgaatattgtgaccgttcgcgagatcgtggtcggatccaacatggataagatatttattgtgatggactatgtagaacacgacctgaaatccctgatggaaacgatgaaaaatcgtaagcagagctttttccccggagaagtcaaatgtctgacgcagcagcttctgcgggcggtggcccacctccatgacaattggatattgcatcgtgacctgaagacctccaatctcctcttgtcccacaagggcattctcaaggtgggtgatttcggattggcaagggagtatggatcgccgatcaagaagtatacctcacttgttgtcactctctggtatcgtgcacccgagctccttctctgctcgccggtttactccacgcccatagacgtctggtcggtaggctgcattttcgccgaattcttgcagatgctgccgctctttccgggaaaatctgaaatcgatgagcttaacaggatctttaaggaattgggaactccgaacgagaagatctggccaggatacaccgagctcccagccgtgaagaacatgttgtcgcagaactctcagtttaccgagtatcccgtctcgcaactgcgcaagcacttccaggagaagacctctgaaatgggcttgtcgctgctgcagggtctgctgacgtacgatccgaaacaaagactgagcgccgacgcggcactaaagcacggcttcttcaaggagctgccattgcccatcgatccatccatgtttcccacctggccggccaagagcgagttgggagcccgcaaggcgcaagcctcttcccccaaaccgccatccggtggctcgcagttcaagcaactaggccgcgacgagcccatcatcgtgggaccgggaaacaagctctcatctgggattatcactggcaacaagaagagccacggagctggtggatcgtcggctagcacgggatttgtcctgaacgctggaataacgcagcgccagttggccatgggaccgggattcagtctgaagttctgattctgtgtgttttagcccattacgattacgattaattgttatgtatagttagcgatgtaagtggaaaatttcgtttaattgtatgtgtataaatattgttccatatataatttaaaaagccatacaaagcaa

SEQ ID NO: 40659 - protein, 952 aa, DROSOPHILA
MVNSSGSEDGQLRSPNDVHYHSRGEEDEHEGDADALYIQPPQASRESGSGPRREKKKHSRERRRHKERDDVGGAALALERDHRYDYRSREEHYHHHQRERSSNAAAAYAKHHLGHAYHYPQPPQQQQQPLPPAPSYAAHHYHHHQHLSGARAAPREYHSYPSGYHSGSRHGDYPMEEPTRRSSKYAESKDAESLEQDLRSRLLKKRHNYVKDYETEENYEHRVERSDRREGGRKERERTVRSTHKQNRHDRVIELLDSPEQEHHHQHQHKSHRSKWREEVEVIRRKVPEDLELLARREKLLAAERESRQRKQTAREELEARRELLRERNEHSDALSPTTVAASVTAGLNIHVKRKSKPDNYEKEIKLKKRREDDIEVIRDDDDEESEESDSNEEVPEQDSEGSATESGSEDSYASKKKSKIKSKSQLEDDDEDLPLPDSPLSVGELYKSPKQRQRSRSVSSKSSSQSSRSSRSRSRSRSQSSLEDEVDRQDVGADASPSSSTRSEERGMTQEQPEEKPEEKLKEKQKSLEEQIPCDDKGIPLPNYYPGVQGCRSVEEFQCLNRIEEGTYGVVYRAKDKRTNEIVALKRLKMEKEKEGFPITSLREINTLLKGQHPNIVTVREIVVGSNMDKIFIVMDYVEHDLKSLMETMKNRKQSFFPGEVKCLTQQLLRAVAHLHDNWILHRDLKTSNLLLSHKGILKVGDFGLAREYGSPIKKYTSLVVTLWYRAPELLLCSPVYSTPIDVWSVGCIFAEFLQMLPLFPGKSEIDELNRIFKELGTPNEKIWPGYTELPAVKNMLSQNSQFTEYPVSQLRKHFQEKTSEMGLSLLQGLLTYDPKQRLSADAALKHGFFKELPLPIDPSMFPTWPAKSELGARKAQASSPKPPSGGSQFKQLGRDEPIIVGPGNKLSSGIITGNKKSHGAGGSSASTGFVLNAGITQRQLAMGPGFSLKF

SEQ ID NO: 40660 - DNA, 2656 bp, DROSOPHILA
aacaatgtacgaagcccaaaaggcctcattaaagtaactacagtttttataaacttatatgaaaaaaaaacgttttgtttgtttatgtttaatacttatgtaaaactataatcagattaatattcataaacaaatgataagtttggcaacagagttctttgtgccaatcttattcagttgttgttcttcctcctagagaattatacatacgttaatgccaaggactatccggctgtctataaaaatcgtttttaataagaagcattgggtacttaaaaaagagcaccttaaggtggagtttctttacccaagccctaaaaatccttattaagaatgtattttgaaatgtgaatctcgtgctattcctgtctatttagcggagaaatattagaaaatatatggaacccgttatcactaggatccaaaaatgaaatatataaaaagaaattacgtacgggatagtcatcacctcacagtcacctcgatacactcgatggtctcgaattcgacaaatgtggccaagtcgtacaataatgcatatatctggtaaaggaatcaactgtaatagtgcattgaagctgaataaagtttataagaccgtagccaaataactcccttaaaatagataatataaaaaattgttaaataaatatgttattgtaaagcagctgtgtagttctgtgacgatcggtcacactgaagataagcgtagagggacaataacccttaaaatagataatataaaatattgttaaataaatatgtatgtattgtaaagcagctgtgtagttctgtaacaatcggtcccactaaagataagcgtagagggacagactatttcaccacgacatttaatcacataccaacgaaacgtcgagcaaacaattatattcatatacgtgagttatctttcagttgtattgatataaaaaggaaggcgatctattatcccaatcagttctggtcttgccatccatcgaacaacactcaaataaccgaaatggatttctattactcgccccgtggaagtggatgtcgcaccgtgatcatggtggccaaggctctcggcgtgaagctgaacatgaagctactgaacaccttggagaaggatcagttgaagcccgagttcgtcaagctcaatccatagcacaccattcccacgctggtggacaacggattctccatctgggagtcccgcgccattgccgtctatctggtggagaagtacggcaaggatgacaccctcttccccaaggatcccaagaagcaggctttagtcaaccaacgcctctacttcgacatgggaactctgtacgacagcttcgccaaatactactatccccttttccacactggaaagcccggatctgatgaggactttaagaagatcgagagctccttcgagtatctgaatatcttcctggagggccagaactacgtggccggtgaccacctcacagtggctgatattgccatcctctccaccgtttccactttcgaaatctttgatttcgacctcaacaagtacccgaatgtggccaggtggtatgccaacgccaagaaggtgactcccggatgggaagagaactggaaaggtgccgtggaactgaagggagtatttgatgcccgtcaggcggcggcgaagcaataaaaatgtaaataactatatttattttaatgtatgtaattagaagggttttaataatatatatatatactacaattttgttttggccttcaaaacatttataaaaacgtcttccttacccaagctttacttccaaaaatatattatttcaatctattattataattcgtattgatttcttttaaaaaactggtgacagtttgcccagatttaaacggttaagaaggaacaaaaagtgggagtagtcatgcgcactgcgtagagaaaaaaggtgaaacagatgaaaaccaaaatacaccaatggaaatgaataaattgggaaattttttttaaagataaatatcattgctttacttatttatattatattttctatactatatacaactacctaaatagaaattgatagaaatttcaattaaatacaatttgacttcatatttcattgtctcctactatttcaattgcttgatttagtttaatcaaacacagttttatgaaatttctgttttcaaatgatttgacgtttttacaactttattttttttaattaatacaaattgcataaaattctttattacccaaacaaacgaaattcacgttgcttgtcgtcaacacacatataaaaagaatattataatcggcaggtagatagattaaaaacaaatttggtatataagagagaacttttggctactgccaaattagtttgtttccttcattccagtgcactagacggattcccccagcccttctgacgatggatctctataacatgtctggttccccgagcacccgggccgttatgatgaccgccaaagctgtgggagtcgagttcaactcgatacaagttaatacctttgtgggggaacaactggagccatggtttgtaaagataaaccctcagcacacgattccaaccctggtggacaatttattcgttatttgggaaactcgggccattgttgtctacctagtggagcagtacggtaaggatgattctctgta

SEQ ID NO: 40661 - DNA, 638 bp, DROSOPHILA
atggatttctattactcgccccgtggaagtggatgtcgcaccgtgatcatggtggccaaggctctcggcgtgaagctgaacatgaagctactgaacaccttggagaaggatcagttgaagcccgagttccacaccattcccacgctggtggacaacggattctccatctgggagtcccgcgccattgccgtctatctggtggagaagtacggcaaggatgacaccctcttccccaaggatcccaagaagcaggctttagtcaaccaacgcctctacttcgacatgggaactctgtacgacagcttcgccaaatactactatccccttttccacactggaaagcccggatctgatgaggactttaagaagatcgagagctccttcgagtatctgaatatcttcctggagggccagaactacgtggccggtgaccacctcacagtggctgatattgccatcctctccaccgtttccactttcgaaatctttgatttcgacctcaacaagtacccgaatgtggccaggtggtatgccaacgccaagaaggtgactcccggatgggaagagaactggaaaggtgccgtggaactgaagggagtatttgatgcccgtcaggcggcggcgaagcaataaaaatg

SEQ ID NO: 40662 - protein, 210 aa, DROSOPHILA
MDFYYSPRGSGCRTVIMVAKALGVKLNMKLLNTLEKDQLKPEFHTIPTLVDNGFSIWESRAIAVYLVEKYGKDDTLFPKDPKKQALVNQRLYFDMGTLYDSFAKYYYPLFHTGKPGSDEDFKKIESSFEYLNIFLEGQNYVAGDHLTVADIAILSTVSTFEIFDFDLNKYPNVARWYANAKKVTPGWEENWKGAVELKGVFDARQAAAKQ

SEQ ID NO: 40663 - DNA, 4678 bp, DROSOPHILA
ttaaataaatgcgcgagtttggaaattgaaagggaattagcggtgggcaggcagagccgaactgcggaaatattgtgcataattatatgctaatccgaatggcattgaattatgtgcagacgcgtgtggtcacctaccttttggacttttcctccaaggggcactgaaaaatggggaaaagggaaatggcttttaggcggctccaaattctctcagatttgagttccctttcatctttggtggccctgccacccgcggtctgtttgcattgaagtcgatcatgtaagtaatttcccctgtccgggattcaaaacaccgaaatcgaatcaaaatccaccgacagtcggtaggagattgattactgttaggagtgtgataaatcgctgtttttattaacttttttcgggatgacgcagcgcaaattggcggcgctgcatctccagtcgccgcacgagtactgaagatctggaaatcagatcagcgtgataatgtataatttgttgaagggttttcggcgtgctcgcaacaaaggcgatgccatcgagttgggttaattgaatttgctggagagcggacagagatttttgtgcaatatttagctaaaatatgtatgtgtatattaacattattaacattattaacacattaacattaacatatgttggataatgatgaataaaaatggttttctaaatgtctaatttaatttatataatttcgaaaatatttgttcttatctaacttttttcgaaatatttagtaaataagcagcttgaatatattatatgcaagctatatacaataaatataatacagcaacagagtaaaaaaatattttattgtttttataaaaccgatagaattttaaattaaaacattaaaacatgttaaagctaatatttttaggttttcttttatgaaagacagtttcaaatatattaaacttgtttgcttaagatatttaaatatcccgctcattttcaataaactatcgatatatcgcaattccgaacgttccactttagttgcactttggtcacactgcaaaacaaaaatccaagtggaactttgagatgggtaaatatcgatagtatgcccaacttcctttggttttccatgcaatattcggtatatcgatgctgtcgtgagtggtcagctcatctccaattccaagtgggacacgcttaacactttttttttgccaatttgccattaattgcaagcgtcccagctgatccaaaaaaattcaaaactctgttaaatgcgtttggccaggcgttcgtcgcgatccgtggactttaaaggctcgtaagcgtgtgtgagagcttcaaatcgccccatctcaaagccaagattgcacccaaatcagcgccagcgtcagcaaaagtttcattagcaactcggttatcagctgcgaaactgaagccaactgaacgcaaagagttgggcaatccgccagagcagggccagaaaccatagaaaccagttgccatggcgagtcccagaacgcgacgggtgctccaggaactgaaaccccaggatgagaactcggtaggtttgctcctttgtccacatacgctagataagcttcaatttctttgtttaaaaatgactagaaatgcttcgagtgcggtacccacaatccgcagtgggtgtccgtgacctacggcatctggatctgcctggagtgctccggcaagcatcgcagtctgggcgtgcatctgtccttcgtgcgctccgtcactatggataagtggaaggacatcgagctggagaagatgaaggcgggcggcaatcgcaatgcgcgcgagtttctggaggatcaggaggactggaacgaacgggcgcctatcacgcagcgttacaactcgaaggcggctgctttgtaccgcgataagatagccaccttggcccagggcaagagctgggatctcaaggaggcgcaaggccgcgtgggcagcaacaatagcttcagctcaggtggctccagcaacagcagctaccagtcgcgacccagtgcaacaggttatggcggaaacggaggctatcagaatggcggaggcgccgagcctggaggctatcagcagtaccaaacgcaggagttcaaggaccagaaggaggagttcttcagccgacgccaagtggagaatgcctccaggccagagtaggatcttaatggcatatctgtccattagctatgatttatcctagttgattgtttcagaaacttgccaccgagtcagggcggaaaatatgcaggtttcgggttcacacgcgaaccaccaccgaaaacgcaatctcaggagcttttcgactcgacgctttccactttggcctctggctggagccttttctccaccaacgcctccaagttggccagcaccgccaaggagaaggccgtcaccaccgtcaatttggcctcgacaaaggtgagtcctgcgcctcagctcgtatatctttcagattttgattccttatttgcctattctcttcgatttggttcaatattatgttgattttgtattcttttggtttattattagtctgctgattagttttaaataatttaaagctgtagaaacccaccttaacaacaaaagagagcaaaatccctttagttaatccccatatttgtttgttaatttaattggtacaccttattgtttgtattatttatttgcatctttttttggttgtagattaaagagggaactctgctagattccgtacaatgcggagttaccgatgtagccagcaaggtctgtagttccccatcatccagttaatcttctctaaacccacatccctctaacatataaacataccgatcgcaggtcaccgatatgggcaaacgaggttggaataatctggcgggcagcaacatttcgtcgccgcagggcggatacaacgatcccaacttcgaggacagcagcgcctaccagcgttccaattccgtgggcggtaatctggccggaggcttgggtcagcagagcggcgtcagcgacagcgactggggcggctggcaggacaacggcaacagcaagtcgcacatgaccagctcgagttcgtaccacaatcagttgagtagcagcagcggcggcggtaccgcctccgccggcctaacccgcgacgctgactggtccggcttcgaggcgacgaactatcagagttcagagacctcctaccagaacgcttcgtccggcggatcgacagctcgccgcaacatgaagctgcaggacacatcgcagaagctgagcgagggcttcgagagcctggacgtgaagagtgtgaagcccaagacggcaacggcctcgtccgccaacaaaggcactgccgaggacgacgcctggaatctgctgatgaactagaaaccgtggcgagcagcttatgcgattgtattttttgtattccattcggttgtcaagttgtgtctcctttgttttatgtgtctcttgatgtctggccccgaggctgctatgcgcgcatttaatgtaaccaactgaattgtgtattcattcttcgacttcaaacataaagtgcaactattcccgattatttccacagtttagaccaattttgtatagatctacttaactaacgaattacttagcttaaagtgtatgccaggatactgcgagggatgcgagatgagaaaatacatattatgttaacaagtgtagtcgttcgttttttaaatgggcggttttaaattcaaaaaatataaatatttgcaaatttaaaaaatacatttaaaattaatagtgttaccctacaattccacattttaaaaaccacaaataggtttgagtcacggctaagcagtgacgcgatgcattttagggtattttcgaccacacaagaagtatatctagataaacgttcgtggtcacactggcaaacccaaaaaattaaaattgaagagttctgcgtgaatcgctttaagccacaaagtcgccgaaatagcgtaaaagcagacgaactcttaaatagctcgaccagtaggtagtgaccacagaaaaagtgggaaatgcaattgaagcttgccactttcttttgcatatccacattcctttcgcctgcatgtgagcgtgtgtgtgtgtgtgtgcatgaaaatcgagtgcagaataatttttgccaaattggcaacaatttgcaagcgtttcgagagaaatttgagtcacacctgtctggaaaatgggcggagaattcagaaaagaatgtagaaagtgtgtgagagcgtgaagaattcttcggttaaagctacgctttgcaaagtagaaagttcgagttgctgggggaaagtctcccttttcccaacactccccccctctaccacgacttttggagacatgtgcgtgcgtgtgcgtgaagctgtgggtttttcaaggttttccggaaaatcgctggccttcaaaattaactgcgaaaatcaatgggatgtgggttgtacgcgggatcctgaaaattggcacctacaatgtacatatgtagttctccagccaagaagaggatgacttcatcgcggggaaattcgatacgttgagctgttttatttatctttcgcccagacataacattataaactaatgtgtatacaacactcgatacctctttcagacgactgtttttccatttgacttgccaagtagtgcaaaatgagccggccataagagcagag

SEQ ID NO: 40664 - DNA, 2208 bp, DROSOPHILA
cgcaattccgaacgttccactttagttgcactttggtcacactgcaaaacaaaaatccaagtggaactttgagatgggtaaatatcgatagtatgcccaacttcctttggttttccatgcaatattcggtatatcgatgctgtcgtgagtggtcagctcatctccaattccaagtgggacacgcttaacactttttttttgccaatttgccattaattgcaagcgtcccagctgatccaaaaaaattcaaaactctgttaaatgcgtttggccaggcgttcgtcgcgatccgtggactttaaaggctcgtaagcgtgtgtgagagcttcaaatcgccccatctcaaagccaagattgcacccaaatcagcgccagcgtcagcaaaagtttcattagcaactcggttatcagctgcgaaactgaagccaactgaacgcaaagagttgggcaatccgccagagcagggccagaaaccatagaaaccagttgccatggcgagtcccagaacgcgacgggtgctccaggaactgaaaccccaggatgagaactcgaaatgcttcgagtgcggtacccacaatccgcagtgggtgtccgtgacctacggcatctggatctgcctggagtgctccggcaagcatcgcagtctgggcgtgcatctgtccttcgtgcgctccgtcactatggataagtggaaggacatcgagctggagaagatgaaggcgggcggcaatcgcaatgcgcgcgagtttctggaggatcaggaggactggaacgaacgggcgcctatcacgcagcgttacaactcgaaggcggctgctttgtaccgcgataagatagccaccttggcccagggcaagagctgggatctcaaggaggcgcaaggccgcgtgggcagcaacaatagcttcagctcaggtggctccagcaacagcagctaccagtcgcgacccagtgcaacaggttatggcggaaacggaggctatcagaatggcggaggcgccgagcctggaggctatcagcagtaccaaacgcaggagttcaaggaccagaaggaggagttcttcagccgacgccaagtggagaatgcctccaggccagaaaacttgccaccgagtcagggcggaaaatatgcaggtttcgggttcacacgcgaaccaccaccgaaaacgcaatctcaggagcttttcgactcgacgctttccactttggcctctggctggagccttttctccaccaacgcctccaagttggccagcaccgccaaggagaaggccgtcaccaccgtcaatttggcctcgacaaagattaaagagggaactctgctagattccgtacaatgcggagttaccgatgtagccagcaaggtcaccgatatgggcaaacgaggttggaataatctggcgggcagcaacatttcgtcgccgcagggcggatacaacgatcccaacttcgaggacagcagcgcctaccagcgttccaattccgtgggcggtaatctggccggaggcttgggtcagcagagcggcgtcagcgacagcgactggggcggctggcaggacaacggcaacagcaagtcgcacatgaccagctcgagttcgtaccacaatcagttgagtagcagcagcggcggcggtaccgcctccgccggcctaacccgcgacgctgactggtccggcttcgaggcgacgaactatcagagttcagagacctcctaccagaacgcttcgtccggcggatcgacagctcgccgcaacatgaagctgcaggacacatcgcagaagctgagcgagggcttcgagagcctggacgtgaagagtgtgaagcccaagacggcaacggcctcgtccgccaacaaaggcactgccgaggacgacgcctggaatctgctgatgaactagaaaccgtggcgagcagcttatgcgattgtattttttgtattccattcggttgtcaagttgtgtctcctttgttttatgtgtctcttgatgtctggccccgaggctgctatgcgcgcatttaatgtaaccaactgaattgtgtattcattcttcgacttcaaacataaagtgcaactattcccgattatttccacagtttagaccaattttgtatagatctacttaactaacgaattacttagcttaaagtgtatgccaggatactgcgagggatgcgagatgagaaaatacatattatgttaacaagtgt

SEQ ID NO: 40665 - protein, 468 aa, DROSOPHILA
MASPRTRRVLQELKPQDENSKCFECGTHNPQWVSVTYGIWICLECSGKHRSLGVHLSFVRSVTMDKWKDIELEKMKAGGNRNAREFLEDQEDWNERAPITQRYNSKAAALYRDKIATLAQGKSWDLKEAQGRVGSNNSFSSGGSSNSSYQSRPSATGYGGNGGYQNGGGAEPGGYQQYQTQEFKDQKEEFFSRRQVENASRPENLPPSQGGKYAGFGFTREPPPKTQSQELFDSTLSTLASGWSLFSTNASKLASTAKEKAVTTVNLASTKIKEGTLLDSVQCGVTDVASKVTDMGKRGWNNLAGSNISSPQGGYNDPNFEDSSAYQRSNSVGGNLAGGLGQQSGVSDSDWGGWQDNGNSKSHMTSSSSYHNQLSSSSGGGTASAGLTRDADWSGFEATNYQSSETSYQNASSGGSTARRNMKLQDTSQKLSEGFESLDVKSVKPKTATASSANKGTAEDDAWNLLMN

SEQ ID NO: 40666 - DNA, 2648 bp, DROSOPHILA
ctgaatatcttcctggagggccagaactacgtggccggtgaccacctcacagtggctgatattgccatcctctccaccgtttccactttcgaaatctttgatttcgacctcaacaagtacccgaatgtggccaggtggtatgccaacgccaagaaggtgactcccggatgggaagagaactggaaaggtgccgtggaactgaagggagtatttgatgcccgtcaggcggcggcgaagcaataaaaatgtaaataactatatttattttaatgtatgtaattagaagggttttaataatatatatatatactacaattttgttttggccttcaaaacatttataaaaacgtcttccttacccaagctttacttccaaaaatatattatttcaatctattattataattcgtattgatttcttttaaaaaactggtgacagtttgcccagatttaaacggttaagaaggaacaaaaagtgggagtagtcatgcgcactgcgtagagaaaaaaggtgaaacagatgaaaaccaaaatacaccaatggaaatgaataaattgggaaattttttttaaagataaatatcattgctttacttatttatattatattttctatactatatacaactacctaaatagaaattgatagaaatttcaattaaatacaatttgacttcatatttcattgtctcctactatttcaattgcttgatttagtttaatcaaacacagttttatgaaatttctgttttcaaatgatttgacgtttttacaactttattttttttaattaatacaaattgcataaaattctttattacccaaacaaacgaaattcacgttgcttgtcgtcaacacacatataaaaagaatattataatcggcaggtagatagattaaaaacaaatttggtatataagagagaacttttggctactgccaaattagtttgtttccttcattccagtgcactagacggattcccccagcccttctgacgatggatctctataacatgtctggttccccgagcacccgggccgttatgatgaccgccaaagctgtgggagtcgagttcaactcgatacaagttaatacctttgtgggggaacaactggagccatggtttgtaaagataaaccctcagcacacgattccaaccctggtggacaatttattcgttatttgggaaactcgggccattgttgtctacctagtggagcagtacggtaaggatgattctctgtacccgaaggatccccagaagcaagcgctgatcaaccagcgtctgtacttcgatatgggcaccctgtacgatggcattgccaagtactttttcccactgcttcggacgggcaaacccggaactcaggagaatcttgagaaactgaacgctgccttcgatcttctcaacaacttcctggatggccaggattacgtggccggcaatcagctttcagtggcagatatcgttatattggccaccgtttccacaaccgaaatggttgacttcgatttaaagaagtttcccaacgtggacagatggtataagaacgcccaaaaagttacgccgggttgggacgagaacttggcaagaattcaaagcgccaaaaaatttctagccgaaaacttaatagaaaagttataaatattatagagaaatgatggattttatcaatattcaataatttatatttggtttatataaataaagaaaaccggatatttaaaagattataaattatattatattatattagacaacatattgattcatatttaaacaataattattcttttggaagaaaaccgatgtactatagacagctgtttgtttaaagataacattttggtgcatcattgcgaacgaacataataaatgattatcgcttcaaagtttattcaaattaatttaaaaaaaagcagataagaaatttggcaagtacaatagatgtttctggaaataatggtcatataataggcatataatttatagttttaattggaccaaaaactatgctttccatttgttatgttccatttgaaaaagttacattaaatgtaactattaatgtctttgactctatgttgacatcttcgttgtttctatgcgcttcataaataaacaattctgaatggcgataagctattttgcataattgtataaaattagtgtttagctcacttagacacagctaattgttgttagcccaagcgagaagccgaaaaagtgagttctaacaatgacaaacatattcatacaaatttgctaaggctgatagtgctttggctatttttccataaatacgaacactccgatagcaagaaatcagtttattttttcgccttcagaagctcgcacgtttcagtcacaatgccgaacttggatctctacaatttccccatggcgccggccagtcgcgccatccagatggtggccaaggctttgggtctggagctgaactccaagttgatcaacacgatggagggtgaccaactgaagccagagttcgtgaggattaacccacagcacaccattcccacgctggtggacaatggatttgtcatctgggagtcgcgtgccatcgccgtctatctggtggagaagtacggcaaacccgattccccactctatcccaacgatcccc

SEQ ID NO: 40667 - DNA, 648 bp, DROSOPHILA
atggatctctataacatgtctggttccccgagcacccgggccgttatgatgaccgccaaagctgtgggagtcgagttcaactcgatacaagttaatacctttgtgggggaacaactggagccatggtttgtaaagataaaccctcagcacacgattccaaccctggtggacaatttattcgttatttgggaaactcgggccattgttgtctacctagtggagcagtacggtaaggatgattctctgtacccgaaggatccccagaagcaagcgctgatcaaccagcgtctgtacttcgatatgggcaccctgtacgatggcattgccaagtactttttcccactgcttcggacgggcaaacccggaactcaggagaatcttgagaaactgaacgctgccttcgatcttctcaacaacttcctggatggccaggattacgtggccggcaatcagctttcagtggcagatatcgttatattggccaccgtttccacaaccgaaatggttgacttcgatttaaagaagtttcccaacgtggacagatggtataagaacgcccaaaaagttacgccgggttgggacgagaacttggcaagaattcaaagcgccaaaaaatttctagccgaaaacttaatagaaaagttataa

SEQ ID NO: 40668 - protein, 215 aa, DROSOPHILA
MDLYNMSGSPSTRAVMMTAKAVGVEFNSIQVNTFVGEQLEPWFVKINPQHTIPTLVDNLFVIWETRAIVVYLVEQYGKDDSLYPKDPQKQALINQRLYFDMGTLYDGIAKYFFPLLRTGKPGTQENLEKLNAAFDLLNNFLDGQDYVAGNQLSVADIVILATVSTTEMVDFDLKKFPNVDRWYKNAQKVTPGWDENLARIQSAKKFLAENLIEKL

SEQ ID NO: 40669 - DNA, 8192 bp, DROSOPHILA
tgttttgtttgagctgactcttataatacaatttaataatgaccattataaagaaactggggaagacgggcattactacgggccagagataaggccatcctgtaccacgcaccgaatccctcgtactgctgcaggaattattattgttttggagtattgagacacagactccattacgatcgggtcgcgtttagcacccctcgtagacataaataatctactccatggatggatggtgtgcccatgccataatccgcagccatttcatcgtgacgaagcacagataagccgggttttgtattaatcgaaagcaaaccaaattgaaaactaaatcgggtatgctgtgtggtggtaaggggtcaactaactatatttactagctggggcacttttaatgggctgacacaactgatagccccatcaaatttcaaggtactagggtcacagccgaccagattccgaatgagaacgacggaaagtacataaatattcctctttcgccagtcgagcaaatagctcttctgataaatgaaacacaaaatcgatttcagccgatcgatctgataaatcgtggcaatatgaacacattagtcaataaaatgagccgtgactatggaaacaattggtcagggtgaaattaggtgtcttattgtgagggacagaagtaaatatttagtaagcaaattatgcactcaaacattaatttttcagggcaaacaattgtatttgccattgctgataagactatttaaaaacatcaaaatttgaattctttcttttggtctctctgtattctcgatacactgaaaacaatttccattcccaaacatagttgatttccgattttttcaatcagccgtaaggtattctacacttttttcttactcttcgaaaaccatacttcagcggtatattgcctttggtattcaaatgtgtttgtaaagatttaagctaagatgtttaaattttttttatttagtttcaagctttattaatatttatttctaaaagtttcttttcgcgattataaaggaacagagggcaatataaatgatcaacgtagcctaaaactggaagtcttagagtgggaagcagtagtctactttttcagtgcctgcacaaagttgcccaagtcgtactcttcctcgtactgatgctcggaccagagttccggcaagttctcgataatggtgttcatggacatgccgcccgatgctgttccttgcaccgctgatgatccagattctgctcccttgtctttccctccgttgaagaggtcaaagatctgtgaggtgcccattgtctgcagcgaagcgttctccgcactcaccacagtgttggcggtgagtatcttaaacttttgcagccccatgatcttttcctccagcgagttgcgtgtgatcagccggtaaacatttactactttcttttggccgattcggtgggcgcggtccatagcctgcagatccttcattggattccagtcgtgctcgacaaagatgaccgtatcggcgcctgttagatttagacccaggccgccaacctaaaaattgatttacgattgaagttggatcataaaacataaaagcccattttatgcttaccatagtggtcaggagcaggacatcgatgctgggatcgctgttgaagttattgactatatcctgtcgctgtgaggcgggtacactgccgtccagccgcagatatgtgacgctgggcagatggcggcgcaatagatcctgttccacaatgtccagcatcgccttcagctggcagaagattagggcacgatgctggctcaccgactccgtctgcacaccaatgccgcagtctaggagaagttgcctggcaaggaaaatgaaatattttaaatatatactttatattttaactgtgtaacgagagtgcacttacttcaaggcgggcagctttgcagagtgctcaatgtcgtccaatgagctgtttgacaacgccaactgactggtcaccttcgtgagctcctcagactgacgcaacaccagcttgggatggttgcatacgttctgcaggtatcgaagcgcttggaaaatgtgtgtcttggcgctgagattctccgtcaccatggatgccgacgacgagtcgcccagtttgtctaaacagtctttcaggtgtttattgctaaaatcttcatacagtcgaagctggagcggactcagttcgcaaagtaagtcctgggtgatctttggcggtaggtccttcagcacatcctccttaacacggcgcagcaggaagggcagaacttgtctatgcagcgcctccatggccagcactccagcttcctgctccttggcagagctctttgcatcccgagatgacagaatgggacgtgaaaagcgttgcacgaactgcttctcagtgccaaggaagccgggcattaaaaagtcaaacaaggaccacaactcgagcacattgttctggatgggagtgccggagaggatcagtctatggtttgcctttaatcgctttattgccttagagctctttgtctttccgttcttaataatatggccttcatccaaaacgcaatagttaaagtgtattccgctgaagaagtcgatgtccttgcgcacagtgtcgtacgatgccacaaccaggttacactttgttccgatatcactccttagcttctctcttcccactgggaatccgtagtagtgtaagggacgcagaacggatccctggtcaaggaatttctccacctcgtacacccaatgaccggttaaagttggtgggcaaatgacgagactaggcagattcgccaaattggctgtctgacggtgcatgtggtctccggcaaggatgcatatggtttgcagagttttgcccaaccccatatcgtcgcaaagaatgccgtgtagattgtatttgttcaggaaccacagccagttgatgccggcttgttgatagcagcgcagctccacacttattggtaccggaaccttataattgggaatgctctttggattgaaaagatagtcgagaaactcacggtcacgcgttttgcgcgcctgcagcggatcgctttttaattgctccgtctttccgtccagaggcattaactggactagatttgcaaagcagtgcgtggaaagcaatcgcactgactcatccggatcgctcattgcgcccagtagaggcaccaccagcagcacgatgtagggcaccacttttatctgcagcctgctgaccacgcgttcgatagcctctatggctccttgtcgctctataagttgctcaatcttcccaagcagcggtaacagatcgtgaaccacaaactgcatagtctggcaagcatcgatctcggccagcacggcgatgcaacgagcggccatgtgtcggactgccttaagaggatggcaaacgataaagccaagggagggcagaagggcaaacatctgaggatgcagtgcaacatgcagatggggggctgctgtctcaataagctgcatagagctgacaagctcattgcacactcccagatctggaagaaggctgcccaatcgccagtcgtacgcttcttttacgaactgctccaccttgccaaacatcagatgttggaaaacagccaccttttcaatgatttgctctccaaatatcctacacagcttttcaatggcacatgccgctcccaggcgctgtatgcggcattgcttcgcctccgcctccttggcttgctgcgccttaagctcaatgtgagcagtggcgttggttgcggacaatatttcgccagtgggcggtcgcccagggcccctgggggccgtagtagcagtgggagttgttgcaccgcccgcaccgcttcgcgtgttagtggttgtcactgtctgttgaagtgccagtgttaggataccatagtaaacacaattattaataacctcagacgaaactggcgtctgtttgagggtttctagtggcattacctaaaagagattttatgaacaaataagaaaattgcgttataaacaagctaactccaacttaccagtttgggagtgaattcgggatcgctccttaacagcgtacaaaggttgtttaaaatcttgctatttggactaggatttctatcacagacctgatccataaggtggaccaggaactcggcagacagctgctgcagctggaggcactgctcccgcttgatggactccattaatggcttgaccaccggattcagcttatctggcaggcagtgaagagcgcagatggcgccagcgagtgctgcctgagcactgacatgataggcgctttgctcactggttgtctgctggtaggaggcctgaaggctgcgtcgacgctcctctagcatatctaaaactttcggcttgaggggataagaacgcagattttcgcttagcgtagttgccactgcctcgatttgatctagagtaaggatcttggcattattgaaatcgttaatcgggattttgttctgcttcagcgtagcaataaagtcttgtgcctcttgtagtagtcgggtcagtgagatggctacctcatcgtagtagacgtactcgctcacacattggtgtaacttttcctgcagattgggcggtcctgggcgaactggctcgtcttctagcgcccaaaacgcaatgatcagcccgcagacgattcgctggacagcagagtgggcatttaaatgacccaatagtacttttgtataacagtctgtgggactctccgtttgtggggtatacaccactcccggtgctggctgaaccaggtaatgagaaagtgcacccagtgcccgagatgaggaaatccgggctcgcataaaattggcatcccggacatccaaaggcgtggcttcgctaccaccaaggtataatttcaatgaggcgtttgattgcgctagaatgttaccgcccaattcgtctcctatgcggggcgttcgttttcgggaggtgcttcctggcgtgcttacatctccaccagctctgatcaggacccctgcatcaaaagccaatctaggtggctgcattgaaaggcatatccaggacgacacgaatggacaggcagcatgcaacaacgcacccaaatctgcatgctggataagattggaccacacctgacgggctaatgcctggatatccgcctgcggctccactaggatgcgttgatatatgtgacgcagggcctgctgcagcaattcccacttccagtcgctgactccaaagttaagtttcatttcttccttatccgcttcctctttaacttgattttcgtctttgggctcggatttgaccctatccgcactcgtcagggtcataagcgtcttcagcgttgatcttcgtaccgaactagtgctatgggaaagaaaaggccacaggcgcggtaccaaaatggccatcggctccatctctacccaacgagcagcgtttggtaggcatagaatggccgctaacagccccatgaaactgttgcaggcagacgtgagttcatcttgatccaatagtaggtcccacaacatttttacgatggaagatacttgcgccggatttaatagcttcggcagccaggaagaaactggaatcagggttgcggcagccaccgctccgacatcatccacagcgtccagcaggccgatgagaatgtttgaaattgactggggcaaatagatgggcagcagctcctcacgcaccacaaacacatacttcaggcctagtagtccaccatgccgcacatcccactcgttcttgtgctggatgagctgaagcagaatgttcacgattcgttgaaccttggacgcctccatctccttgaccaacgtacccagcacttgggcgcaggtctcgcgaaccggtgccacaacctgatccgagacaaagtcaccaaaccgatccagacaaagcacacagagcaggcgcagggcagcatcctctagccatcggctatgtgcttcatccatctgttcgcgagtctgtagcactgcctttcccgctccttgagcgtgctgattaatcagttcccttagagctgttgccgccccatggcgcacctcccatttggcgtgaaagagatcaatgaagagacgtgagcagaagttctccagtggccaggagacggcatccacccaagtgcctgtagcatctggcacagcagctgaaatatatatgaaaaattgaaattgataaaatgtaatcaacgctttatatcgaccacccaccatttaaactatagaagatttcctgccgatccgttgacttaagtttcttcttttcgggttcttctattgcagcaccagtggtgccattactgctgtgattgctgccagtactgtgattgctgttggagttcctccggctgcaagttggcgtaactgcagtgacagaacatccgcttgtattttgacgagccttgcgcttggccctgttcatctcacggcaactaagtggagcttgaccagatccgttcgccgctgtctttatgttgagtaagtgctcaactggaagcttttctgcgttgacattgtaagtgctgccactcctgttgagtgccacatcctcgtctgttatcatatcggtaagattaacgcccagtttggcggccgttgtcagacccagtttgtcgttcagcaccgcacgctggcggcttagacgactggctaggcttctgtcctcctccccgcctccactagccggttgctcctcctgcacatcaaactcgttgccctcggagccgatgagtctggcacctttgtggaggatttgctgcagatcgaactcatcaaagctaagtagtcgctcgctggccgttgtcgagttggaaccacttgactggcaactgtcctcttctgctgccgctgcagctgtggcagtattagtagcgcaacgctccttcttgggcagcacctggaattcgggctgccagggcggtacttgctttaatatggcctcaacggtctgggctgcagctatccgtgtctcccaggatgtactgtgcaggtagcccaccaatctgttcagcagagcgtgcagctcgtgtggataaagcttttgaacctcaccaatctgcttggcggccgcctgacgagtggccgctgtagagcccgtctccagtagaatgaacagccgatcaagtctacaaggtatgttgaatacaattagcattttatatttttaggttttgatagttgacaaacatacctagatgtcattataatatttgtggttccctttgtgatccgttgatataataatctaagtaactaatctggaaataaaaataaatatagtattaaataaagtatataatacgatttgtattatataaagtattcattgggacataaataaaattgaagaactgtttatttaatattttcgtatttccccacttatgcacttcccacgtaacatctattatttaagtgagtcagaaaaataacaacaaaaataacaagtcgatacattcataacagagtcaattgataatagaattaagcgaatcatttgatggaatgctgtctctatagcgcgaaataaataagaatgttagcaaccatactaaattgcttaatactattactcagtggtcgataaaaagatggaacatctaaaaaaaacaaatatccaatatgcgagtcgacatagaacatttctcaagtataagtattaagtatttacgtccaaagaagatttatacccacgcgaactgtgacataattgcaaattaaaaattaaccaattagtacgatttgattagttccattgacaatgtagtaccttagaatgaccgcatagctcagcacgacgacgctgtagcaatctcaaaatgtagcctttcccaccgcaatccaatcgaccaataaagactggacacgtggtcgaggaaggcaaaagacatggacgacctagtcggtactggtatggatttcctgggaggcattattaagctccgccagcaagtggggttaggctgtgtaaattgagtcactcgacgcgaatggcgaataatgacttcgttgtggccgccgaggcgttcttaacagcttagagcagaacgtgacaattgagcaaattacggcatttccatattccatattccggactagtgcccccatattacgtacgaacgccaaggggcccaaacgattcgcctggtttagagcccgttcgcctcgaattattacaaggagattatcgatattccaaagt

SEQ ID NO: 40670 - DNA, 5685 bp, DROSOPHILA
atgacatctagacttgatcggctgttcattctactggagacgggctctacagcggccactcgtcaggcggccgccaagcagattggtgaggttcaaaagctttatccacacgagctgcacgctctgctgaacagattggtgggctacctgcacagtacatcctgggagacacggatagctgcagcccagaccgttgaggccatattaaagcaagtaccgccctggcagcccgaattccaggtgctgcccaagaaggagcgttgcgctactaatactgccacagctgcagcggcagcagaagaggacagttgccagtcaagtggttccaactcgacaacggccagcgagcgactacttagctttgatgagttcgatctgcagcaaatcctccacaaaggtgccagactcatcggctccgagggcaacgagtttgatgtgcaggaggagcaaccggctagtggaggcggggaggaggacagaagcctagccagtcgtctaagccgccagcgtgcggtgctgaacgacaaactgggtctgacaacggccgccaaactgggcgttaatcttaccgatatgataacagacgaggatgtggcactcaacaggagtggcagcacttacaatgtcaacgcagaaaagcttccagttgagcacttactcaacataaagacagcggcgaacggatctggtcaagctccacttagttgccgtgagatgaacagggccaagcgcaaggctcgtcaaaatacaagcggatgttctgtcactgcagttacgccaacttgcagccggaggaactccaacagcaatcacagtactggcagcaatcacagcagtaatggcaccactggtgctgcaatagaagaacccgaaaagaagaaacttaagtcaacggatcggcaggaaatcttctatagtttaaatgctgctgtgccagatgctacaggcacttgggtggatgccgtctcctggccactggagaacttctgctcacgtctcttcattgatctctttcacgccaaatgggaggtgcgccatggggcggcaacagctctaagggaactgattaatcagcacgctcaaggagcgggaaaggcagtgctacagactcgcgaacagatggatgaagcacatagccgatggctagaggatgctgccctgcgcctgctctgtgtgctttgtctggatcggtttggtgactttgtctcggatcaggttgtggcaccggttcgcgagacctgcgcccaagtgctgggtacgttggtcaaggagatggaggcgtccaaggttcaacgaatcgtgaacattctgcttcagctcatccagcacaagaacgagtgggatgtgcggcatggtggactactaggcctgaagtatgtgtttgtggtgcgtgaggagctgctgcccatctatttgccccagtcaatttcaaacattctcatcggcctgctggacgctgtggatgatgtcggagcggtggctgccgcaaccctgattccagtttcttcctggctgccgaagctattaaatccggcgcaagtatcttccatcgtaaaaatgttgtgggacctactattggatcaagatgaactcacgtctgcctgcaacagtttcatggggctgttagcggccattctatgcctaccaaacgctgctcgttgggtagagatggagccgatggccattttggtaccgcgcctgtggccttttctttcccatagcactagttcggtacgaagatcaacgctgaagacgcttatgaccctgacgagtgcggatagggtcaaatccgagcccaaagacgaaaatcaagttaaagaggaagcggataaggaagaaatgaaacttaactttggagtcagcgactggaagtgggaattgctgcagcaggccctgcgtcacatatatcaacgcatcctagtggagccgcaggcggatatccaggcattagcccgtcaggtgtggtccaatcttatccagcatgcagatttgggtgcgttgttgcatgctgcctgtccattcgtgtcgtcctggatatgcctttcaatgcagccacctagattggcttttgatgcaggggtcctgatcagagctggtggagatgtaagcacgccaggaagcacctcccgaaaacgaacgccccgcataggagacgaattgggcggtaacattctagcgcaatcaaacgcctcattgaaattataccttggtggtagcgaagccacgcctttggatgtccgggatgccaattttatgcgagcccggatttcctcatctcgggcactgggtgcactttctcattacctggttcagccagcaccgggagtggtgtataccccacaaacggagagtcccacagactgttatacaaaagtactattgggtcatttaaatgcccactctgctgtccagcgaatcgtctgcgggctgatcattgcgttttgggcgctagaagacgagccagttcgcccaggaccgcccaatctgcaggaaaagttacaccaatgtgtgagcgagtacgtctactacgatgaggtagccatctcactgacccgactactacaagaggcacaagactttattgctacgctgaagcagaacaaaatcccgattaacgatttcaataatgccaagatccttactctagatcaaatcgaggcagtggcaactacgctaagcgaaaatctgcgttcttatcccctcaagccgaaagttttagatatgctagaggagcgtcgacgcagccttcaggcctcctaccagcagacaaccagtgagcaaagcgcctatcatgtcagtgctcaggcagcactcgctggcgccatctgcgctcttcactgcctgccagataagctgaatccggtggtcaagccattaatggagtccatcaagcgggagcagtgcctccagctgcagcagctgtctgccgagttcctggtccaccttatggatcagacagtgacaaccactaacacgcgaagcggtgcgggcggtgcaacaactcccactgctactacggcccccaggggccctgggcgaccgcccactggcgaaatattgtccgcaaccaacgccactgctcacattgagcttaaggcgcagcaagccaaggaggcggaggcgaagcaatgccgcatacagcgcctgggagcggcatgtgccattgaaaagctgtgtaggatatttggagagcaaatcattgaaaaggtggctgttttccaacatctgatgtttggcaaggtggagcagttcgtaaaagaagcgtacgactggcgattgggcagccttcttccagatctgggagtgtgcaatgagcttgtcagctctatgcagcttattgagacagcagccccccatctgcatgttgcactgcatcctcagatgtttgcccttctgccctcccttggctttatcgtttgccatcctcttaaggcagtccgacacatggccgctcgttgcatcgccgtgctggccgagatcgatgcttgccagactatgcagtttgtggttcacgatctgttaccgctgcttgggaagattgagcaacttatagagcgacaaggagccatagaggctatcgaacgcgtggtcagcaggctgcagataaaagtggtgccctacatcgtgctgctggtggtgcctctactgggcgcaatgagcgatccggatgagtcagtgcgattgctttccacgcactgctttgcaaatctagtccagttaatgcctctggacggaaagacggagcaattaaaaagcgatccgctgcaggcgcgcaaaacgcgtgaccgtgagtttctcgactatcttttcaatccaaagagcattcccaattataaggttccggtaccaataagtgtggagctgcgctgctatcaacaagccggcatcaactggctgtggttcctgaacaaatacaatctacacggcattctttgcgacgatatggggttgggcaaaactctgcaaaccatatgcatccttgccggagaccacatgcaccgtcagacagccaatttggcgaatctgcctagtctcgtcatttgcccaccaactttaaccggtcattgggtgtacgaggtggagaaattccttgaccagggatccgttctgcgtcccttacactactacggattcccagtgggaagagagaagctaaggagtgatatcggaacaaagtgtaacctggttgtggcatcgtacgacactgtgcgcaaggacatcgacttcttcagcggaatacactttaactattgcgttttggatgaaggccatattattaagaacggaaagacaaagagctctaaggcaataaagcgattaaaggcaaaccatagactgatcctctccggcactcccatccagaacaatgtgctcgagttgtggtccttgtttgactttttaatgcccggcttccttggcactgagaagcagttcgtgcaacgcttttcacgtcccattctgtcatctcgggatgcaaagagctctgccaaggagcaggaagctggagtgctggccatggaggcgctgcatagacaagttctgcccttcctgctgcgccgtgttaaggaggatgtgctgaaggacctaccgccaaagatcacccaggacttactttgcgaactgagtccgctccagcttcgactgtatgaagattttagcaataaacacctgaaagactgtttagacaaactgggcgactcgtcgtcggcatccatggtgacggagaatctcagcgccaagacacacattttccaagcgcttcgatacctgcagaacgtatgcaaccatcccaagctggtgttgcgtcagtctgaggagctcacgaaggtgaccagtcagttggcgttgtcaaacagctcattggacgacattgagcactctgcaaagctgcccgccttgaagcaacttctcctagactgcggcattggtgtgcagacggagtcggtgagccagcatcgtgccctaatcttctgccagctgaaggcgatgctggacattgtggaacaggatctattgcgccgccatctgcccagcgtcacatatctgcggctggacggcagtgtacccgcctcacagcgacaggatatagtcaataacttcaacagcgatcccagcatcgatgtcctgctcctgaccactatggttggcggcctgggtctaaatctaacaggcgccgatacggtcatctttgtcgagcacgactggaatccaatgaaggatctgcaggctatggaccgcgcccaccgaatcggccaaaagaaagtagtaaatgtttaccggctgatcacacgcaactcgctggaggaaaagatcatggggctgcaaaagtttaagatactcaccgccaacactgtggtgagtgcggagaacgcttcgctgcagacaatgggcacctcacagatctttgacctcttcaacggagggaaagacaagggagcagaatctggatcatcagcggtgcaaggaacagcatcgggcggcatgtccatgaacaccattatcgagaacttgccggaactctggtccgagcatcagtacgaggaagagtacgacttgggcaactttgtgcaggcactgaaaaagtagactactgcttcccactctaagacttccagttttaggctacgttgatcatttatattgccctctgttcctttataatcgcgaaaagaaacttttagaaat

SEQ ID NO: 40671 - protein, 1861 aa, DROSOPHILA
MTSRLDRLFILLETGSTAATRQAAAKQIGEVQKLYPHELHALLNRLVGYLHSTSWETRIAAAQTVEAILKQVPPWQPEFQVLPKKERCATNTATAAAAAEEDSCQSSGSNSTTASERLLSFDEFDLQQILHKGARLIGSEGNEFDVQEEQPASGGGEEDRSLASRLSRQRAVLNDKLGLTTAAKLGVNLTDMITDEDVALNRSGSTYNVNAEKLPVEHLLNIKTAANGSGQAPLSCREMNRAKRKARQNTSGCSVTAVTPTCSRRNSNSNHSTGSNHSSNGTTGAAIEEPEKKKLKSTDRQEIFYSLNAAVPDATGTWVDAVSWPLENFCSRLFIDLFHAKWEVRHGAATALRELINQHAQGAGKAVLQTREQMDEAHSRWLEDAALRLLCVLCLDRFGDFVSDQVVAPVRETCAQVLGTLVKEMEASKVQRIVNILLQLIQHKNEWDVRHGGLLGLKYVFVVREELLPIYLPQSISNILIGLLDAVDDVGAVAAATLIPVSSWLPKLLNPAQVSSIVKMLWDLLLDQDELTSACNSFMGLLAAILCLPNAARWVEMEPMAILVPRLWPFLSHSTSSVRRSTLKTLMTLTSADRVKSEPKDENQVKEEADKEEMKLNFGVSDWKWELLQQALRHIYQRILVEPQADIQALARQVWSNLIQHADLGALLHAACPFVSSWICLSMQPPRLAFDAGVLIRAGGDVSTPGSTSRKRTPRIGDELGGNILAQSNASLKLYLGGSEATPLDVRDANFMRARISSSRALGALSHYLVQPAPGVVYTPQTESPTDCYTKVLLGHLNAHSAVQRIVCGLIIAFWALEDEPVRPGPPNLQEKLHQCVSEYVYYDEVAISLTRLLQEAQDFIATLKQNKIPINDFNNAKILTLDQIEAVATTLSENLRSYPLKPKVLDMLEERRRSLQASYQQTTSEQSAYHVSAQAALAGAICALHCLPDKLNPVVKPLMESIKREQCLQLQQLSAEFLVHLMDQTVTTTNTRSGAGGATTPTATTAPRGPGRPPTGEILSATNATAHIELKAQQAKEAEAKQCRIQRLGAACAIEKLCRIFGEQIIEKVAVFQHLMFGKVEQFVKEAYDWRLGSLLPDLGVCNELVSSMQLIETAAPHLHVALHPQMFALLPSLGFIVCHPLKAVRHMAARCIAVLAEIDACQTMQFVVHDLLPLLGKIEQLIERQGAIEAIERVVSRLQIKVVPYIVLLVVPLLGAMSDPDESVRLLSTHCFANLVQLMPLDGKTEQLKSDPLQARKTRDREFLDYLFNPKSIPNYKVPVPISVELRCYQQAGINWLWFLNKYNLHGILCDDMGLGKTLQTICILAGDHMHRQTANLANLPSLVICPPTLTGHWVYEVEKFLDQGSVLRPLHYYGFPVGREKLRSDIGTKCNLVVASYDTVRKDIDFFSGIHFNYCVLDEGHIIKNGKTKSSKAIKRLKANHRLILSGTPIQNNVLELWSLFDFLMPGFLGTEKQFVQRFSRPILSSRDAKSSAKEQEAGVLAMEALHRQVLPFLLRRVKEDVLKDLPPKITQDLLCELSPLQLRLYEDFSNKHLKDCLDKLGDSSSASMVTENLSAKTHIFQALRYLQNVCNHPKLVLRQSEELTKVTSQLALSNSSLDDIEHSAKLPALKQLLLDCGIGVQTESVSQHRALIFCQLKAMLDIVEQDLLRRHLPSVTYLRLDGSVPASQRQDIVNNFNSDPSIDVLLLTTMVGGLGLNLTGADTVIFVEHDWNPMKDLQAMDRAHRIGQKKVVNVYRLITRNSLEEKIMGLQKFKILTANTVVSAENASLQTMGTSQIFDLFNGGKDKGAESGSSAVQGTASGGMSMNTIIENLPELWSEHQYEEEYDLGNFVQALKK

SEQ ID NO: 40672 - DNA, 2675 bp, DROSOPHILA
gaatcttgagaaactgaacgctgccttcgatcttctcaacaacttcctggatggccaggattacgtggccggcaatcagctttcagtggcagatatcgttatattggccaccgtttccacaaccgaaatggttgacttcgatttaaagaagtttcccaacgtggacagatggtataagaacgcccaaaaagttacgccgggttgggacgagaacttggcaagaattcaaagcgccaaaaaatttctagccgaaaacttaatagaaaagttataaatattatagagaaatgatggattttatcaatattcaataatttatatttggtttatataaataaagaaaaccggatatttaaaagattataaattatattatattatattagacaacatattgattcatatttaaacaataattattcttttggaagaaaaccgatgtactatagacagctgtttgtttaaagataacattttggtgcatcattgcgaacgaacataataaatgattatcgcttcaaagtttattcaaattaatttaaaaaaaagcagataagaaatttggcaagtacaatagatgtttctggaaataatggtcatataataggcatataatttatagttttaattggaccaaaaactatgctttccatttgttatgttccatttgaaaaagttacattaaatgtaactattaatgtctttgactctatgttgacatcttcgttgtttctatgcgcttcataaataaacaattctgaatggcgataagctattttgcataattgtataaaattagtgtttagctcacttagacacagctaattgttgttagcccaagcgagaagccgaaaaagtgagttctaacaatgacaaacatattcatacaaatttgctaaggctgatagtgctttggctatttttccataaatacgaacactccgatagcaagaaatcagtttattttttcgccttcagaagctcgcacgtttcagtcacaatgccgaacttggatctctacaatttccccatggcgccggccagtcgcgccatccagatggtggccaaggctttgggtctggagctgaactccaagttgatcaacacgatggagggtgaccaactgaagccagagttcgtgaggattaacccacagcacaccattcccacgctggtggacaatggatttgtcatctgggagtcgcgtgccatcgccgtctatctggtggagaagtacggcaaacccgattccccactctatcccaacgatccccagaagcgggctttgatcaaccagaggctttacttcgatatgggcaccctgtacgacgccctgaccaaatacttcttcctaatcttccgcactggcaaattcggagatcaggaagctctggacaaggttaactccgcctttggattcctcaacaccttcctggagggtcaggacttcgtggccggtagccaactgaccgtggctgatatcgtcatcctggccaccgtatccaccgtagaatggttttcgtttgacctaagcaagttccccaacgtggagaggtggcttaagaatgccccaaaagtaactcctggatgggagcaaaatcttgagagtctgcagcagggaaagaagttcctgcaggaccttcaagcggcaaaggaaaaggaagtaaaggcctaaactattttaaataaataaaaacctgagtctaatctaatatttgttggtttgttgttatttgaacttaatacatatatgggtataaatataaatgggttgtatactgctgtatagatatgtatacctgtcaaatttttttctggacacgctatcatatgatgataaggcttttgaagttctattatattcaaatatcagtgattggcagcacttgttcccttatcaaaatatttcataacaccaaatccaagcaaatcactgataggaattaatcaaggacagggaagccgccaacgtttaagtaaatgagtaatatttggcaaaccattcttatatttgctctaatattgtaattaaataattttgtgcgattttgctatctttcccaatttatcgaccatatttctatctaaatcattaattcgtttgaccccgcaacactgacatttctctttcacggcattcttttcagtcgcgcagttctaatgacctatcatcaaattgtaattactgcagtcagaataaatgacattttgaagtaatttcaaattggaagccgtaacttttgcacgcatatacccctaaaagtatatgtacatatgtatgtgttcattacctggccattagctaaacacttcatattaccccggatcgttatcaccgataaaactgctactcgggaaagtcgcccgatactggatgactactatatatggcagtattgattttggccgcctattttgtgttgactataaaagccgttgaagcttcttagctgtggtcagttgtgaactggaattgtaggacctttcatcatggacttttactaccatccttgctcggctccttgccgctccgttataatgacagccaaggcccttggagttgacctgaatatgaagctattgaaggtcatggacggggagcaactgaagccggagtttgtgaagctcaatccacagcactgcattcccaccctggtggacgatggcttctccat

SEQ ID NO: 40673 - DNA, 675 bp, DROSOPHILA
atgccgaacttggatctctacaatttccccatggcgccggccagtcgcgccatccagatggtggccaaggctttgggtctggagctgaactccaagttgatcaacacgatggagggtgaccaactgaagccagagttcgtgaggattaacccacagcacaccattcccacgctggtggacaatggatttgtcatctgggagtcgcgtgccatcgccgtctatctggtggagaagtacggcaaacccgattccccactctatcccaacgatccccagaagcgggctttgatcaaccagaggctttacttcgatatgggcaccctgtacgacgccctgaccaaatacttcttcctaatcttccgcactggcaaattcggagatcaggaagctctggacaaggttaactccgcctttggattcctcaacaccttcctggagggtcaggacttcgtggccggtagccaactgaccgtggctgatatcgtcatcctggccaccgtatccaccgtagaatggttttcgtttgacctaagcaagttccccaacgtggagaggtggcttaagaatgccccaaaagtaactcctggatgggagcaaaatcttgagagtctgcagcagggaaagaagttcctgcaggaccttcaagcggcaaaggaaaaggaagtaaaggcctaa

SEQ ID NO: 40674 - protein, 224 aa, DROSOPHILA
MPNLDLYNFPMAPASRAIQMVAKALGLELNSKLINTMEGDQLKPEFVRINPQHTIPTLVDNGFVIWESRAIAVYLVEKYGKPDSPLYPNDPQKRALINQRLYFDMGTLYDALTKYFFLIFRTGKFGDQEALDKVNSAFGFLNTFLEGQDFVAGSQLTVADIVILATVSTVEWFSFDLSKFPNVERWLKNAPKVTPGWEQNLESLQQGKKFLQDLQAAKEKEVKA

SEQ ID NO: 40675 - DNA, 2639 bp, DROSOPHILA
tggccaccgtatccaccgtagaatggttttcgtttgacctaagcaagttccccaacgtggagaggtggcttaagaatgccccaaaagtaactcctggatgggagcaaaatcttgagagtctgcagcagggaaagaagttcctgcaggaccttcaagcggcaaaggaaaaggaagtaaaggcctaaactattttaaataaataaaaacctgagtctaatctaatatttgttggtttgttgttatttgaacttaatacatatatgggtataaatataaatgggttgtatactgctgtatagatatgtatacctgtcaaatttttttctggacacgctatcatatgatgataaggcttttgaagttctattatattcaaatatcagtgattggcagcacttgttcccttatcaaaatatttcataacaccaaatccaagcaaatcactgataggaattaatcaaggacagggaagccgccaacgtttaagtaaatgagtaatatttggcaaaccattcttatatttgctctaatattgtaattaaataattttgtgcgattttgctatctttcccaatttatcgaccatatttctatctaaatcattaattcgtttgaccccgcaacactgacatttctctttcacggcattcttttcagtcgcgcagttctaatgacctatcatcaaattgtaattactgcagtcagaataaatgacattttgaagtaatttcaaattggaagccgtaacttttgcacgcatatacccctaaaagtatatgtacatatgtatgtgttcattacctggccattagctaaacacttcatattaccccggatcgttatcaccgataaaactgctactcgggaaagtcgcccgatactggatgactactatatatggcagtattgattttggccgcctattttgtgttgactataaaagccgttgaagcttcttagctgtggtcagttgtgaactggaattgtaggacctttcatcatggacttttactaccatccttgctcggctccttgccgctccgttataatgacagccaaggcccttggagttgacctgaatatgaagctattgaaggtcatggacggggagcaactgaagccggagtttgtgaagctcaatccacagcactgcattcccaccctggtggacgatggcttctccatctgggaatcccgtgccattttgatttacttggtggagaagtacggcgctgatgactcgctgtatcccagcgatccccagaagaaggctgtggtcaatcagaggctctacttcgacatgggcaccctgtttcagagtttcgtcgaggccatctatccacagataaggaataatcatcccgccgatccagaggccatgcagaaagtggacagcgcctttggccacctggacaccttcctggaggaccaggagtatgtggctggcgactgcctcaccattgccgacattgccctgttggcctccgtttccacctttgaggtggtggacttcgatatagcccagtatccaaatgtggccaggtggtacgagaatgccaaggaagtgactcccggttgggaagagaactgggacggtgtacagctaatcaagaaacttgtccaggagaggaatgaatgatttgatgagaatgtctgcagtaaatgcccaacataccacatacctcggcaaattattgccaaacatggttatattgtattgtagttaaacaaataaatcgcattgttatgagcaccgtgataataaattattatctcaaacaaacaaagctttcatttcttgttgaaaagctgctccatatatgggggtttcttataaaacaaacgaaaggcatttatttgttcactctcttatcagcaaatattaattacttttgcttttcggcttgaaatgttgataggcggtacccttattatttttattattattttttaatcgtattttaaatatttaagtagttcgtcccactaaaatgataaaaatttatataaatgataaaagcgattatgcaacagtagttttgtcctgatcacactaatcagcctccacttatatttaaaattccaatctctgtcatggttcataaaagtgagattgtgtttctgtagctctgtaaattccgcgagtgccacacgacaattgccaattgcgatttcaacaccgcagttgaatgcacgcgatgatttcactggggtacatataaatccacttggaccccttttcgcccctcgagggatccacaagccacttgggccattgaccgaccaactattagaacaatcgcgagttcagttagctaacaaacgtgctgcttgtggcattgagcggttacaaactacatatgcaagtgcacacatacttctcattggtcattgtgcgccaacaaatccaccagagggttgccacagaagttccaaaacaatttaaagctaataatcaatagacaaatcaaacgattatatcataagtcgtgtatgtaaacactttttgcgaaccattttttgaatcgtgtttatatatttcactaacaaatttgcaacacaaaatctcaacaccttttaagaaccccttgcgacagaaaaaagtgaaatcatgttttatagcatcattaaaagtatat

SEQ ID NO: 40676 - DNA, 639 bp, DROSOPHILA
atggacttttactaccatccttgctcggctccttgccgctccgttataatgacagccaaggcccttggagttgacctgaatatgaagctattgaaggtcatggacggggagcaactgaagccggagtttgtgaagctcaatccacagcactgcattcccaccctggtggacgatggcttctccatctgggaatcccgtgccattttgatttacttggtggagaagtacggcgctgatgactcgctgtatcccagcgatccccagaagaaggctgtggtcaatcagaggctctacttcgacatgggcaccctgtttcagagtttcgtcgaggccatctatccacagataaggaataatcatcccgccgatccagaggccatgcagaaagtggacagcgcctttggccacctggacaccttcctggaggaccaggagtatgtggctggcgactgcctcaccattgccgacattgccctgttggcctccgtttccacctttgaggtggtggacttcgatatagcccagtatccaaatgtggccaggtggtacgagaatgccaaggaagtgactcccggttgggaagagaactgggacggtgtacagctaatcaagaaacttgtccaggagaggaatgaatga

SEQ ID NO: 40677 - protein, 212 aa, DROSOPHILA
MDFYYHPCSAPCRSVIMTAKALGVDLNMKLLKVMDGEQLKPEFVKLNPQHCIPTLVDDGFSIWESRAILIYLVEKYGADDSLYPSDPQKKAVVNQRLYFDMGTLFQSFVEAIYPQIRNNHPADPEAMQKVDSAFGHLDTFLEDQEYVAGDCLTIADIALLASVSTFEVVDFDIAQYPNVARWYENAKEVTPGWEENWDGVQLIKKLVQERNE

SEQ ID NO: 40678 - DNA, 6781 bp, DROSOPHILA
taatgttgcaatctaggataagaatttaggggttccttatgttcctattcgcattcccactcccgatctccgagtgttatatcacttacctttggcaatggttgctctctctcgctctcttcctcttcgcttcgcatttgctcttctctccgcactacgcactcctctttctagttcccttcgttgtgcggtagcagtcagcttatgtggggcgcccactcacaattcaactcatgcgctctgcattttctaattgaattgtttgctctcaaactgtacaatcgatgctgagttactatagccgtacgtatgtgtgtgttttggcccaaggaaaggggtactgggtactgcttttcgccagcagcgtcacaaatcaatccaatcgcttttgctttcttcctactcactcgcactcacgcaccattgactttttattttcacgcacactggcacactcgcgacggacacacggatgggaatccggcgttgcgaataacggcagaattcgatttacggcaattgtcgttggtgggcgtaggcagtcaatgttttaacttaacactgggcttcacgctgatgcaaacacactctgacagcacaatatttttaagttttcggttcccagcagccatgttagcgcgatggagtcgcatttatatgtgcggcctgactatcgtggtgcatcggtttttaggcggcgcgagcgggacgccaatacagcaccaccgccactgtgaccagatggcattattgaatttaacagcaattttcacataatagcttgttcccactgagatgtaaagctaactgacacgttagctagctataactttttcgaagtctatataattctcttaacagccaatatgttttcttgttatttaatatatggcttccaccaaccaataggtttatatattaacctaacctaagattaaaataatgataactttcagtggagatagctgaaatatcgataacgactgtcacaacaacatcgatttaaataccatctctattttatcaacgcagcgtttattggctttttggcgtggaaaagtgaaaagataattgacaaaaagtccacaaaagtgccgcaacatgaacacactgggtcctaagaaggacggaagtccgaatatagactttttccagtcgccggagacgctgcagggctttgaatcgattcgccagtggctgcagaagaactgcaagaaggtgcgtgccaacaacaacgccgccgcaaacaaaaatggcgctgtcaggcggcgaaaaaaaaacgatttactcacaaccgtatttattgcagtatttggcccacagttcggagcccatcacgaaggagtccttggcccaattgctcattcacttcctgcagtatgtggaagccaagctgggcaagaactcagcggatccgccggcaaccagaattccggttagtattgatagtgcctgtggttggtgagggggacagggtgccccgtgttgcgtgtgtacacgtaaatattaatcctccaatggccaaatgtttggaccactagcttatattttgtatttagctacatgatttacgtacattaaaacatatctctaataatcgtaccacccacaccagatgcgttgctttctggacttcaagagcggcggtggtctgtgcatcattttctcgaccatgttccgtttccgggccgagcaacgcggcaagaagttcgacttctccattggcaagaatcccacgcgcaaggatcccaacatccagctgctgatcgagattgagcaggcgttggtcgaggcggacttgtatcgcataccgtacatctatattcggccggagattgaaaagggcttcgagggaaaactgcgcgagatcctggacaatcgacgggtagagattgtgtcggacgaggaggacgccacccatatcgtctatcctgtggtggacccacatcccgacgagtatgcgcggcccattttcaagcgcggcggacatgtgatgctgcattggtactacttccccgagtcctacgattcttgggctgtgaataactttgacctgcccgatcacattccggagaatcccgagtcaccggcggaacgttggcgtgtgtctgcatcctggatcgtggacctggagcagtacaatgagtggatggccgaggaggactacgaggttgacgaacagggcaagaagaagacgcacaaacagcgtatgtccatagacgacatcatgtcattcggcgacgagaagaagaagcctgctgccagctcgggcggaggcaagcagaagagacgccgttcaccatctcccgccagttcggcatccacctcaaagccgggcaagcgtaagcgttctcccgccgtggtgcacaaaaagtcgcgcaacgacgatgatgacgaggacttaactcgcgatctggatgatccgccggccgagcccaatgttcaggaggttcataaggcaaatgccgccttgcagtccaccgccagtccagctccgggcggtaaatctcgtggcgacaacgacatgatgcccattaaaggtaagttttgttatcttatatctgcattgactaaacaaactgatatctaggtggcactatgaccgatctggatgacgaaatgactggaggaagcgccgctcaagccatgtctaccggagatggggaaaactcgcagacaggcaagacaagtgataacagcaacacgcaggaattctcttcatcggccaaagaggatatggaggacaatgtgaccgagcagacgcaccacattatcgtgccttcgtactcggcttggtttgattacaactccattcatgtgatcgagaaacgggccatgccggaattctttaacagcaagaataagtcaaagacaccagaaatctatatggcctacaggaattttatgattgatacgtacaggtaagttgaagctccattttttttgcagcaaatagttttgaatatgttactcatctatttcaggctcaatccgacggagtatttgaccagcacagcttgtaggcgtaatcttgccggagatgtgtgcgccataatgcgagtacacgccttcttggagcaatggggcctgattaactaccagatcgatgcggatgtccgccccacccctatgggtccaccaccaacctcacactttcacattctttcggatacgccatcaggtctacagtccataaatccgcaaaagacgcaacagccgtcggcggcaaagacgctgttggatctggacaaaaagccattgggtaaagatggcggcctggagttgggcgataaaagtggtctgactggcatcaagacagaggctctagagaatggcgctgccggaggattaagttccggagtgagccagtttggactcaagctggatcagtacgcaaagaagccggcggccatgaggaatcgaacggcggcaagcatggctcgtgaatggaccgatcaggagactctgctgttgcttgagggcttggaaatgcacaaggacgactggaacaaggtctgcgagcacgttggatctcgcactcaagacgagtgcattctgcatttccttcgacttcccatcgaggacccgtatctagaggatgatggtggcttcctgggccccttggcctgccaacccattccgttcagcaagagtggcaatcccattatgtccaccgtcgcattcctggcatctgtggtcgatcctcgcgttgccgctgcagcagcaaaggctgccatggaggaatttgcagccattaaggtagttacattttagtcacgtttaaaccatgattttaacatccaatgtaaaacttatgctaggatgaggtgcccgctacaataatggacaaccacctgaaaaacgtggagaaggcttcggcaggtggtaaatttaatccgaactttgggctggccaatagtggaatcgcaggaaccggaaacgacaaggacgatgaagagggcaaggagggtggcgcatctgcatccgctggcggctctgatgaggaaatgaaggacctaagcaaaaaagacggtaagccaaagccattagagatcggtaaagggggtttatggatgttggttaagggaaaagtcgctaagtcgagcgagttttcttttaatcgattttaaagggaatttactcaattgttggttctgcatttgtttgtcttgttgaactcttgtgttgctttcattcaaaattcgcaatttgttcaccatttggcactgtattcgtatattgtttcgtttttgtgttgcgcccaatctaccaaacttacatcaacaccacaaccatcaaataacaaacaacaaccacagacgatgccaagtccaaagacaatacaaaatcggataagaccaacacaaacacagactcgagttccacatcatcatcagcgacaggcaacaccaacaacactgacaagaaaccaaaggagtcgtccggctcctcgccttcgggcgataagtcagccatcaagtcagacaaatcaaacaaatcctcacccacagaaaccgcagcagccgcaagtggtggcgaagtggacatcaagacggaggacagcagtggcgatggcgaaactaaggacggcactgaggccaaagagggaacgggaaccggaacagggccattggcggtgccaaaggaaggaacatttagcgaaaataacatgcagactgcggcggcggcagctttggcatcggcagcagttaaagccaaacacctggctgccctggaggagcgtaagatcaaatccctggtggctctccttgttgagactcagatgaagaagctggagatcaaattgcgccactttgaggaactggaggccaccatggagcgagagcgcgagggattggagtaccagcgtcagcagctgatcacagagcgtcagcaattccacctggagcagctaaaggcagccgagttccgagcgcgccaacaagcacatcatcgtcttcagcaagagctccaaggccaggcggccgcgggatcaatgatcttgccgcagcaacagcagctaccacaggcccagcagccgcagcagcaacagcaaacgctgccacctcatccgcacctggcgcagcagcaacagctgcctccgcatccgcaccagttgccgccgcagtcccaaccgctagcgggtcccaccgcccagcaccagccgttgcccccgcacgtagtgtcgtcgcccaacggtgctccctttgcagcgccaccgatttcgctcacgggaggactcccgccgggcgcacccacggccattgtcacgaatccgagcgaccaaaccggaccagtcgcagcgggagcagcgcaatctcaagcacctacacccatgggtaagaactttaacggataacaattcataaactataatacttagacatccaactcccgccatagatactacaccaccaagcagcggtccagtgtcagatgccaacgcaccgccgggatcggcaatgccaccagggggaattcctccggcgaacactgctcccatcgccggcgtagctccctcttcttaactcttactcataagccaggaaacgttaaagtaaatagctctaagtcgtacgctctcagtatgtattatgtatactccactttaagcccaactcttgtgtgtaatctgaaggagatgcactacacattgacgcgtctccagttttgtgtaagtttcatttcgtgtccggtcgcgtttacaagcaattgcacaaatattttgaaccaagtttcaaagccgaaaaataggcattcaataaaaatttatttaaactacgagtggcagttattcctttatttttacaaaagcaaaagcttttaacttacttgaacaagttaataaaatatctataatttaaacattatttaattaccatttttgagtttaagaaatatactaagctagctgcgtaaaatgcagccaagtatttaagccttttttgattggttattagatcactgaaagctggcgacgccgcaggatgtttggtcgcttgatctctctcatcaagtcgttactcgaagcagcacgctttacgttgggcgagctttgcaaggaaagtggtgatgcggcgggagatgaaggtggatgactggagcaggagccactttggcataccctgggagggggcggtgaagatatgctgatgttggctctcatgctcaattcgttggaagttgtttccgtcagaataccaacgttactctgtgattcttccagtgacttgcgtgtttgcgcacactccaggtggcggccatagttgcccatactttggacatacacactgttgtagaaagtgataatatcagcggtctgaccattgcccaagctaacctctcggtaagcgcttctccgaaagtgcggctgtcggcgatagtgctggataatcatgctgaaagtgaggtgaagcttctcgagccgaacatgaagatgtatggcgcacaacagcagttggtccaggtgtcgattgcggagcagacggctactctctaaggtgaaagagtgctcggccaggtgccatatttggggaaaggaatccacgaggcaaagactcttacacagaaggagcagccgccggttggccagtccgtagaactttcgaaggcagatgcttgagcctgttgaaaagttctccttgtcttctgtttctgcatcgacttccttgtagcggggaagtctttgatttagctcccaccacagctgtgagctcttgcggaaaatcaacgagtccaggcacatttcctccaccacatccaggtgcttgatcagctctct

SEQ ID NO: 40679 - DNA, 4041 bp, DROSOPHILA
atttaaataccatctctattttatcaacgcagcgtttattggctttttggcgtggaaaagtgaaaagataattgacaaaaagtccacaaaagtgccgcaacatgaacacactgggtcctaagaaggacggaagtccgaatatagactttttccagtcgccggagacgctgcagggctttgaatcgattcgccagtggctgcagaagaactgcaagaagatggcgctgtcaggcggcgaaaaaaaaacgatttactcacaaccgtatttattgcagtatttggcccacagttcggagcccatcacgaaggagtccttggcccaattgctcattcacttcctgcagtatgtggaagccaagctgggcaagaactcagcggatccgccggcaaccagaattccgatgcgttgctttctggacttcaagagcggcggtggtctgtgcatcattttctcgaccatgttccgtttccgggccgagcaacgcggcaagaagttcgacttctccattggcaagaatcccacgcgcaaggatcccaacatccagctgctgatcgagattgagcaggcgttggtcgaggcggacttgtatcgcataccgtacatctatattcggccggagattgaaaagggcttcgagggaaaactgcgcgagatcctggacaatcgacgggtagagattgtgtcggacgaggaggacgccacccatatcgtctatcctgtggtggacccacatcccgacgagtatgcgcggcccattttcaagcgcggcggacatgtgatgctgcattggtactacttccccgagtcctacgattcttgggctgtgaataactttgacctgcccgatcacattccggagaatcccgagtcaccggcggaacgttggcgtgtgtctgcatcctggatcgtggacctggagcagtacaatgagtggatggccgaggaggactacgaggttgacgaacagggcaagaagaagacgcacaaacagcgtatgtccatagacgacatcatgtcattcggcgacgagaagaagaagcctgctgccagctcgggcggaggcaagcagaagagacgccgttcaccatctcccgccagttcggcatccacctcaaagccgggcaagcgtaagcgttctcccgccgtggtgcacaaaaagtcgcgcaacgacgatgatgacgaggacttaactcgcgatctggatgatccgccggccgagcccaatgttcaggaggttcataaggcaaatgccgccttgcagtccaccgccagtccagctccgggcggtaaatctcgtggcgacaacgacatgatgcccattaaaggtggcactatgaccgatctggatgacgaaatgactggaggaagcgccgctcaagccatgtctaccggagatggggaaaactcgcagacaggcaagacaagtgataacagcaacacgcaggaattctcttcatcggccaaagaggatatggaggacaatgtgaccgagcagacgcaccacattatcgtgccttcgtactcggcttggtttgattacaactccattcatgtgatcgagaaacgggccatgccggaattctttaacagcaagaataagtcaaagacaccagaaatctatatggcctacaggaattttatgattgatacgtacaggctcaatccgacggagtatttgaccagcacagcttgtaggcgtaatcttgccggagatgtgtgcgccataatgcgagtacacgccttcttggagcaatggggcctgattaactaccagatcgatgcggatgtccgccccacccctatgggtccaccaccaacctcacactttcacattctttcggatacgccatcaggtctacagtccataaatccgcaaaagacgcaacagccgtcggcggcaaagacgctgttggatctggacaaaaagccattgggtaaagatggcggcctggagttgggcgataaaagtggtctgactggcatcaagacagaggctctagagaatggcgctgccggaggattaagttccggagtgagccagtttggactcaagctggatcagtacgcaaagaagccggcggccatgaggaatcgaacggcggcaagcatggctcgtgaatggaccgatcaggagactctgctgttgcttgagggcttggaaatgcacaaggacgactggaacaaggtctgcgagcacgttggatctcgcactcaagacgagtgcattctgcatttccttcgacttcccatcgaggacccgtatctagaggatgatggtggcttcctgggccccttggcctgccaacccattccgttcagcaagagtggcaatcccattatgtccaccgtcgcattcctggcatctgtggtcgatcctcgcgttgccgctgcagcagcaaaggctgccatggaggaatttgcagccattaaggatgaggtgcccgctacaataatggacaaccacctgaaaaacgtggagaaggcttcggcaggtggtaaatttaatccgaactttgggctggccaatagtggaatcgcaggaaccggaaacgacaaggacgatgaagagggcaaggagggtggcgcatctgcatccgctggcggctctgatgaggaaatgaaggacctaagcaaaaaagacgacgatgccaagtccaaagacaatacaaaatcggataagaccaacacaaacacagactcgagttccacatcatcatcagcgacaggcaacaccaacaacactgacaagaaaccaaaggagtcgtccggctcctcgccttcgggcgataagtcagccatcaagtcagacaaatcaaacaaatcctcacccacagaaaccgcagcagccgcaagtggtggcgaagtggacatcaagacggaggacagcagtggcgatggcgaaactaaggacggcactgaggccaaagagggaacgggaaccggaacagggccattggcggtgccaaaggaaggaacatttagcgaaaataacatgcagactgcggcggcggcagctttggcatcggcagcagttaaagccaaacacctggctgccctggaggagcgtaagatcaaatccctggtggctctccttgttgagactcagatgaagaagctggagatcaaattgcgccactttgaggaactggaggccaccatggagcgagagcgcgagggattggagtaccagcgtcagcagctgatcacagagcgtcagcaattccacctggagcagctaaaggcagccgagttccgagcgcgccaacaagcacatcatcgtcttcagcaagagctccaaggccaggcggccgcgggatcaatgatcttgccgcagcaacagcagctaccacaggcccagcagccgcagcagcaacagcaaacgctgccacctcatccgcacctggcgcagcagcaacagctgcctccgcatccgcaccagttgccgccgcagtcccaaccgctagcgggtcccaccgcccagcaccagccgttgcccccgcacgtagtgtcgtcgcccaacggtgctccctttgcagcgccaccgatttcgctcacgggaggactcccgccgggcgcacccacggccattgtcacgaatccgagcgaccaaaccggaccagtcgcagcgggagcagcgcaatctcaagcacctacacccatggatactacaccaccaagcagcggtccagtgtcagatgccaacgcaccgccgggatcggcaatgccaccagggggaattcctccggcgaacactgctcccatcgccggcgtagctccctcttcttaactcttactcataagccaggaaacgttaaagtaaatagctctaagtcgtacgctctcagtatgtattatgtatactccactttaagcccaactcttgtgtgtaatctgaaggagatgcactacacattgacgcgtctccagttttgtgtaagtttcatttcgtgtccggtcgcgtttacaagcaattgcacaaatattttgaaccaagtttcaaagccgaaaaataggcattcaataaaaatttatttaaacta

SEQ ID NO: 40680 - protein, 1228 aa, DROSOPHILA
MNTLGPKKDGSPNIDFFQSPETLQGFESIRQWLQKNCKKMALSGGEKKTIYSQPYLLQYLAHSSEPITKESLAQLLIHFLQYVEAKLGKNSADPPATRIPMRCFLDFKSGGGLCIIFSTMFRFRAEQRGKKFDFSIGKNPTRKDPNIQLLIEIEQALVEADLYRIPYIYIRPEIEKGFEGKLREILDNRRVEIVSDEEDATHIVYPVVDPHPDEYARPIFKRGGHVMLHWYYFPESYDSWAVNNFDLPDHIPENPESPAERWRVSASWIVDLEQYNEWMAEEDYEVDEQGKKKTHKQRMSIDDIMSFGDEKKKPAASSGGGKQKRRRSPSPASSASTSKPGKRKRSPAVVHKKSRNDDDDEDLTRDLDDPPAEPNVQEVHKANAALQSTASPAPGGKSRGDNDMMPIKGGTMTDLDDEMTGGSAAQAMSTGDGENSQTGKTSDNSNTQEFSSSAKEDMEDNVTEQTHHIIVPSYSAWFDYNSIHVIEKRAMPEFFNSKNKSKTPEIYMAYRNFMIDTYRLNPTEYLTSTACRRNLAGDVCAIMRVHAFLEQWGLINYQIDADVRPTPMGPPPTSHFHILSDTPSGLQSINPQKTQQPSAAKTLLDLDKKPLGKDGGLELGDKSGLTGIKTEALENGAAGGLSSGVSQFGLKLDQYAKKPAAMRNRTAASMAREWTDQETLLLLEGLEMHKDDWNKVCEHVGSRTQDECILHFLRLPIEDPYLEDDGGFLGPLACQPIPFSKSGNPIMSTVAFLASVVDPRVAAAAAKAAMEEFAAIKDEVPATIMDNHLKNVEKASAGGKFNPNFGLANSGIAGTGNDKDDEEGKEGGASASAGGSDEEMKDLSKKDDDAKSKDNTKSDKTNTNTDSSSTSSSATGNTNNTDKKPKESSGSSPSGDKSAIKSDKSNKSSPTETAAAASGGEVDIKTEDSSGDGETKDGTEAKEGTGTGTGPLAVPKEGTFSENNMQTAAAAALASAAVKAKHLAALEERKIKSLVALLVETQMKKLEIKLRHFEELEATMEREREGLEYQRQQLITERQQFHLEQLKAAEFRARQQAHHRLQQELQGQAAAGSMILPQQQQLPQAQQPQQQQQTLPPHPHLAQQQQLPPHPHQLPPQSQPLAGPTAQHQPLPPHVVSSPNGAPFAAPPISLTGGLPPGAPTAIVTNPSDQTGPVAAGAAQSQAPTPMDTTPPSSGPVSDANAPPGSAMPPGGIPPANTAPIAGVAPSS

SEQ ID NO: 40681 - DNA, 6779 bp, DROSOPHILA
gggcgagagagctgaaaggattcagaaaatcaatatgctgggtaataactgtggcgacaccgtcgcgatatataaaatggggaggattgtgggcgatttggggggtggttggtcgcggaagggtggtctttggcgacgacgtaacaacattggcatgctgcggcgcccacgcatccaagcactgagcactcagcatctgaacgtctgaacacaagcacaatatccgtcgtctgctggctgattcgattctctgggatcgagagatttataattagcagaccattgttcccgtcagcgcagccttgttgttcttgtgttgttggcctacgtctagcataaaagcagcaacaatagcacatagcacacatgcgatattcaagttcaggttcaggtgcgcattgatttcgctcttggtgtgcttttcatgttccgcactggtacgcactacccttccacgctgctgtcacctatgcgatttatgtaatttttgtatgatttaccgcgttccaatgttgtttacacccaaaaactccgagcaagtgcggaacttgtcgtgggaactgcgatttaggggtggcaaaagtgggcagccaactgccgataagtgggagcacgtatcgataggtgcgggcgggggtgtttcagtggctgggttgtgacacgatagatttaaagaaatatttcttaaatattaattaagatttgtatttaattgtgtttccagcaaaacgtaccaatgtaatatttattaggtaaacatacataacaaagcgctatatattcaatacaaaattgtgggccaagtacccttcaaaaatttattaagaggaatttataacattattattaaatgtactttattattttttacaattatttaataaaccgtttcttatattaaaaaaaataataaggtttaattaactgtattatacagccacactagaagtgcaatcgaaatcgacttgctatcggtgctcgtaaggcgcatcactagtatttcgtttcggtcggtacgcggttcagcgtttttgttcaacggattagcgcaagttaagcacgatggcggcccagacgatactgtttgatttcacgctggacaaggacaagacggcggatgaggaggcgcgcctccaggtggccaaaatcctgcgtaacgagctggagcagctgttcccccagctggagctggcctactcgatggagtcgccggaaaacggctactttgcggtgctgcacgagaacaaggacacggtgattacctgccgcatcttccagcacggcctgctgacgctcaacgtggagtacttcctgcccgatggcaaggagccgagcatatccttcgacgtacgtattcagtgcaatttagattcctttaaaaaactcaaaaaacaagcaagcaaacacccgacagcagcaccaccacccacatctttcttaccctcccagtttccgtgtctcggctgattagttggggaaagggttttccacccaccgggtaaaattgattttccgcgcacttgtacccgagtgttgttgcttcatcatacatacatgtgggggtgtgtgcatggcaagtgggcaaccatgtgggtgggttgattggttgtgtgtgtgagtgtgttcctgaccactcggcgagctcaaatggccggcacttggtcagggtcagttcgtccgtccttggcctcaagtgatggctgcccccatcccagcactttcaccagtttctattatctaacacctctgaagcacacatcacatacatagcgatttcagctgggctttgctaggttaacttgtcgttccggtcccgtttctatgcttttcacatttggccggagcacgtgggttgggttcgactcgcgatctattgattggcgcccctttggggcatggtacccatactaataagaagaaaaacacccggaatatgcggcccttattacagaaaccagatttcaggttacacccttaggcacgcattatttcatttgatacttaaactttcttataccagtttactctacttacgcatgcacatataaacaaacctaagtcaacaaaatgactgttgataccacaaatctgagggttttcaaaatgacaaccagtatttgtttgtaaaacaacaaagaatataaaatttgatagaatatttcaatttcttccatcatttgtttaagtacatctaaaatgctagagaaaatgtcccatgtacatatgcctacagctacggtaagctaaatagcatcaaaaaaattaaattatgtcaaaaagtctaaaattgttttgttctataactatagctttaacaaaatcccaagtaaaatttttataaaattatatttttatacaatgatggagttagttaggatataatctcaacaaacctttgtactttataaataatttaatcaagtaatcgaacaaagaaatcaacctaaaccaacttttctataggagtaactaatattatcagacccattattatttcctcgtatcatttgaaatgctatatcttgccgatcgcagctgttttattcgcgagtgcggaacttttcttatctagccgtcaatattttttctgcttacgactgtttgctgttggcctgtggatttcgcaagccgcatgtggctaagccttctattgtgatttctgtgattttgcaataacatatgcctgctgcacatgcaactaaacaaatgtgtcgccagaatgcacatacttgcatggctactagctatatctagatataggtatatattccctttttcgtttcgttctgttcactttcctttttcataagtatcaagtatttggactaaaaatagtatttttcttgggccgggctgcctgtgtgtcgccgtttggtgtgagtggggtgggtcgttcgaagagttttccgcgcctggcggatgaaggtcaccttccattaatataatttattcatactgagtaccccagcccccatcgagccaacatgcacatttgtacatccgacgcccccttgcaagaaggacctcaataatggaattaccattgcagaccatgcgcaccatggaactgattttgcggcagaaatttgattccgatcggtccaagtacttgccgccgattaaacgcggcggatatatcgacatatatatgactagctcaggttggtcgaacttaatgcaacctacatatatgtacaatcaaaaaaaatccagtttagttcctgctagtttcatttgcaatgaatatatataacttatctactcaaactcacttcacatacaattacctacaatttatgccgaaattctctttcaaaattccactgcagaatctagaacacctgtgcagtttttccactagtatttccgattgccgccaccgcaaagaaaataaataaaattagaaaaaaaaccctcatgactatcacataaattggacaccgtatcgcagctgatgtaaattcaccgagttgtcatttccagcccagaatttgaaccgcctcccaagctctgcacatctccaaagccaccgatcatgttagcctagcgtgttaccttctaggggattacttttccaggccactcctgcatgctagtttgtctaatctttggaagaagccttctacctttgcagtagtggtgccaagttgctcatattattgtactgtgggtttaatctctttatacctttatgtatccacgctgattttatatcagctccttggcatcactgcaatttagcatacccactgttctaagattattatttaatttaaattacgttttattttcatatctattccatcgacactcaaccgatccatcgatcatcatgaacaaccgctgccaccatctcctggaccaaattacacaccaaaattgccacgaacttgtgaataaatgtgtaaactattgaattatacttacgccccaacgcacatgtgtcacctgccccgcctcgaaatcgatctcgtactcgtattcgctccacgtcgtacgctcgctcataaattggttcctcaacaattgacaatcgactacaacaacacgaaaatatcaatacaacacggtttataaaaaaaaaaaacaatatactactatgtaaaatcgaacggacatccgcagagcggtaagagcctggagaatgtcctggcaatcaaactgaaggccatcaaggcccagaagctgccgacgctgaagcgcggcgatgtctccaggtacttcccatcgtcaggtaaggcaaacccaatccgtttggttaaacatattgcaaatagagcaaatactactcgtactaccgctactgtatgtcatccgaattgtgtgtgatcgtatgaccgtatgaccattgagcgtatgcagcaccatcgagctgattgtatcagagttcttctagtggcacccagcatgatagatcatttcagtcatttacttctgattttctctctatctatatctcgtttactttccgtaagagtgcatttcgttggtcttaaacttgtttctctgcatgcgacgcctaacaattgagccgaaatcagtactagtaataatcaatatcgcacttaatacggtcactaataaggcatcactaatccatggcacatcttccgcagatgagcgcatcatcgagtacgacatcgacaaggtggtcttcgaggcgcgctcgcccttccagaagattcaaatcatgcactccaagaccctgggcaacatgctgctcctcgacgagctgcagagtaagtaaaccatacctagtataggcatctgaatgcaataagtggcacattcacacattgatgcgccaacggtgtcagggtcaccaatcgattagtggaagtgccgcagtaaaggtcacgtgcaattgcctttaagaaaaggtcatcataaataaatataaactgcacataaacataatgcacaaaagtaaatattccatatcacgggcattttctggatgctaatgctatgttacctgacaattattccatatcacgaacacctagttgcttgttaactaaatataatgaaatattcttattgcttaaaagaagaataagaaagctgaatttgaaaacatgaattctcgactagattaaaaactttttaagctgtcggttatgaaaagggtaatagcaacttcttttgattcttttttaaatatagatgtctaatttcccattttccacgtacagacattgctgaatccgatttgatttacacggagaccctgatgtgtcgcggcgtggagaactacgagggcaaggagatctgcatcctgggcggcggtgatggcgccttgttgtacgagctactcaaggagaatccgaagcatgtggtgatgctggagatcgatgagcttgtgatgcaaacctgcaacaaatacctcaacgtgatctgcggcgatgtgctggagaaacgcaagggcgatcagtacgagatcattgtgggcgactgtgtggagtacttgaagaagttcatcgccgagggccgcaagttcgactacgtttttggggatcttacggacatacccataaccgatgccccggagggcgagacctgggatttcattcgtaccatcttcgagcactccttcaaggtgctgaaacccgacggaaagtatttgactcatggcaatgggtccacctgcaaggtgcagctgcgtctattcgaggagcagttgaatttgctgcgtcccaaggtgaagttcaccaccaccaaggcgtttgtgccgtcgttcatggaagagtggctcttctaccaagtgactttcgcctgacaagctcaggtggactcctcagcagcagcagtagctacttctagcgcaccaccaaccgccagtcacacaccagcatcacacagcataagtcaggaaccgggaaccgtcggagagatgctccagctgcactcctacactgtcactatccatggagcagcagtcggagttcaggaggaggaaaatatgaataatggagccgtgggtcaattgaaaccgcgaccaaggcgtcgaaagaagaagcgtgtacactaccatcacacgctggtttcttagtccaggaaacacggaatccgatgcacaagctaatcgccatcatcgaaaccatcgcaacaaaacccaagacagaggaaaacacgcacttccaatggctgttacttacaattgaaaaccaaaccaaatactgaacccaattcgtttacgcttaagttaggctttagttccgtttctcgttcactgatttcaatgctaaaaactaagacaaaagtacaacctttaagcaaggacaggctaaaataataacttatgtattcgtgtttatttgaattacgcctaagcatagcatgttggccaactatttgtaatatttcgtataacgtgtacatctatataatgtagaccatatgtttagttatccattaacaagcaaagtggagcggggaaggcccaaggatcgaggatgtgtgtatgtgggtgtgaggaagcgtagcaggaacaccaacttttattgctgtaataacgattaataccaaacattttaaacgggagaactaataaagttaaataaatagtcgtacgcagaaataaacagtgtggttttcttttattttaccgggtattttaataataaatcctggaattcaataaattacaaattcaatagcaatattcaagtaatactacgcatacgcagtgttgacctatccttaatcaatatggataaaaaattaattaagggatttatcgctatgaaattcttaatataaataaaattttatcttaa

SEQ ID NO: 40682 - DNA, 1163 bp, DROSOPHILA
ttcgtttcggtcggtacgcggttcagcgtttttgttcaacggattagcgcaagttaagcacgatggcggcccagacgatactgtttgatttcacgctggacaaggacaagacggcggatgaggaggcgcgcctccaggtggccaaaatcctgcgtaacgagctggagcagctgttcccccagctggagctggcctactcgatggagtcgccggaaaacggctactttgcggtgctgcacgagaacaaggacacggtgattacctgccgcatcttccagcacggcctgctgacgctcaacgtggagtacttcctgcccgatggcaaggagccgagcatatccttcgacagcggtaagagcctggagaatgtcctggcaatcaaactgaaggccatcaaggcccagaagctgccgacgctgaagcgcggcgatgtctccaggtacttcccatcgtcagatgagcgcatcatcgagtacgacatcgacaaggtggtcttcgaggcgcgctcgcccttccagaagattcaaatcatgcactccaagaccctgggcaacatgctgctcctcgacgagctgcagaacattgctgaatccgatttgatttacacggagaccctgatgtgtcgcggcgtggagaactacgagggcaaggagatctgcatcctgggcggcggtgatggcgccttgttgtacgagctactcaaggagaatccgaagcatgtggtgatgctggagatcgatgagcttgtgatgcaaacctgcaacaaatacctcaacgtgatctgcggcgatgtgctggagaaacgcaagggcgatcagtacgagatcattgtgggcgactgtgtggagtacttgaagaagttcatcgccgagggccgcaagttcgactacgtttttggggatcttacggacatacccataaccgatgccccggagggcgagacctgggatttcattcgtaccatcttcgagcactccttcaaggtgctgaaacccgacggaaagtatttgactcatggcaatgggtccacctgcaaggtgcagctgcgtctattcgaggagcagttgaatttgctgcgtcccaaggtgaagttcaccaccaccaaggcgtttgtgccgtcgttcatggaagagtggctcttctaccaagtgactttcgcctga

SEQ ID NO: 40683 - protein, 366 aa, DROSOPHILA
MAAQTILFDFTLDKDKTADEEARLQVAKILRNELEQLFPQLELAYSMESPENGYFAVLHENKDTVITCRIFQHGLLTLNVEYFLPDGKEPSISFDSGKSLENVLAIKLKAIKAQKLPTLKRGDVSRYFPSSDERIIEYDIDKVVFEARSPFQKIQIMHSKTLGNMLLLDELQNIAESDLIYTETLMCRGVENYEGKEICILGGGDGALLYELLKENPKHVVMLEIDELVMQTCNKYLNVICGDVLEKRKGDQYEIIVGDCVEYLKKFIAEGRKFDYVFGDLTDIPITDAPEGETWDFIRTIFEHSFKVLKPDGKYLTHGNGSTCKVQLRLFEEQLNLLRPKVKFTTTKAFVPSFMEEWLFYQVTFA

SEQ ID NO: 40684 - DNA, 3507 bp, DROSOPHILA
tgcaggtggatcaccgaattctcctcggaattgcgtgccttttcgatgatccggtcgttgtagaacaccagcatgtttgacagtgtatataccagctcactgaccacatttgatgaggaaatgcgacctggaagccggccaatgagatgagtctgtaggctctatgtaagcaaggagttcactttacctgctataaagtaggatacccacttggctgtggtctcaaaatcccccaccacgtcggggtttttgcccacccacgcctcgtacgccttcagcatgcccttcagagtgtccattatatccggaaaatattgtctgttcctccaaataataaaaataatgaggtgtttcggtctacaggtaatcaaatcggtgcagttgtggtgttctggcgttttgaacaaggcgttagtgctttcatgcaacacaaaatagaaggtgacgcaaaatgaatacatatatgaatgcaagcacggagagcgttgattaaacgctttggattaataaaattggtacaaaaataaataccaaataccagtgtcacgagcttatcgccattacactttcaaattttaccacattggtgcttacacgtcatagaaaaagaaactaataattaaggacccacaatttgtaagaaccacatttggcatatctgccaccaacctttcatagccccttttaatgttcttcaatgtaaagatttgcttgtttagtctcggcatcttaattcaagtttcctgattctttatactgcagtatatttttattgggtatattatgcatttaaaattttagcccaggtactatgttctttataatagaaacatttcttaccaaatttttcggtaaaaacatttttccaagttcaaatctttattacgttacaaattaccttaacgttatacataataaccctagaaacgctaatgcattagtaatttcgagagcagcaaagtctttggtcacacttttgtttttgtgcactttgtaatcgaattgctcgtgaattcggattcactccgttttcgtgtgtattagctaggcaagattgaattaagagtcgatatacagatgtccagcaacaacacggacactggggacaccaccgtcatggcgacggctacctcggtgcagaacgatgtcgaggccggcgtagatgagcaattgcctcgagaatcgctggtaatatttgttcaaccccttcaagtttgcctaatctataatccgactattcgccgcagataaccactgcagtcagttttctacaaaacaccaaggtgcgccacacgacacttatccagaagcagcagttcctacggtccaaaggtctcaccgctcacgaaattcagctggcctgtgaacgggccggcgttttcacccaagaccccaacaagcccaatccgaatccgaacaccgtcattagcattggatcccaattgcacgcgctgcagccgcagccgactgtcttgggccggatcagggaaatcatccattcggcagccctgttcagcggagtcgtctacgcagtctacatcttctggaaggtgagatgcagtgggatctctatttcggggtcttttaaaaagatttattatatttactccaccaactcgagtgcgaatttaaagatcgccatcttgtctaaggcttagatacattacacatatatttgatgacacttttaccagacgacgttgaatttacttagtatttaacacattttgtaaaagtgttaggacgcataaataagttttaagtggtccaccagtccaaagtccatgattgctaataacttctaaaacccgtataatttcagcaatacattgcgccctacctgttcggcaagtccaagaagaaggcggtcgatgaagtcctggacgacatagacaagaaggtagagacccgcaccaacgacctcaacaaggagattttggcggtcagggatctgatcaccacacagcaaagggaacacgcccagcagctgaaccgcgaatttagtaacttccgtagcgatctggatgccattaagggcctgcttttgaaccgaaaacagttcgccggccctgtggctccgatcgcagtgccatccattcccgcctggcaattggccggctcaccgcatcaccatcaccggcacagcgggtcggacgacaacgagaagggcgatgatgctggatccgggtctggctcgtcggagacagaggtggtcaccaagaatagtgactccagcttggagatcatgtaatgcaatcagaatacgaggctggctatatagacgtagtatatagttacgctgtaaattgagtttccccgttaaatgccttcaagacttttggttttttttctttgcgtttatagcatttaaggtttctttatagtcaacagctaatccatatccaaaagtacatacacacactcacatatacacacttatgcgatacgatgtctatacaatgtaataataaaaagtttacataataacaggtttgaattgaaagaaactgtttaattaagcgcaaaaatgctttgtgtagttttttgtttatcggtacatacggggtggggatagcatatcggtttagacaataaatttcgacttagacgataattggattctaaaaattttgccgagtgctactttctataaattggctaaattcccttaggtttgatttaagattatgccgggcggagcacctcgaggttttgcctacaagctccttgaagactccacccagatccttaacggatttaaattatttatttattgtgcggtgcctagttatggttttgtttcaattacaaatttggttctctgcgcattcccttcattaaatttccttcactacttacgttagttatcgatttgtacatacgataatttagtattcaaataattgtttgccattttcgtaaaagttaatgtattctagtaagttaatattctcacaaacgattgttaagggcttcacagttcacatgaatgtgttctttatttctcacttcgttttgtgaatggacaaaccattgcgaaataccctgaaacaaggatagagaacagtacccctacccatactatgtatgcattattagagtcttttgttgggtagcttggcccttgtttgttgggtacaatcgtataagataaacagcggccaggccggcatttttatcagctatttcaaattaaatataacatatttacaattaattataccttgcgatgggggcaataccagctgccaaaggccgagcactgtgtacgtttgaaaattaaagctttgacaagaagtacaaaaatgtgtacgtttgaaaattaaagctttgacaagaagtacaaaaatgtgtaacaaaatatttagtgttttaaagcctgttgtttgacccaaacgtaatttaccattcggacaggcatcatttgattaacaccgagcgatgtgtaacgttacaaattaagtttttaaaataagaaattacaaaatattgcgtaatatgtatatg

SEQ ID NO: 40685 - DNA, 1176 bp, DROSOPHILA
aattgctcgtgaattcggattcactccgttttcgtgtgtattagctaggcaagattgaattaagagtcgatatacagatgtccagcaacaacacggacactggggacaccaccgtcatggcgacggctacctcggtgcagaacgatgtcgaggccggcgtagatgagcaattgcctcgagaatcgctgataaccactgcagtcagttttctacaaaacaccaaggtgcgccacacgacacttatccagaagcagcagttcctacggtccaaaggtctcaccgctcacgaaattcagctggcctgtgaacgggccggcgttttcacccaagaccccaacaagcccaatccgaatccgaacaccgtcattagcattggatcccaattgcacgcgctgcagccgcagccgactgtcttgggccggatcagggaaatcatccattcggcagccctgttcagcggagtcgtctacgcagtctacatcttctggaagcaatacattgcgccctacctgttcggcaagtccaagaagaaggcggtcgatgaagtcctggacgacatagacaagaaggtagagacccgcaccaacgacctcaacaaggagattttggcggtcagggatctgatcaccacacagcaaagggaacacgcccagcagctgaaccgcgaatttagtaacttccgtagcgatctggatgccattaagggcctgcttttgaaccgaaaacagttcgccggccctgtggctccgatcgcagtgccatccattcccgcctggcaattggccggctcaccgcatcaccatcaccggcacagcgggtcggacgacaacgagaagggcgatgatgctggatccgggtctggctcgtcggagacagaggtggtcaccaagaatagtgactccagcttggagatcatgtaatgcaatcagaatacgaggctggctatatagacgtagtatatagttacgctgtaaattgagtttccccgttaaatgccttcaagacttttggttttttttctttgcgtttatagcatttaaggtttctttatagtcaacagctaatccatatccaaaagtacatacacacactcacatatacacacttatgcgatacgatgtctatacaatgtaataataaaaagtttacataataacaggtttgaattgaaagaaa

SEQ ID NO: 40686 - protein, 280 aa, DROSOPHILA
MSSNNTDTGDTTVMATATSVQNDVEAGVDEQLPRESLITTAVSFLQNTKVRHTTLIQKQQFLRSKGLTAHEIQLACERAGVFTQDPNKPNPNPNTVISIGSQLHALQPQPTVLGRIREIIHSAALFSGVVYAVYIFWKQYIAPYLFGKSKKKAVDEVLDDIDKKVETRTNDLNKEILAVRDLITTQQREHAQQLNREFSNFRSDLDAIKGLLLNRKQFAGPVAPIAVPSIPAWQLAGSPHHHHRHSGSDDNEKGDDAGSGSGSSETEVVTKNSDSSLEIM

SEQ ID NO: 40687 - DNA, 3310 bp, DROSOPHILA
gccaaatgaggcgtttcgaggaggaagtcgactcggattaaaattgttattaaggctggaactttaccagaaaaacgtacatgttgggagcattaaaatataaacaatacagtaccaaaagtatgttcattttcggtgtaagtgtgggaaaactaaactagtaaagctacatactacagaccacaaatcggtctcttgattactcttgatcgtcagaagattcaggtgaactcccggctcgttttttctttttttgtggagctccctgcttttgatcctcgctgctgtcgctgtccgagccacttccactggagtctgacgagctgccttcctcgtcgtccgaatccgaactggagctgctcgagtctgattcggatgaggagcccgattcgctgctgctgtctgagctgtccgacgagctggaggaggacgaggagctcttgctcgttttccgctttcgacggaccttctttccttccgaggaagccacttccgagtgctcctccacctggttcttgggtgcgtcagcctccttttgggacatacgcttgcttagctgcttggtacgcgagctccggtggacgtatttgcgcttctccttgcactcatagctccagtgtccgatctgcaggcacttctggcaccggatgccattgggaaagtctgctgcttgctttgcggatctgttgttacagaattcgtaggttacaacaaaaaagccggctggggtacttcttaaacgcgactaacctcttcttttgcgctaatttgcgggcagctaggcccaccaaagtcatcctgaagcactcgagcagacgctgttgggaggaaatcttgatgtgggtggaaaccaacgtggccgggtggaaaaactgggaaaaatgagtatcaaaaatgttttttataatttttttcgtcacattagcgatagtccactgaaaattgtatacttcgcaaatcgactgtatatggtatggtcacccttattgttatcggctatcgaactcaacagctgcttgcctaatttgtgtctacctggtttatgttgaaatgtctgaattttaaagttaattaagccaaaatttaagtgcattatgcatggtcgtaaaaaaaataagaaataagcaacagctgacagctatttcacccttaattgactggcacaaattgcttggtcaaacaataacaaaagcgctgtgctgactaagcggcgaaagtggttgcaacaaagtccaatcactatcaatcggtaaggttgctgcaggtcatttgctgaccagtaataaaggatttcatacacagctagccatggacaacagcgcgttgatgccacaggcgagcggacgtcatatgccgcccgaggaactggccatgcaagcactaaccaagcagctttacaagtctcgtctcttccgcggttattatatggaacgctgcttggtggagcaggtgtccggctaccgggacgtggtggtgcttcaacgcagtgagcgagagttggagaagctgctgcactcgagtgccggccaattacaaaagttttatcaacgcttcgtgcccaatatgtgggtgggcatcacctatgggagttacggaagttaccagcacaaagcagatcctggtcaactggaaacctgcatctggacagagatgaatgatctggcttttggagagtattggtttagcatcaagacccttcgcttccgggaccatgaagtccagttcaaactgaagatgataaggcccgtggagccagagctgatggcgacgccgaggagatcactgattcttaatagaagtagccctgttaaggcgatcacagcgggtggggaaaactcctcctccaagccggatgaagtggcggagcaaattcagctgggccttaatgattttttggctgtgctgcaacagtggggtgatggagtcaaacaaaccgtgtacgacttcatgaccaacgatgtcaacaagaggaacattttgggcaccattcggtttctgggtctactaattttctctgccttgggtggagccgcactagcgctacgattcctaggcgtatttgctgtgcgattcctgtttgagctgagtcgtttcacacatacagccactccaatagtgtttaaactaatcgagtttctgaacaagattgtgggtgctatcttcatacttttgaccatgatttggaaagacattgtcactcgtggacatccggaaccgaaacagcagcagctgcatctggaggcaagtagccgcttcaagagcatccaatacgagcgttccgaaccaaatcgacgtagtccccggtggtgacccgccactaaaagcacattaatgtctagcaaagtgttccgaggtgtaagggcaacgaaaaatcattgaaattgtgttactagccgtaagcaaagcgaagccaatcccaatccccgcttcgagtccgagggtatttgccctgcaaatatggggacacctatgagatttacagattttagtcaattgcaatattgtaaattattaattggcgtgccactggcgcacaatcgcatgcttattaaccccactgttaattcattgtgtattgtccaaaaatatgttttattaaatccgtttagtgttagatcctgtaatttatgtatcgaaaattattgtgaataaattgaatgcaatatgcgaaaatcgaaatgaaagagcttggcgtttcgttagttttaatagttatacactttccctttattactttagttgattttaatctcgttaaattgttctcatatatatttattatgtatatactcgtacgtgttcatgctgtcgtcttcggtctgtcatcgaactttacacaaaatgtttaatttattttccgtttgctgtgcttagttttcagggtgctatcgtcagagaaacaccacgttctgccgttggttttaaattgagtggaaaatgttctatggcatttcagggagtgcctctgtttctagctgacaatttttgcatccggaggatgctacgaggaatcctctggtgtctaaatatttatcaatcattaaacaactaaattatacttttcggttttccgtctcgggggtgatatactttaattagtacatttacatatattttacttaattttgcaatgtatattaatggaatgctgctcaacaaactttgctcataaacattaatttaatttttgctttctttacggcttcataataataatctctttgcagacaataaaaaatgtgtgtgagagtcaatgctggaggtttgatatatcttttaggattcggtgaggattggatctaggggttgg

SEQ ID NO: 40688 - DNA, 1251 bp, DROSOPHILA
cgaactcaacagctgcttgcctaatttgtgtctacctggtttatgttgaaatgtctgaattttaaagttaattaagccaaaatttaagtgcattatgcatggtcgtaaaaaaaataagaaataagcaacagctgacagctatttcacccttaattgactggcacaaattgcttggtcaaacaataacaaaagcgctgtgctgactaagcggcgaaagtggttgcaacaaagtccaatcactatcaatcgatggacaacagcgcgttgatgccacaggcgagcggacgtcatatgccgcccgaggaactggccatgcaagcactaaccaagcagctttacaagtctcgtctcttccgcggttattatatggaacgctgcttggtggagcaggtgtccggctaccgggacgtggtggtgcttcaacgcagtgagcgagagttggagaagctgctgcactcgagtgccggccaattacaaaagttttatcaacgcttcgtgcccaatatgtgggtgggcatcacctatgggagttacggaagttaccagcacaaagcagatcctggtcaactggaaacctgcatctggacagagatgaatgatctggcttttggagagtattggtttagcatcaagacccttcgcttccgggaccatgaagtccagttcaaactgaagatgataaggcccgtggagccagagctgatggcgacgccgaggagatcactgattcttaatagaagtagccctgttaaggcgatcacagcgggtggggaaaactcctcctccaagccggatgaagtggcggagcaaattcagctgggccttaatgattttttggctgtgctgcaacagtggggtgatggagtcaaacaaaccgtgtacgacttcatgaccaacgatgtcaacaagaggaacattttgggcaccattcggtttctgggtctactaattttctctgccttgggtggagccgcactagcgctacgattcctaggcgtatttgctgtgcgattcctgtttgagctgagtcgtttcacacatacagccactccaatagtgtttaaactaatcgagtttctgaacaagattgtgggtgctatcttcatacttttgaccatgatttggaaagacattgtcactcgtggacatccggaaccgaaacagcagcagctgcatctggaggcaagtagccgcttcaagagcatccaatacgagcgttccgaaccaaatcgacgtagtccccggtggtga

SEQ ID NO: 40689 - protein, 333 aa, DROSOPHILA
MDNSALMPQASGRHMPPEELAMQALTKQLYKSRLFRGYYMERCLVEQVSGYRDVVVLQRSERELEKLLHSSAGQLQKFYQRFVPNMWVGITYGSYGSYQHKADPGQLETCIWTEMNDLAFGEYWFSIKTLRFRDHEVQFKLKMIRPVEPELMATPRRSLILNRSSPVKAITAGGENSSSKPDEVAEQIQLGLNDFLAVLQQWGDGVKQTVYDFMTNDVNKRNILGTIRFLGLLIFSALGGAALALRFLGVFAVRFLFELSRFTHTATPIVFKLIEFLNKIVGAIFILLTMIWKDIVTRGHPEPKQQQLHLEASSRFKSIQYERSEPNRRSPRW

SEQ ID NO: 40690 - DNA, 3284 bp, DROSOPHILA
ggccaggacaatagcattgatcttcggatgcgagtccgtggtgctcagatagtcggcgcagccatgctcgaagggatagatgccgatgcaggtgtgccggttggcctccttgcgattccactgtggctccggcagatcgtcgatgatggaatttcggctctgcggctggcacttgcacatcttgtccagcgactccactaaacgggctagaaagccactcttctgcttctgcttctgcgcctgcgatgatttgtgggactttgtggcacgacccttcactttcggcgcagttctcgttgggacgagcacacggggacggcgcttggagtaacgctggaactcgatcctttggggcttgctcttgctcaggctaagctgactcttccccggctcagcgtgcatctcgtacagagtgtgtggtgagctccccgaatccgtggacgcggtcatttccccgtgcgccacatccttgaacatgttgtactgcgtctgactgtgctgatatgcgtcggaatcgctggaggagttcagccgtgggaagatcttcttcaggggagactgcagcttggccgtcacccccacgtggttcaccttgatcaggttggacttggaggtggcgcaatggggatcggttgattccgacatagtgactttatgttctaaacttatgacgtgccgcttcaaagccaactgacgtctttttcgtacatatgatctgaattcaagttaggcgtgccaaaaagttaacttataagctttttaccacagaagagaacatatactctttggcctagagacaagaatatataatttaatataaaaatgtatttttattattattggcttatgtctgtgctataaaacttttcatttccggtttgagccaccactacgtttgcaggtatgtttcggtatatttccggtagatggtgtacccgtcagtggtttcccttaccggcccccaaacggtcacactcgcccgagcatagcagatttggagaaaaaaacaactgtaattaggagccataattaattcatttcgaatcgcacacgcttttcagtttatctagccgaaagtacagaatgttggcctccgcctggcgcagcgtggccacctccgtggagacccagttgacggccacctacttccgaggttcgtccagcaatccgacactgctcctgcgttcctggcggacgattcctcgagcggatgcccctggtttcggagcgattcggcggcgttttctggctgtgcccgtcatctgtccaagtctcgtcaagcgtaatctatccgtacatacgtgtttaatctaatctctcccggtgctgcaatttcatttcccagtatctacgctttttgttcgtccgtagctagtcagtctgtttatctgttggccatctatgtagctaaatgtgaaaccatcgcttcgtttcagtgcaaaaactacgaaaagtcggcttcagaggcatgcacagcacattggaggacgtgcagctggagggcatggagatcaagatcctgccggccctgcaggataactatatgtatctgattgtagacacgaagacgcgcgaggcggccgtggtggatcccgtggagccggagctggtcattaagacggtgcaggagcagcagctgaccctcagcaaggtgctgaccacgcaccatcactgggaccacgccggtggcaatgaaaagctgctcaagctgtgggagaaggagctggacgtgtatggcggcgatgaccgcatcggggcattgaacaaaaaggttcagcaggacgacaccttcaccattggtggtctgcatgtcaagtgcttgtccacgccgtgccacactaccggccacatctgctaccacatcaccgcgcagcagggcagcggcgagggagccgtcttcaccggcgacaccctcttccagggcggatgcggccgcttcttcgagggcactcccgaggaaatgtacgaggcgctgtgcacaaagctctccgccttgccggacgccacaaaggtgttctgtggccacgagtacacgctgcagaacatgagcttcgcccgtcacgtcgagcccgacaacgaggtcatccagcagaggatcgagtgggccaagcaccggcgcgcctcccaggatcccactgtgccctccaccattggcgaggagaagtcctggaacccctttatgcgcgttcacgaagccaccgtgcagaagcacgctggcggagccaccgatcccgtcgtcaccatgggcaagctgcgcaaggaaaaggacaccttcaaagcctgatctatttcctcgaaagtttcgaaacttgtgatttaatattggattttaatggttaataaaattaacgatgtgtgtgaagtgcggacaatggatttttaattattcgcaatttatcggattaaaactttttttgttttattcaaattatgacataaatttatttcttcagctttatttaaaagaatttatttttggtattttggtctagcaacaccctagagaagagggtactggttgattccaactttattcatagagcaatgaacttaacaaattttttaaatccaaagattttagcaaatttcgtaaaatttgaatcacaacggttttggttaggcgttagtgccttttgggcatatcaaaaatacttttggtatttctagcgatctatcgccaacgatctggcaacaccgtctgccattaacacaaaaatcgcggcgtctctccaatgggattttgaaataaaaacaagttaacagcacggcgcgatgaacgcaaacaaacgcagaagttcggtgggttcttcgaaaattaattgattgagaagcgctcatggtagacctactcttcttgcagctgcgtaaggtgccgaccaaggaagatgaggcgaccacaacaacgtccgcgatcaaacaacaaatcaagcgacgcatcagtttcagtggcaagaagtccgtgaggtacgtacagtagatatatgcgatgtacaacgctcacccgccctccacatagggaattcgtaaacaccaaggagaccaacaactgggacgactcgtacgaggtgtcggaacaccatgctgaggacagctcgggatcgaagtgctgcagcacaggatcagcatcagtagcgagggtttccgaacatgccgacaaggagaacattcccctgcccagccactgcgagcgggaacatgtcgatctgtccgtgaatctgcaggccagcgtggatttcaccctgctgccctgcgaaatgatggacaaatcgaggaagacatcctca

SEQ ID NO: 40691 - DNA, 1001 bp, DROSOPHILA
aaaaaaacaactgtaattaggagccataattaattcatttcgaatcgcacacgcttttcagtttatctagccgaaagtacagaatgttggcctccgcctggcgcagcgtggccacctccgtggagacccagttgacggccacctacttccgagtgcaaaaactacgaaaagtcggcttcagaggcatgcacagcacattggaggacgtgcagctggagggcatggagatcaagatcctgccggccctgcaggataactatatgtatctgattgtagacacgaagacgcgcgaggcggccgtggtggatcccgtggagccggagctggtcattaagacggtgcaggagcagcagctgaccctcagcaaggtgctgaccacgcaccatcactgggaccacgccggtggcaatgaaaagctgctcaagctgtgggagaaggagctggacgtgtatggcggcgatgaccgcatcggggcattgaacaaaaaggttcagcaggacgacaccttcaccattggtggtctgcatgtcaagtgcttgtccacgccgtgccacactaccggccacatctgctaccacatcaccgcgcagcagggcagcggcgagggagccgtcttcaccggcgacaccctcttccagggcggatgcggccgcttcttcgagggcactcccgaggaaatgtacgaggcgctgtgcacaaagctctccgccttgccggacgccacaaaggtgttctgtggccacgagtacacgctgcagaacatgagcttcgcccgtcacgtcgagcccgacaacgaggtcatccagcagaggatcgagtgggccaagcaccggcgcgcctcccaggatcccactgtgccctccaccattggcgaggagaagtcctggaacccctttatgcgcgttcacgaagccaccgtgcagaagcacgctggcggagccaccgatcccgtcgtcaccatgggcaagctgcgcaaggaaaaggacaccttcaaagcctga

SEQ ID NO: 40692 - protein, 305 aa, DROSOPHILA
MLASAWRSVATSVETQLTATYFRVQKLRKVGFRGMHSTLEDVQLEGMEIKILPALQDNYMYLIVDTKTREAAVVDPVEPELVIKTVQEQQLTLSKVLTTHHHWDHAGGNEKLLKLWEKELDVYGGDDRIGALNKKVQQDDTFTIGGLHVKCLSTPCHTTGHICYHITAQQGSGEGAVFTGDTLFQGGCGRFFEGTPEEMYEALCTKLSALPDATKVFCGHEYTLQNMSFARHVEPDNEVIQQRIEWAKHRRASQDPTVPSTIGEEKSWNPFMRVHEATVQKHAGGATDPVVTMGKLRKEKDTFKA

SEQ ID NO: 40693 - DNA, 6779 bp, DROSOPHILA; identical to SEQ ID NO: 40681

SEQ ID NO: 40694 - DNA, 1166 bp, DROSOPHILA
ttcgtttcggtcggtacgcggttcagcgtttttgttcaacggattagcgcaagttaagcacgatggcggcccagacgatactgtttgatttcacgctggacaaggacaagacggcggatgaggaggcgcgcctccaggtggccaaaatcctgcgtaacgagctggagcagctgttcccccagctggagctggcctactcgatggagtcgccggaaaacggctactttgcggtgctgcacgagaacaaggacacggtgattacctgccgcatcttccagcacggcctgctgacgctcaacgtggagtacttcctgcccgatggcaaggagccgagcatatccttcgacaccatgcgcaccatggaactgattttgcggcagaaatttgattccgatcggtccaagtacttgccgccgattaaacgcggcggatatatcgacatatatatgactagctcagatgagcgcatcatcgagtacgacatcgacaaggtggtcttcgaggcgcgctcgcccttccagaagattcaaatcatgcactccaagaccctgggcaacatgctgctcctcgacgagctgcagaacattgctgaatccgatttgatttacacggagaccctgatgtgtcgcggcgtggagaactacgagggcaaggagatctgcatcctgggcggcggtgatggcgccttgttgtacgagctactcaaggagaatccgaagcatgtggtgatgctggagatcgatgagcttgtgatgcaaacctgcaacaaatacctcaacgtgatctgcggcgatgtgctggagaaacgcaagggcgatcagtacgagatcattgtgggcgactgtgtggagtacttgaagaagttcatcgccgagggccgcaagttcgactacgtttttggggatcttacggacatacccataaccgatgccccggagggcgagacctgggatttcattcgtaccatcttcgagcactccttcaaggtgctgaaacccgacggaaagtatttgactcatggcaatgggtccacctgcaaggtgcagctgcgtctattcgaggagcagttgaatttgctgcgtcccaaggtgaagttcaccaccaccaaggcgtttgtgccgtcgttcatggaagagtggctcttctaccaagtgactttcgcctga

SEQ ID NO: 40695 - protein, 367 aa, DROSOPHILA
MAAQTILFDFTLDKDKTADEEARLQVAKILRNELEQLFPQLELAYSMESPENGYFAVLHENKDTVITCRIFQHGLLTLNVEYFLPDGKEPSISFDTMRTMELILRQKFDSDRSKYLPPIKRGGYIDIYMTSSDERIIEYDIDKVVFEARSPFQKIQIMHSKTLGNMLLLDELQNIAESDLIYTETLMCRGVENYEGKEICILGGGDGALLYELLKENPKHVVMLEIDELVMQTCNKYLNVICGDVLEKRKGDQYEIIVGDCVEYLKKFIAEGRKFDYVFGDLTDIPITDAPEGETWDFIRTIFEHSFKVLKPDGKYLTHGNGSTCKVQLRLFEEQLNLLRPKVKFTTTKAFVPSFMEEWLFYQVTFA

SEQ ID NO: 40696 - DNA, 18514 bp, DROSOPHILA
cgaggaggtgcagtctggatataaggcagtggccgatcaagccggcattgtcggccattacgtggaaaccgctaaggcacacacccagtccaccatcgacatgctgaacgagccccagaactccctgcaccgcagcggagccattgtggtgggcggtctggctggtttcatcttcgccgcccgtggaggcttcataaagaaggtgttgtattcgggcatcggagcaggtgcagtcgcctccatgtgctacccccgccaggcggaagaaaactgccgcgtggtactctacgagggccgtaagatcttcgccgtggcctacaacttcatcaagggcgtaaagccaggagaggatgttcccgtagtgcccttccctacctcgctggaggaccttaagtacatggccagtgacctgtacgatgaggcaaaggatctaatcttccccaaaaagaagtaggaagtgccctcccgctaaaggaaactcctagtccacctccatccgggcgaaaagtgtgcatcgatttaagttgtatgaagcttgaattctatccgaaagtagttatctcttttcttgttgccagaaataaattggcctcgcgtcccaaaagtgaaacggcggtttaacttggcaaatgtgtgtgggccgtggccagaacccgctctcacatgaatcttcgagtgattaattgaggtgttggtgtcaagtcaaatgtcacgccagtgagctgttgaaaagtgaaatccggaggaaagtgtcggctgcggatgtctcccatcctccatctccccacgtgcaaaaccgattgtgccaatcatcatcgtcaatgaccatggcccgcagccgaacatggcgatgactacaaattgtgtgaatggtcttggccatccatttgcggtgccctcgggggctgctattgctgaggaggaaatcggctcttatagcgatgggtatctcgagcggaccaattctccgattgcggcattatttattagacaatattttcattaatcttttattgctctcgagctttcgcatcgctatagatagacttgttctttgggcaagatacaaacaacgttcggatgtctgcatgcatttgtttacaataaatatagatttagttaattgttaaatattactacactaaaataccaacaacttgtggacatgcaaatgactcccaatcccccctacccctcccaagccccctatcccttcggctatgtacaaatagataatcccattcgaaatccgaccgatttccttgttagacaacttacggtgctaacatttcgctagactaaattagtgggcgttgactgtgtgtgtgtgtgtgtaggtgaatgggtgagtgcggataggggcgtggcagtggcccacaaggccatgatgttaaaattgttaaattgaagctaactacgcttaacattcctttaagataaatcacacaaaacttatagatacaactgataaattaaaacaaataacaaaagtagatctgccgtcgtcagtatcttctgatcatcatctgacatgctccagtatccacggcgtaaacttggagattctcgtacagactccgggcaaattggcctcggcacagccaatgccccaggagatgatcccggccagaaagaagcgcccatcctgcgacttggcctgcaaaatgtttattagcatatatctcgtaggtttgctttatccggcatctcacctgcagtggacctcctgaatcgccctgacaggagtcctgccctcccgtttcatagcccgcgcacaggaatatatccggaatgaactcctggcgaccagctcgcatgaacatcgatttgcaattatcgttacttacaatcggcacggagacctattaaaatgtattagattacatttgtgtcttgcatttaactttatttttagatttatgatatatatcttttgattcacgttggaaatcccttttatgatctctctgacttttcctaattgcaatcgccccatttagaaccacaccgacaattttttgcgttcgattcgcagcggttatcattgtcgctgaattctaaaaatgaagcttaaagtcgtgttaacactcacctcttggaggacggagggcagggtgccgccctcgctgagacgaccccagccggtgaccgtggcgttcatgccaattaggaggctgtccgtctcgggcaggcaaatgggactgacatgcggcgcgaattcgagcggctgctccagcttgaccagcgccaggtcgtattcgtacgtgaggaagctatacttgggatgcaccaccttcttggccaccccgcgctctatgtagggcagctgttcctgcacatgcgagaagtcgtactcgcccacgcggatgcgtatctgcgagatgagcaggctgcaaatggaagaggggcagggattagctcgatctggatctggatctagtccggttttgggctgatccactcactcgtccacgcaatgtccggcggtggctatccagttctcgttgatcaaagcgccaccgcaacggtgggtgctcgagaatccaaagaaggaggtgcgccgcaccgacacctgccagggccaacgaccgaaggccgcgctcttaccgcccacgattcgcgtctcgggccgcgccaaagtcggtactccgcactctgcaattgcagcaataacaaattgcattgtcaggatgggtgcttgcaaagtcagttgtacatatcaatgtatcttatttggggaactgtatctcgaattccctcacaaattgattctttgacggtctacagagttattttataaagaaaataactcttatttgaaattgacttttctcctatcaacttactaacggaaaacattaatcgaaacttgagttaaatattgaaatatctctttaaaaaatgttaagaacaacaattaattggcgtcaaaaattcggattaaaaaaattacgtcgcatgtaaccagaatttgtggacaaaagaatagaatattgctatataacaaaattggagtcgtgatttcgtatgtcttcaaaatattcccaattatttcggattttttaaaacacattaattatgtctaataagctatcatcttcaatgagcaagcatataatgaagggggtcattcaaatggcttccccaagtgcaagggcttgtcactcaccgctgcgagccgccgaaatggtcttcacatggcccagagctccggcgtcggggatggaggagtctgatatctcgttggtctcgatgccggaggtggccagaaccggtgtacggtgcgtaggctgcgttggccgttgggagctggtgacgattccgctgctgctggaactgctggagctaatcggcctggtcgtggtgggagtcttgctcgatgtggtggaggtgctcgagctggaggtcgccgtggtgggccgctggtagggcctggtgggcttgtttgtcgtggtcctccttgttgttgtcgtcggtgtggttgtccgacgtgtggttgttgttgttgtggttgtggatgtggtggatgaggtggttgaggtggttgacgatggccaatgcgaggacgaggatgcggctaatgatgtgcccggcgacagctgcaagaaaggccaaagtggtaaacattatgctaaaatactcgaccagggtcgttcggcggcaaatcattccccattgccggttcccattccatttccattcccattccacgcaaagaatcaatttttcatttcgccgctaaatctgcattaactaagaaaccttctagaggttttaaatgaaagtttagatgctctaacaaagtaatgtttgataagacttttaaaaagggattcaattcagtttgtacactattaagtactagccattaactttaaaattaactgtgctgcataaacatttacccagctcatttcagttttcttcgaatccccatatacatatgttaatcttattcctgaacttcaagttagcaagtggcatgctctgcttaaggtacccattcctggaagagtcctaaattccacacacacccctgagagcggcaggcgaatcttacatcaacttttggctccggctccgcattgtgcaaacaataaaatgtcccccaaggctgtggcctgccattatggagctgaggttggaggcccagtcccagtcgcagtcgaggagtaaatgacctcgtggctcgtttgtttcgctttcgacatcaatgcatcacccagaaccaagcacccaggacccagaacatgaacctggacccaaaagtcgaaccagactcgtatttacatacctgcggcctggtggggcgatgcggctgcgggggatgcgtctgggccggccaaatcagcgacgttgatgtcgtcgaggtggatgtggacggtgggacggacggcggcggtggcggtgtccggtcgtagacaatcggtttctttgtgggcttcgacggcttggagggtcgcgcgggcattggcaaattgacgatgccgggcttggtccagccggtgggtcgcggcttggtaataaagctcggctcggtggtcatctgccagtggttctgctgattctgctgatgctgctgctgctgctgctgctgggtcgatgtatgccaaatgctatctgcggatagtatttgtttgttacaattcatgctaacaatgcatcaccgctgggcgggggcgccaagcccagcctcattgcgctccacttactgggattcgaactagagctggagctggaactggagctgggatgcgaggctgagccatgcagatccgaggcagtggtgggcttgctctggtagggcggcggatgcgggcgggccagagtgccctggtggtgcggacccgaaggacgaatcacaagggtgccagcgccatgaggcctctcgatggtggtcatgccgctgcggacggtaattcatcgggaaataagtaagacgtatacttaaaaaattataataatttagatatattatgctatctttcaagccgcttttatatgcactatttgttaatctgatgaagtgatactgatatagtgatcttaaatctttattgacgttcgaaacagaacaattccatcaattgctaatctcttacctgatcatcggcttgtagggcgctgccggcggtcgcgggcggagcgtgagcggcttggtgggcctcgtgtaggagaaggccgtctggggcaggacaatgttgtcggtgtagttgtgcgtgcagcaggagccgaacatgaaggagtcgacgcacatgcccacgtgcttgccctcggacttgatgcactcccacacgaacatgcaggtgccctcgacgcggccaaaggagcatggcttggggctgatcttgaagttctggccgcgctgcagttgctgcaactgcggatagccctccaggcggtgcgggatgcggtagaagccgctactcatgtcatcgtcgtcctcggaggaggaggcggaagatgacgggattcccagggagcccagtgactcgaggctgtcgggcggtgtgatcagcgccgctgctgctgtggccaggcaattgactacgattaaggctactaatacttctactatttggtctagactgcgcctgctccgcgccgcagctcctcctgatcctcgcgatcccgctgctctgttgttgactagccaatgccttttgggacacatcttggtggctgccgctggtgtgcttcttctgcaaggaacgggcatgacagttttcggacattagtcttgtttcgcctgccggaacccatccaccagaaccctgtttgggtttgggaccaccccccgccgctgagtccaccactaattaagcgcacttgtcgccacaaaaagtggcagcacaaaaaaaaaaaccaaagtcaggcaacgatttctactctttatgattgttgctgctgctgctgcagttgctgctgctactgctgcatatgttgctgcagtttgtttttgtgctgctcgccgtgcagtcagtgactggtttaattacaacttttcacttttgcttcataatcagcttttttcgtggctcttgtcttgttttattgttgaacaagactggaaaaaatttattgcgatcgcacgacggcgacgtcaaacgacacatgctacaattaataatttcttgtcccaaaaccaagtgcaccccagtgctgccccacccctttcgtactcctcttcgctgcagctcatcaaagcggaatagctcttttttcttttcaacaaatttaattaaagtttagccaatccattgctggccaaattagatgtttgcctttatggtttgtaacctaaactggtagcacacatcgctgcctccccagttgcacgtgcccccttatataccccatccaaccatccccaccacccctcgagttgtcaactcacctgtgtctgagtctgggtctgattaaagttggctgcttcatcggtaacgtgccgggcgcatgtctgcaatggattgcacggagaatggtaataatcagtatggttagccaaagtttgttgttagaaaaccgtatgctctttttttattgcgccaagctatggtttatgtttgtaatggcatcgagaatgccgggcgcaaagagctccggctgtaattagtaggctaactgcgggatgtctaactttagtttggcatgcatgtggtggtgccggtcgatctggtggtgcttcaaacggcccacccaccagacaacccacacacacgagattgcggcattagccggccacagatcgtaatcacaagatcgccatcatcatgatgatggtcatatgcaacgatgataactggaggagtgcggaaaggagccatgtgaatggatgtgctgacaacactttgggggcgggattgtggcaattatgtgacacttgggaatattatgcaactcatggatggctgaggtgaaggaacttgcgaatgaatgttggagtgagtaattagtcagtaattgctagaactttatttaaatgggctaaataaattaatcaattatgattaaaatgttccgatgacaaaggtaagtaaatacaggttaagaaaaactattaaaaaccaaataatacatatgtaaatgaatttatatttatacgaatttgtacggagcaaacctctctcatggattaattcatatttatcgaacactcattggaaaacgtagatatccaaacatcattcattcgacacactcatacaagagatactcaaagctcggctccagccaaatcccgtttatcgcctaatcatcttaatgttgattataattacaaatcgtttgaatgcaatttgataccaaatactttgtgcacatcattggcttggaaaacgcttcatgtccatgttgattgaaaccgaaattgatattgatgttggagttcgagcttgagttagtgctgatgtggatgtggaagcggcggatgaacatgtgcctcgagattaatttcagctttggccccgatcatttttccccacatcgtgtgtccgacttcgagccgagttcttcatgggtcgctcgaatcgattcatcaattggccgggtctgcagactcctttgagccagaaacgcaaacgaaacgttagcgctgctcacttctaataactctattttcaattgggcgcggggggtaaagatgtgcttgcccctgccacacgccggctgtagacctatgaagctatgtttgtgtccatatagcgcatgaaccgttggaaatcgatttcgttacgttttcatttcctcaacgaaagtagcagcagcagccgatggttttttacttcacttcaatttctttgccttctttagttttgggcttatttttcgcagagaactggtcgaaaaatacccgaaacgtaattaccccgtttaaacgccccaaaacagaagcggggaaaaaatagtagcagtagtagcagcagtaacagcaatctctcgtgctaatgactatctttaggagcccaaaacgagccaaagacgggtagcaccagtggtcttctgacaaacagtcaaatggccagacatcgactcaagcccagacagacaaagactcaaatccagcccaggggccaaatgattttccagcaaaatgctagagctattagaaaaatgttagcccaactcggctgagttttaacatgacctgccagagttagtcggcgctttgggaagtcggagcactgccaaaaataatctaaacatacttaaattaattaacagtatttagttggaataatatatctatgctcacaacggattctctagacttctttggttcaaatcggcattgaagcgcagacagtttaagttggtttaaactgttttatcgaaagagaatttataattgttctgctctggtttttactttcattaaaaccgtttgaatgatattttggctttttccaagaattttcatttgtgaaatattgtagtttaagttgtagtttttgttttttgtccctacttcaacactgtcttcaaagagtctccaatctttttcgctaagtgcaagtacgtgctgagtagctgacttgaactcaaagctgggcttgcagcagccgacttagtagaaaagagtaattgtaataacaattgcgcaatttgcgtcagtcacttaagttccgccgccccctgcccttttccacttctattggcgtgtggtaaagtgaggaaagtctcagttcgtttagttaagagcactcccgtccgggggcatcggcatctggacagcccctagctaccagcttccagctcccagcttcttctccagctccagcaagtggtatctgctatcagctctggaggatgaggaagacgcttacccggtaggcgttttgtcaatcgacaggcgacggcacagatgacaggccgcccagcttaatgaaaaagataaacaactggattgcactagccacaagcgacttaagcagccagatgcgcaggtaaatggtacactggaaaatagttactttgcatatagatttgttttctgatcaaaaggcttacgagaaactaacaaacattctttaacactaattttttgtgtgtatgtagaagggtttcttttgcagggggcaagagacaatacagcccagatgaagctgggctggcggcatcttttgagatagtgaaagaggcctggtgagcgagaaaaagtgaagagggggctcgaagcttgttataatcactgcgcgtaacgcaaacacaatttttgagtggccggccatgtgaaatccatgccatccatacctggaggcggtcgctcgatgctacgacgactgccttaccacttacgatggggaatctgagttgggaacgatatgagtacttagaacagtgagggggaaaagtcgttgcacctgagtcgaccgcttatcaatgtgaaaatcaaaaaagctaagcgaaacgagtcttgaacagcggaagcactgcagtaaattgaaagaagtgtttaaaatctcgttataactgagaatagctgtaggaaatatggagctctataatcgggcatgataaaatgacagccatttgatatagggattaatggccagaaaccgttttacgagccaaggcaaagttcttgatgaataatgtatgactcaaaaatgcagttataatttaacagggattccgtgatgcatgacatcacttttatcccaaataaaatcaattattcacctaggtcattaagttgagagagtaatgttgttaaattttacgagtcttttacacatttgacacaaggcacatcacagagcctaatggcttcattgatgaaattgtgatttaatttgaaacgtataatgcatagatccagtacctggcattttcttattgagttgttaaatcttttcacattttctctttatttcttcccatttagctttaagttatttcgtttgcaagtaataaatacctcagctcaggatgctgtttattccccaactttcctttttcgagctcgtcagtaaactttatggagcgactgttacagcctggcgcccgttcgctgattgaaatcaaatgcgagcgctaattaattgcgtttgcagcctgttggcgcattacgcatacgcaatgtgtaacgcatcctccggcgtgtcattggcctggggcatcagtttcggcttttgccggtctgaatgccgatctgtatgtcggtccgaaattaaagcaacacgtttccaacctgttaagtttccgagactgggccacaaacataaatcacctcgagagtgggcttggttggattcccctggtttattaacctcacgcggctaatggccaatggtcagccagtcgggcagcggttggtggccaccaatggccagtgggcatggtcaagtgctatgcaactccactcgctgctgcacttgcacctctgactgaccgcagagtttagttgccccgagggcccccagctgttattgttgtcggtttgttgtttgtttgtttgttttccctccttttcttcgctttgtgggcatgggcatcatgggcatgggctttcccgctgccaaagaaacacataaaaggggtgagctggctgggtattgtccaaacatttactttgtcttggccaggctatagccgcatgacggggcagcttttaaggtcgggttctaaagtgacttctcgtaatttattttccattctgcggcataattaattcggttttcatttccagttggcttttctcccagcacctattctaaatggcttcattttcgatttcataacggtcgctcagggtccgccagttgaatggattggtaaattgaaagacctcatttcgttcacgatcatgatcgggcccagttccagtcgcagtcccttgaggaagttacggcaacacgtgcgtaaccgtaacgctccgaattgaccataaatgagggcctcaatcgcggcaaaaaaatcagagtttcgaaaagtaacagtctctgcatcgcaagcgtaacactttcggcccgaaaaaatgccaggcaaaaatgtttgagccaaagtcgtgcaggggcaatcactttttgccacttttagtttggtgtgtgacaatttgacagattgaaagtgaaaagagctcgaagtaaatgtccctaagtgctgttactgcaagggatagacaccgcctgtcttatcgttaatttgcatgaagtgcacgttgccatcacttttgagcatgcccgcagcggatagtagagatcccatggccatgggatcgtacccatccagtgggtcaatcagcattcacttgtcccattcgcggacaactcgagtggctgccaagagggcctccgggcagatgagctgcagaaagttagaaaagaaaagtggcgaaaatagaatggtcggtggccgagaaggagtgccacattgccccatcaattgaaccgatggattcatgcccattcacacctccagaaactcattttaacagggtcttcggctcggcaaaatgagtgtcaagagtgttaattgctgtgttcgcaattaatgcagaaataattatacatctgtgttggccattcataatcacaggccgttcgttcattcattcattcattcacttgccactttggccactcattcggaggctctctgttggccaatgattaattcagcgattgcattcgtcgtctagactttgattgcggcttatagctgtaaattgtatcttgtatctgtgttgatgtcataaaatcaccttaatggataataactgactgatgtgtgtttttatgtgacccaaacctggtcaagattctattgttctcatttattgattgactgcaaacgacttttatggagtaacaatgaagctacttagataattcctttaaagcaagcccccctcatgaccctgattacactcaaagtcattctttgcagtctttgttttttagtgggaatttcttggcttacataatacatttctttctatgctgtaacttgtagcgttacaattgctttatgttacatttaagtactacttaaacatgacatttaaaagtggttagaatgtgaacgacaaggacgacattttcatttaatttaatgaaatataaaatttaacaaatgaattctacttcttatgatagagtatgacttagggacctgtaatagcttaatattcaaataaccaaaaatagtaaatgtgaaaagcaaacaatcaatttaactgagtgatgcccaagggcactgcacttttgttgtataacttcccccctagagaccaaggtctttcccaatcacagtaatagtcagaaattatactatcgcactgatattatttcaccatttcccaaagcgacagaaatttttgacgcatttaaataatttttcgcctcaagttgtacaaatggaataatgggttcggaaaattatataaccgccgtaggcatccgaaagacggtcacagtttgctgactgccgcttgccaacactgcaattggtgggccaaaaggcccagagacaccgaaattggttaagagcaggaggacaaatttggttttacgcgcaagtgaattgcgctttatgagcgctcgctttgattgccgcatgatggtgatgggattgtaaggtatggtatcttataggatggaagtcgtattggtatatggcatatggcacaaggcacatggcacatggcacatggatggaaccggagggaagacgtccacattgcaacaattattctgctcgatgactttcgctaataaaacgacacacgctgtggcaaaagacagccccgaggttgacacaatccagtcgggctggaagacgacatcgactggggattgactgctgattttataacactccactccgtcggataaccgcatgcaatccggcagacgctgatttacagacaagtctctcgatggggtaaccgagtgttgcgaaattagaatggctgggcgaattgagcggggccaacagcacacttaaattagtggggaaaattgcacctgccgaaggtgcaaactaatttggggaattattaagcaaatgctgatgttcatttcgtggtaaatacataatatttaggaagttctcaagcgacaagaatattttgtaaattaggcatctgacctaacgggcgatttactaattaagagacttgctaaaatgtatgggatcattaaaaatattagtctgggatgagaaccgtgaaaagagatttttttggaggggctttgatttttttctttttttaatttcggtgttatatgcgatgttttcgggctaaactcaagttatctgcgaaaagcatcgtgaaatttgttggtgctacataggtgaaagcttggacaataaagataataaatacttaaacttactagtctttcagttcagtttcggctatttgctatttggctgcgattgtaaagtttacgccttgctttaagagtcggttaaatgtttaattatctttgtagaacggcaaactttttgatggatttttaaatttgattttcactccttgccatttttttcacttggcagtttttccatttacgattgaactcttcttgctttcattcgaaataattgcacgcacaagttggggaattctcgttaattatttttaaatatgtattttttagagtcgcggactttccatcgttttcatggtcaataaaacacatcaaatcctcgggtaatggcaaatcaaattgtaacgaaaatttcttttcgtttttaacttgttgttccttttttctttttgttttaacaataaatatgatgtttaattgatttgcatttcactgcgaagtcgtaaaactcttttgtaaatacatgtgagctagttttttgttattgttatagctgcaccacactcttaattaattgttactgaggcctttattttttttcgagctttatttgttttctttatagcgacgtctcgaattgaaaatattttttctcttggtattgagttaagcttttattgcaccgtgattttccgtggcctttattgtttttcacttttgtttcggttgatttctttttatttcactgcctttcttcagtcgtgggcgtatgtattgtgggctgcaaaacaaaacagaagtggagctgttaatgaaaatgggccaacgatcatcgaattagaaatcacccagcccagcctagcatcgtttttcggcttcactcttggccagccgaaatttatgcaaaaaagccctcgacagccatgtgattaggccaaaaacgcttcgatccgctcggcggaccctatttgcattcgattcgctggtagccgatcggaattgccaaaaattgatgcatatcagctggccgatcggatcgtggggagtccgctccgtggatcaggttggagctgctcaggctgccactcggccagttagccaagcggccaagcagccaagtagccaagttagccaaagacccaaaattgatggctatcttgagttatgaggcgttatggaaatggaaattgcattttacattcgcggaccactcaaaagtgacagttgaaagcgtcgacgacgatttaacgaattaatgtttcgtgtttataattttggatctctgattcgaaagctccaaccaaaggggctaccctcccaattgacggtctttaaatgcaaagatgcttaactgggtgagaggaacattatcacacttgtaattgggctaacgaattgtgttttctctgagaaaattagtcgatataaaagccccataaaaagcaaactcgattcatttgggtaaaatgttggaaatatacaaagagcaataaaagacgcatctaaaccgaatggtgcattatgcttaagtatgtttttgtagtaagctagaatttatagttaaataaatcattgtgtagtttaaaattccgaataaaggtaatcccaaaatataatagtcccagaatctaacctctaaaggactagttaaaaataattctctaatcatttattctacacccttccattttatttaaattattgatatttctttttaaaaaggtgcatcatgtatgttgattttatctttataatttgcaagtgaatggagccttagaaaaaattaaactgtaaaaaaggttatggccaagatgctgaatagtttttatggtattaaatttctttaaagtaataatttgctgtttaccacttatttcccttgtttatcttttctctgtggcaatcgcacttgcagccgaccacaggaatcactttcagctgactgaagccgcagcttcctgcccccttaccccttcttctcgccccccgtcccctgcccgggtgctcattaaatgtgaatttgcacttctttgccgcttaatggtatgcttccttgtggcacgaagacgacgacgagtggaagttgtcaacggccaacaattaactggtgcagtgccttagcaacgctgctggctagttagctcttggccacccgatcttttgttgccccatccccttgccttaattgtgccaaagtggtgccaatttttattgccgacttatcgcttgagatttccctccgatccccactctattttccacatttgcagcggctgctgtgttgtacttcacttaatgaatcccgttaggcagttgcagccacaagttgatttttcgcaacgcatttgcagaacaaacatcaaactgctgctgcttctggtactggcgactccgtggaacgctatcaaaactaatttatatgcaaatgcagttcaagtagctgcaacaaaagacaaagtcaaagactttggtgtggagtccctggtggaaaatccacggcaccagctttggcggtgtagaagtcttcaataaacagtgggaagtaagcagtgctctgatcggagttcttctgccttcgctacacaacgagaaatgggatcgaattggtgtttttaaggttcatatcttatattatatataatacaatataactgagatatatggaacatcatatactgatcatatattgatttgactgcagagcttttagttaatcactatgacgtgaatgaatatttcagcagtaaaacaattttttttttgtagataaagttctgtcaggaacttttaaaaggagtaaaaggagttttagatcgaaattaattaaattaattactacagaattcaatgaaacgtattctgttatatgaactttctttttagataatgggaatatctgaaagcccttcatacatgttttttccgtatggcacatacttgtactctctgtgcgaaaattctcccgaggaagcaaagagccagcacacacggcatgatttaccgtagagaacaacaaagaaattaattaactgcacttgtattagatccctgaccggctggcagcgcgtgtgcctgtgttggtgactatctgtgagtgagtgcattagcttggcagttaaatgcctcacgagcaagtcgcccagcccgcgagttggcatttgacagtgtcgggagcaggaaaaactggctgccgcggcattaactcactttgcatttgcagctgaagctgaagttgcagcaatagctatagctgaaaagcgaagcgtttttcgttgttctcagttcgtgatttttgtctcagttgttttcttttttttatttttttttttgtttttgttttggccaacaagtgccaagttgagcggcaattgcagtttgcatttagcaggggcctgcgactaattagtgctcatgtcgcctgccaaaagttatcgactggcagctccggagttcattatcctgtctagctctgttatcctgctgtcagcatttgctgcgcccgataaggctttatttcttaattagcagcccgagtgctccagtttgtgcgcccctcagggtgttaatttcaaaatctcaacgcgtgccgcaagcagaaaatgctgctgccacagctgcaatgcgttgacagcgaatgcaatttgaacttgatggccggcaacgtgacacgcatattaagcagattgtggagctccggttttgtaatatacgaggagtatgcatatgtgaggcataagttgtcgaggcggcgctttaaatacgcacaaagcggcctcgcatgcgcaattagtcgtgattgagtcgcaagtttgtttaagcatcgagaagagggagcccaagatgaagaaactacggcaaaattacctcgaacatgggcacgaacgaggaaaactctcacttttcggcggctcggtcttgtggctttatttcttaacagtttcttccattttgtgtaattttcgattaacaatttcgattaggttttgcgtctttttgattgattgaaatgtcttgtcggtttcggttacttcttattattttatttctatttttttcgccttgatctttttttttgtgggtttctagccgctgggctgaatgttaaagtgtgtaacaaaattaggcaccttttcgtgaatttcttcttgtgttttttttcccatatagaatggagctgcaagtgtgcgaaccgaaaagcgaacagcaaacagcgaaatcgaaaccgaatccgaatcggaaaccgatctgaaccgcactcgagcgctgtgaaaaccaaactgcggccggcaaagcatcagccagcgcataaaactgcgccaggtgcccagagaaaagcacgctcgaagagtgatggaaagaagagagccgaagacagagaaccgcagacttcagcgccgaagagagatttatgacgggcaagtttgtgccttaagtctttcgtttgaacagctgattgcgagctctttgcctggcaaattgataagtgcacaaatgtttaccgctgcggcgacctcgaccccccaggcttgctggtaaacaaacagccgtgcgcacatacacatttggccataaatttggcacgaatgcttttggccactttcccgcccattcccagactttgtcactggactggcaccccccaccctgaaaagcacaccctcaccttctggggtgattcatggatcggcgattatttaatctgcgtattagcgcaagctcttttattttcgacccgtgtgcggtttctttattgactcaccgacttttgaaagtgggtcagtgttaaagatttttcgcctctcatttgttgggattttttatgagttatcagtataactgttacataacactgagtgcagcctattgttgacgtttttatgggggatgccaagagcggtcgaaccgatgattcagttcaattcacgccgggatgctgaaatactggtagcacagggggaattattatagccagtcgtgggtcagctgtcatttcacatttaaatgagtgttcaaaggagcacatatgtaaatacagtcagcatttaaaacggattttaaatgggagaaatcgcccatgtacatatatactattattactgttaggccgatggctatcttgcgaaatcttagagaagagtttgagcttactttcttgaaataaaagtcaaacataaattattcgcaaccttttacaaaatggggtaactagtaatcacatatctaaaaagcctacgttt

SEQ ID NO: 40697 - DNA, 3736 bp, DROSOPHILA
ccgattcggattcggtttcgatttcgctgtttgctgttcgcttttcggttcgcacacttgcagctccattctatatgggaaaaaaaacacaagaagaaattcacgaaaagcccacaatacatacgcccacgactgaagaaaggcagtgaaataaaaagaaatcaaccgaaacaaaagtgaaaaacaataaaggccacggaaaatcacggtgcaataaaagcttaactcaataccaagagaaaaaatattttcaattcgagacgtcgctataaagaaaacaaataaagctcgaaaaaaaataaaggcctcagtaacaattaattaagagtgtggtgcagctataacaataacaaaaaactagctcacatgtatttacaaaagagttttacgacttcgcagtgaaatgcaaatcaattaaacatcatatttattgttaaaacaaaaagaaaaaaggaacaacaagttaaaaacgaaaagaaattttcgttacaatttgatttgccattacccgaggatttgatgtgttttattgaccatgaaaacgatggaaagtccgcgactctaaaaaatacatatttaaaaataattaacgagaattccccaacttgtgcgtgcaattatttcgaatgaaagcaagaagagttcaatcgtaaatggaaaaactgccaagtgaaaaaaatggcaaggagtgaaaatcaaatttaaaaatccatcaaaaagtttgccgttctacaaagataattaaacatttaaccgactcttaaagcaaggcgtaaactttacaatcgcagccaaatagcaaatagccgaaactgaactgaaagactaacatgcgcccggcacgttaccgatgaagcagccaactttaatcagacccagactcagacacagaagaagcacaccagcggcagccaccaagatgtgtcccaaaaggcattggctagtcaacaacagagcagcgggatcgcgaggatcaggaggagctgcggcgcggagcaggcgcagtctagaccaaatagtagaagtattagtagccttaatcgtagtcaattgcctggccacagcagcagcggcgctgatcacaccgcccgacagcctcgagtcactgggctccctgggaatcccgtcatcttccgcctcctcctccgaggacgacgatgacatgagtagcggcttctaccgcatcccgcaccgcctggagggctatccgcagttgcagcaactgcagcgcggccagaacttcaagatcagccccaagccatgctcctttggccgcgtcgagggcacctgcatgttcgtgtgggagtgcatcaagtccgagggcaagcacgtgggcatgtgcgtcgactccttcatgttcggctcctgctgcacgcacaactacaccgacaacattgtcctgccccagacggccttctcctacacgaggcccaccaagccgctcacgctccgcccgcgaccgccggcagcgccctacaagccgatgatcagcggcatgaccaccatcgagaggcctcatggcgctggcacccttgtgattcgtccttcgggtccgcaccaccagggcactctggcccgcccgcatccgccgccctaccagagcaagcccaccactgcctcggatctgcatggctcagcctcgcatcccagctccagttccagctccagctctagttcgaatcccaatagcatttggcatacatcgacccagcagcagcagcagcagcagcatcagcagaatcagcagaaccactggcagatgaccaccgagccgagctttattaccaagccgcgacccaccggctggaccaagcccggcatcgtcaatttgccaatgcccgcgcgaccctccaagccgtcgaagcccacaaagaaaccgattgtctacgaccggacaccgccaccgccgccgtccgtcccaccgtccacatccacctcgacgacatcaacgtcgctgatttggccggcccagacgcatcccccgcagccgcatcgccccaccaggccgcagctgtcgccgggcacatcattagccgcatcctcgtcctcgcattggccatcgtcaaccacctcaaccacctcatccaccacatccacaaccacaacaacaacaaccacacgtcggacaaccacaccgacgacaacaacaaggaggaccacgacaaacaagcccaccaggccctaccagcggcccaccacggcgacctccagctcgagcacctccaccacatcgagcaagactcccaccacgaccaggccgattagctccagcagttccagcagcagcggaatcgtcaccagctcccaacggccaacgcagcctacgcaccgtacaccggttctggccacctccggcatcgagaccaacgagatatcagactcctccatccccgacgccggagctctgggccatgtgaagaccatttcggcggctcgcagcgagtgcggagtaccgactttggcgcggcccgagacgcgaatcgtgggcggtaagagcgcggccttcggtcgttggccctggcaggtgtcggtgcggcgcacctccttctttggattctcgagcacccaccgttgcggtggcgctttgatcaacgagaactggatagccaccgccggacattgcgtggacgacctgctcatctcgcagatacgcatccgcgtgggcgagtacgacttctcgcatgtgcaggaacagctgccctacatagagcgcggggtggccaagaaggtggtgcatcccaagtatagcttcctcacgtacgaatacgacctggcgctggtcaagctggagcagccgctcgaattcgcgccgcatgtcagtcccatttgcctgcccgagacggacagcctcctaattggcatgaacgccacggtcaccggctggggtcgtctcagcgagggcggcaccctgccctccgtcctccaagaggtctccgtgccgattgtaagtaacgataattgcaaatcgatgttcatgcgagctggtcgccaggagttcattccggatatattcctgtgcgcgggctatgaaacgggagggcaggactcctgtcagggcgattcaggaggtccactgcaggccaagtcgcaggatgggcgcttctttctggccgggatcatctcctggggcattggctgtgccgaggccaatttgcccggagtctgtacgagaatctccaagtttacgccgtggatactggagcatgtcagatgatgatcagaagatactgacgacggcagatctacttttgttatttgttttaatttatcagttgtatctataagttttgtgtgatttatcttaaaggaatgttaagcgtagttagcttcaatttaacaattttaacatcatggccttgtgggccactgccacgcccctatccgcactcacccattcacctacacacacacacacacagtcaacgcccactaatttagtctagcgaaatgttagcaccgtaagttgtctaacaaggaaatcggtcggatttcgaatgggattatctatttgtacatagccgaagggatagggggcttgggaggggtaggggggattgggagtcatttgcatgtccacaagttgttggtattttagtgtagtaatatttaacaattaactaaatctatatttattgtaaacaaatgcatgcagacatccgaacgttgtttgtatcttgcccaaagaacaagtctatctatagcgatgcgaaagctcgagagcaataaaagattaatg

SEQ ID NO: 40698 - protein, 787 aa, DROSOPHILA
MKQPTLIRPRLRHRRSTPAAATKMCPKRHWLVNNRAAGSRGSGGAAARSRRSLDQIVEVLVALIVVNCLATAAAALITPPDSLESLGSLGIPSSSASSSEDDDDMSSGFYRIPHRLEGYPQLQQLQRGQNFKISPKPCSFGRVEGTCMFVWECIKSEGKHVGMCVDSFMFGSCCTHNYTDNIVLPQTAFSYTRPTKPLTLRPRPPAAPYKPMISGMTTIERPHGAGTLVIRPSGPHHQGTLARPHPPPYQSKPTTASDLHGSASHPSSSSSSSSSSNPNSIWHTSTQQQQQQQHQQNQQNHWQMTTEPSFITKPRPTGWTKPGIVNLPMPARPSKPSKPTKKPIVYDRTPPPPPSVPPSTSTSTTSTSLIWPAQTHPPQPHRPTRPQLSPGTSLAASSSSHWPSSTTSTTSSTTSTTTTTTTTRRTTTPTTTTRRTTTNKPTRPYQRPTTATSSSSTSTTSSKTPTTTRPISSSSSSSSGIVTSSQRPTQPTHRTPVLATSGIETNEISDSSIPDAGALGHVKTISAARSECGVPTLARPETRIVGGKSAAFGRWPWQVSVRRTSFFGFSSTHRCGGALINENWIATAGHCVDDLLISQIRIRVGEYDFSHVQEQLPYIERGVAKKVVHPKYSFLTYEYDLALVKLEQPLEFAPHVSPICLPETDSLLIGMNATVTGWGRLSEGGTLPSVLQEVSVPIVSNDNCKSMFMRAGRQEFIPDIFLCAGYETGGQDSCQGDSGGPLQAKSQDGRFFLAGIISWGIGCAEANLPGVCTRISKFTPWILEHVR

SEQ ID NO: 40699 - DNA, 3927 bp, DROSOPHILA
aaatatttgctgactattttacaaatcgcttaattggttgacaaaacactatttgattcccattttcccagctatttttctgcatagtttttctatatccaaatggcaattaaatgcagtccaattaaatgtactgagagctgcaatcgactattttcgcatttatttgtcatttggcagaacaaactgagtgcaagctggtctagagcaattcacgtcaatcagtgcaagaggtgtagcaaaaattgttaatgtaaacgatggctggaatactttaacattctgggcatatttctggcataaattggcataccagatattatttttgcaaaacatttaatgaaattacgcacacatttaaatcactcaaatgcggaatgacaaacacacacgcatgtgaaacgcacaccagtgaaaacaagggaaaaaccaaacaaaatgaacgtcacacacacacagaggagcacaaaagctggaagctcgaaacaaattacgttgaaatttcaacaatttgccataaattgagacaacaaggcacaaaaagccaaccagtcagcaccgcaaatgtacagtaattttttgccaccaagccaaacaatcgcacatacgcatcggttacgcatacgccacgttggtcgtattttttacatgccacatttcgcatggcatttcggggaatttcgagtgcagtcgcactcacactcgcacatttactcacactctttccgttggtggaaaagtcatttcaataattgcaaaaccacaaatttactacaactcgaaacggttatggtcacagtgcgaggcagatggacattggtcctgcccgcaaaaacgggaaccctttttatgcctgatgaccgaaccatagttgtaaattgagggcgctcttggccacattgaaaataaaaataactgaaatgtttctcatttgcatgttcctttggggcggtgggctgatctggaccaacgacacgaccgcaaaaccaaaatagttccgatggacataaaatgtcaacagcagcaactgggtgctggccaactgccgcaaactgggggcctcaatcaactgctgctgttgaacggaaatgaacgcatgttaacaacaccaacgacagcagcaacatcggtggtggtggcagccggaaggagtgcgagtaccaaagccggagtagcccacaatgacaaaatggcgtcagtcagcagaactgtcaacggaagttgcagtaaccacaacagcagcaacagcagcagcagtagcagcaccaacagcagcagcaacatggccataaacaagcaaccgatgggcatgggaccgggcacaggaaccggaatgggaacaggaacaggacatggtccaggaccacccaaccatacacactgcaaccgcatcactttgggcgagtgcagcctcaatggaatggacggctttgcaacgccggcagcacctccatcggcatccaacacaccgcaagcgcctctgggaatggcctccaattccggcatgggcatggaactgggcctggccatggcatcgccgcagctgagccagtgcgcccactgctgccagcccatttgcgatcgctacatcatgcgcgtggtggagaactccttccacgagggctgcctcaagtgcaccgcctgctcgctgcacctggtccactcctgttatgcgagggagggcaaactctactgccgcgtcgactacgagaggtgagtcctgattactgaaccctgccaaacggggggcgcttaaaacaatcaactccgtgtgagttgcacttactttaaaatggtagtgtttattaaatggtacagcttaatatttgaatgatatgatatatatttatattttcgctccacagactctacatccgcaatcattgccttggctgtggccttaaaatcgccgccgatgagctggtgatgcgatgccacgagaacgtcttccatctaaagtgcttcgcctgtgtggtgtgtggagctctgctgaagaagggggagcagtatgtggtcaaacaggggcagctcttctgccgcttcgactacgagaaggaggtggagatgctacagggatacggtgggtaatggccctattcgaaatcggttcccaatgataaccatataactatgtagatttctatggcgatgagcttttcccgcccaaattagacggacgaagaggacccaagcgaccgagaaccattctaaacacgcagcaaagacgagcttttaaggcctccttcgaagtctcaccgaaaccgtgtcgaaaagtgagagagaatctggccaaggatactggattaagcctgagaattgtgcaggtgcgtaaagaggtttaaatggaatttaatcattacatattctattaaaccaatatcgtattttgtaggtttggttccagaaccagcgagccaaggtcaaaaagattcagaagaaggccaagcaggagccgcccagcaaaggagctagtgactcgcaggactcgcaggaatcgctggacagcagtctggccaccaaaatcaaggacgaggcgcacagcgacagcgaatcacagctggaatcgccgtactcgacgacctccgatggactgacccggatgcgatgcaccattaaggacgaacaggagcaagtgcccttcaactgtatggagaccaataaaggtgggttatgccctttaaggatatttacgtatcaaggaatataaaatacaatttacagagaactgcaacaagaacagcgagcccatattgaacaccattctaggtctgagctacgccacctttcagcaactaatgggtccctttgcccagacgcctatgatcaatccgatcgaccgactatatagtatgcaaagctcctacttccggccggaggagctgcaatcctacggcgaatgcggcgtcaaggactccatggatcactagtccgcccggcgaaggccgtcgaattttaagcccaaatcaaaattagaccttgtaaaataaaagaatgttaatgtgctagcaatcgaacttaaacaccccgaacccggataagtggatttactgcccttccaccccccttggaagctggaccacttgcgcaatccacccaccggccgggttggtggttggtgcatcccatgttggtggctctgcaggtgcagtctcgaaattagttccgctcggttgacaggcacaaagcatttgccacagcagtcgcaaccctgctgaattcgtcctttcggctcggaatgggcgtaaaatgccgattcgtcatgcgtagttcaaaggctcggatacgaagggatccggaaccgtatcctccccacgatgacgagccgtttgatagcgtcgacatgaatgtgctgcaaatgccgcccaaggacagcacttttaactagcatcctggcctttcgttttgcttgagcggaagaactgcatcggaatgtcccaaacccaaaatctaagacaaattgggtggtaaatccttaagctttcaaaggcatagaaaaccaaactataaaaaatgctttttaacaaacaacttttttgccgaaaaacaatattatattatattaaatataatatggtttttgaaagcagaggagaaaattcatttcattatcctactaaaatatttatataaaatccttgaaaaagctaaactataaataattatgaaattcaagttgatttgttttgtaaatcgatccaattgtgttcagacgaacacctcatagcaatcaaacactgaatagcaagcttttgcataattgttatccttccgagactaggccgattccgaatttaggaactcgaatggaaaacacttggacaatcggtggctaattgatttacgaggaactgcaacacgtgtttacacaactccggatgaatccaaccccgtcgcggaaggaacaaggaccccgtcactccgccaagt

SEQ ID NO: 40700 - DNA, 1593 bp, DROSOPHILA
atggacataaaatgtcaacagcagcaactgggtgctggccaactgccgcaaactgggggcctcaatcaactgctgctgttgaacggaaatgaacgcatgttaacaacaccaacgacagcagcaacatcggtggtggtggcagccggaaggagtgcgagtaccaaagccggagtagcccacaatgacaaaatggcgtcagtcagcagaactgtcaacggaagttgcagtaaccacaacagcagcaacagcagcagcagtagcagcaccaacagcagcagcaacatggccataaacaagcaaccgatgggcatgggaccgggcacaggaaccggaatgggaacaggaacaggacatggtccaggaccacccaaccatacacactgcaaccgcatcactttgggcgagtgcagcctcaatggaatggacggctttgcaacgccggcagcacctccatcggcatccaacacaccgcaagcgcctctgggaatggcctccaattccggcatgggcatggaactgggcctggccatggcatcgccgcagctgagccagtgcgcccactgctgccagcccatttgcgatcgctacatcatgcgcgtggtggagaactccttccacgagggctgcctcaagtgcaccgcctgctcgctgcacctggtccactcctgttatgcgagggagggcaaactctactgccgcgtcgactacgagagactctacatccgcaatcattgccttggctgtggccttaaaatcgccgccgatgagctggtgatgcgatgccacgagaacgtcttccatctaaagtgcttcgcctgtgtggtgtgtggagctctgctgaagaagggggagcagtatgtggtcaaacaggggcagctcttctgccgcttcgactacgagaaggaggtggagatgctacagggatacgatttctatggcgatgagcttttcccgcccaaattagacggacgaagaggacccaagcgaccgagaaccattctaaacacgcagcaaagacgagcttttaaggcctccttcgaagtctcaccgaaaccgtgtcgaaaagtgagagagaatctggccaaggatactggattaagcctgagaattgtgcaggtttggttccagaaccagcgagccaaggtcaaaaagattcagaagaaggccaagcaggagccgcccagcaaaggagctagtgactcgcaggactcgcaggaatcgctggacagcagtctggccaccaaaatcaaggacgaggcgcacagcgacagcgaatcacagctggaatcgccgtactcgacgacctccgatggactgacccggatgcgatgcaccattaaggacgaacaggagcaagtgcccttcaactgtatggagaccaataaagagaactgcaacaagaacagcgagcccatattgaacaccattctaggtctgagctacgccacctttcagcaactaatgggtccctttgcccagacgcctatgatcaatccgatcgaccgactatatagtatgcaaagctcctacttccggccggaggagctgcaatcctacggcgaatgcggcgtcaaggactccatggatcactag

SEQ ID NO: 40701 - protein, 530 aa, DROSOPHILA
MDIKCQQQQLGAGQLPQTGGLNQLLLLNGNERMLTTPTTAATSVVVAAGRSASTKAGVAHNDKMASVSRTVNGSCSNHNSSNSSSSSSTNSSSNMAINKQPMGMGPGTGTGMGTGTGHGPGPPNHTHCNRITLGECSLNGMDGFATPAAPPSASNTPQAPLGMASNSGMGMELGLAMASPQLSQCAHCCQPICDRYIMRVVENSFHEGCLKCTACSLHLVHSCYAREGKLYCRVDYERLYIRNHCLGCGLKIAADELVMRCHENVFHLKCFACVVCGALLKKGEQYVVKQGQLFCRFDYEKEVEMLQGYDFYGDELFPPKLDGRRGPKRPRTILNTQQRRAFKASFEVSPKPCRKVRENLAKDTGLSLRIVQVWFQNQRAKVKKIQKKAKQEPPSKGASDSQDSQESLDSSLATKIKDEAHSDSESQLESPYSTTSDGLTRMRCTIKDEQEQVPFNCMETNKENCNKNSEPILNTILGLSYATFQQLMGPFAQTPMINPIDRLYSMQSSYFRPEELQSYGECGVKDSMDH

SEQ ID NO: 40702 - DNA, 24770 bp, DROSOPHILA
tatgactgggctctcgccggctaatgaaaacctatggggcacagttggtgttcattgcgtccaaatatttgcattgcatgcacttgaccaagaaaccggttctgattgctgcctgcctcttgggaaacccccaattgtcagcgggttccttggcaaaatatttgcgccccttcatcgccagctaagcgaagctgtggaaaaagtcatatctgtcacttgtgtttgccagcagctggtaaatatttgaaataagtcgtcgcggaaaaacaactgtcatgtttgaaaaattactttttgagtttttcgttcaataggcacttttctcttctccatgttgagattcgaaagtgattcatggcactttaatgtttcttggttatttagaagtataaaaaacctttaaaattatgaaaagtggaaattaaaaaataaatatataagcaccttaacggaaagtataagattttgtgtgcaaccctcctaaaagtgtactaaattttttttctaacggtgattaacttgaattttcaccggttgcagcgtatcgaacaacttgctggcctgagtcatctttcaactcattcagatggcatgcagtttcggatacggatgtttctaacattcgtaagggtgcaaaagccaccaccaaggtaaccccaagccagctatctgattcacacagaaaccaagccatggccatggaagccaaactcactcaacacaacttcagttgcgtgcgtgtgtgaaatggaatttttatgccgcacatttgggcaacttgggttcgttcgatctccctaaatatatatttgtatgtgtatatataccctatatactatatagctcgttatgctgtcggttggtttggtgcctctcgaggcacatttgtttgttcgccgcattcgagcgaacgacgaagcgaattcgccgcaatcgcttctgatattttgtggcgatcgccacccgagtttgcctcagtcagtcgtcgactctctgaacgtgcgtttggatagctattgccatagctcctcatcggaatcggaataggaatcggaatcgtttgtcggatcagctgccacgttttgaactcgaagtaagaacaggcaacgatcgtttattttcggtgctggatgtttattttcgaaaacgcgccccttttagaggccagtgttgaagtgttcaagtatctgcaagataccacaagtacctgaaagattaaagcgtgtaaaagtatctgcaatatgcaatagaatctgaacgtttgagtatctgcaaagctgaaacatattccaatatttccaaaagatacaaaagtatccaagtatctgtcagatacaaagcagagctttgtaccgcatctgctggcccgcagagtgaacccatcgtagactgctgctcatcctactggaacacaattaactggctcgaatgagcgttttgcagtgcaagaaagcgaaacatcgtctaaatttcatattgtgtatgcaataagccttcgcccatccgaagaagtgtgtgtgtaaaagccaatcaagtgcccttctgaacaaaccaaatttgttgttgtttcggtgcaaaagtgcttttggggaatttgaagtgggtggcttgtggctagcatttggatatcagccgtatctcaagtactccccagttcgtgctcatggattgcaagctcaaggcagcgtagataataaaataattatttgtcatacacataagtgagcttagttttcgcattcccacacttcgttttcgtatcgcactcttgcgggtaaatatatgtggtatttaccaaagtaaactacatcgtgtgcgtgttgcagtgagaagtgcatttattgctgcaaattcgtagttcaaagaaaaaacttataaattacctgccagccagttggatattaatttagtgcgtttcggtgagttcgcaaagcggcaaattgtatttcatacatttccctagaatttgactgcggcttttttggccagctgtgttggctttgtatatacaaatttacataaatatgtacttatgcacgagtgagcgaagctggatatcttttgaccagcggcggtgaatttcatttcaataggctactttttaaactctcgacttaaaaatatctcagatatgctttccaagtatccatgttttcagcctttttgcgagcgattgccatgcacttgaacttgaaagccagtttaccagtttttccgggtccggtctcgtctatctttggcaagtgctctccagttcatctccaattatctttgccactaaatggggtaataaattcaccggtgcatttatctgtcttcttgaaattctatgacgacaatgtggaagacgctccactagaatcattcagtgttcaggattgcggtcagttgtcatttgctgctgtgcactcgcatatctggttgcatatatatagttgctcttatggttttgacactagcatatgctatttaagaactaagagtcagtttatatctaaaaactacacaagaggaatcttatttctttgatttataaatttctaataatacttttcctcttaaaattgctaaaaaatgattcttgtaaatcattttccatattatttccatgtcgctactgatatattaataatgtccaattcatttataaattcatatttaaagtagttaaatatttatttgagtttcaccactttgtgtttgtgaagcgccatataaaattccacaccattaaacttaaagtgcttgtaaaaaatgttcataatttcattacctttcaagtggcttttcatatacattttaattcaaaaaagaaattcaattataattgctctaaaaactgcatgttggagtgagagtgagcaccactccaatggtttacgattataaacgcccaatagtaatcaagcaaaaaaaaaatccctcaaagaaattaaattctttttaatttaaataacaatgaaatataggttatttaaaaaactcataaattaaatttattttaaagccttaggtaaggtaaatacttcgaagtttgatacctggaaatttaaatttttgaatatttaatagttaatcaaaatgaaaagaccatgaaattcaattttttcgtggacaaatagaatacagatctattagagtgtttttcaaaatataatattattttgtactcaaatgttgcattacttttgaagctacttaaggtaaaaagaaccctgtagaaactaaatgcagctgcatataatgggcttccattgcgcctggcaacagaaacccagatcctggggttgcgctcattccaccccgaaagaccgatcatcgatcgacattctttatggggtagcatttgaaggtcgtggcccatcttcgagtataccaacttagaaaatgaactgaatgccatggagctcagctggtttgagctgtcgcagcgcatatgtgaaccgagcacatgcctcgattaacttgtccatttgccaaaccattgacacacagaccggctaatggaaatgcaactcaaattgtcactgctccccttaatgattctcgaccgacttttgaggctgactggggtggagcggctgggggtcgtcggatttgcggctcaactggcgccaaagccgcctgatccccaagctttgcctgtcagccatggacaataggcactcggctccagcacgttgccgcacccaggggcaaaaagtccggagaaagtcagccagactgactgacagatagacggacaacgaaccggagatcacaacagaacgcaacgcactggcgaacaaataaactaataaatcattgaccttgcgaaccttgacaaaggcggtcgaccagaaagtgcacggcatccatttggtgaatagactgacgcgaggcactcaaaagaatggaatatatatcagggaaataaaaaaaaaatattttaaaatttgtgtagaaaacaatagaaaaatgaggcacttgttctattgccactttgggttatcttcttaaataagaactcttgcctctagacttctttcatcaattcaatcaatattttattcatgaggtattcacatataagcttaaataagaatttataaacaaactcgattgcccaagaagcatacgatgaagactatatattatatatcgaaaatatacgagcactcttgcgaaaatgaatactcgatgagcatgttcaagatataaaactgcgtaccagaaaacaaaggaaatatcttgaagatacaaagaaagtatctgtacatttattgtgcgctgccatagaatattttgttttcaatactttcttatttctagcttccgacaacttacttccacagacaacaaagattaaattgaaagtatcagtatctcaccgattgttttattttggaatttctcgcagtgcactgagaaattgcagtccacggcggaaatgggaatggaaatgtgaatgggaacggtatgtgaattaggtatgggtatatgtgtatgcgactgagaataagaatgagaatgatgtgctgcctgggctacggttgaaaattatgcaaatcacagcgccaagtcacgaaattcccgagttgcggtgcagtcgccaagtcgccaagttgccgagttgccaagtagcccccgcgttgacaattttcacctttcgcctttttgtctttgcagcgatttaatggagatttacggcaattgacggaacgattcatgccgagatagcgatttcgtgggcgtgtgtccagcgtccagcgagatacttttgcgtaagaaatccgcgaatcaaagtgatgtgatgcccagtccatcttcctttccgcagaatgtaattcataagttgaacacgcgcacaattaataggaattagccatcgtgcctcccattgctggcggccagcagtacagaaatatcccgtgtgcattagcattatataattattattttagattagagccagttggctttgatgttgcctgctggccggtcactaaatgggttaaaatcagaaggggttccgtccgaaatatatttaaattccatctgcgggacgggaaagaaacaatcgctttgtttggccagaaccgcacagaacggcagagaacaggcccaaactgaacagtgaagaacacaaaaagccatggccaattggccaggtaaatggttttgggttctccgttttggtttcacgttcttattggttttcgagggccacaaacttgaattttcacagacatatctgttgggctcgtatttatcatatttcgctttgttccccaaatgctatatatagtattatttggcatatacgatgagaatcccgaatagtgtatgttactcttaacaaaacttactgagtcattctgacgccggttctaacaattcgtgcaatgacctgtgaaattatgagcattatatgagcttatccctcccccagaatttctgtggcattcccgagggctcctctggaagcttaagtagatttcgtcttcctggaatacttcattaatttttggctgtgtgaatgtttaaatttattttatcctaactgggtttgcctttaaaatttctgggaacccgtcgaaccaacaatcaatattttgtttaacttgcatattacctgcctgccagtgtttgctcacttcgatttgcatgacaaacctgaaacttagacgggtttttggcactgcgcaagttgctgattagttgcggcttagttgctggctaattggcaggcaaagttatgctgccaagggatttactatccatccaatcaatgtgaatagtaagaacgtgcaaatgacccaaaggccattttgatttcgtgccttcacgagaaatcccacagtcgaagttctccattaagcacaagttagcaattgccaaaggtaaaggtgttagcccggcttatttagtggcgtagtgttcgcgcatacattgagcttaaatggcaatctccgtagtaaggtggcacacacattctaattaaattacaattaagttacaataacactatcgaaagcctctcaactattggcatactctgcaggtggggtcgagctgcaatccttgcagcgtacgtgccttaattcagaacacagatacaatttgtatatatcgcacatggttttgacttcattccatgaagtgtaagtgtctgtgcttatgtcatgtgattccgacatggactggctggcagccaggaattgatacgatactttaaggtgcagccactggcacatgccacatgacccatatccatttttattgcacacttaaccagagtcattaagctgcggttaaggctatatagtctatagctcgtactcgtattcatatggggacgccgctcggctttacgattcagtatgccatataataaatgccatatcgtctaggtttccagccttgcagcaggtgcgggtaaaaaaaaaactgagcaatcagcacgattttgggcctccatatcagatcgttttcgctgcctcaacggaatggcagtatataaattatgtacattcgaatttccccagttcatctgccagttaaacaattcaagttatgtgtagacgagagtaggaaggctgtgtaatatattcgcaactatttgctgtcttgtgcatcgtatattttatttaaaacctttaaaattaccaggaatgctgatattattgcgataatatatttatttttacgagaatattcatttgttaacaatggcggatttcaagaactggttgtatttatgttaatttttactttttatttaaacatgatacgaaagtattaagaattaaccaaaccgacatgttttaaataattgtgtattttgtgaattacttattgttgtttcaaattacttaacttggttatttagcaggttatttaacgactctcttcgctgaaattccaatcggctcatgttaaagtattttttctgcgaaaaaacgtttattaacatttttcatttcgttccaagtttactcctcgtctcgcacatactacatatgtatgtacatgcatacatatgtttataggtatgaataacccacaagctggagaaattgaaatatatttttattaacctttatttcgattcggcagcttttgttttccccagcaggcgagtgatttgtacgttcctttgctgtttagtcagtgggcctttgcacttaatttatgccgccacaaatgaggcgaaataaaaacagtggacttcccaaactcacatcttttttggacggtgaatccaaagtcagctgtgtggggtgtacttaccaaatggcatgatatttccatttccgagtcgtaaatacttgctggctccccgcactttacgactttaaatcataaaaagtcgtcggttgtccccttagaaaccttcagtttcttaactttcatacccacttacaagtacagaccctctcaaaaaaaagggggcttctgtttgggccgtaaagaccgcgaaatattatttatggttattttcatttgaaatttataaccgaaaaaccatatgatataaataagcaagtgtgccgcacactcacaaatgtccaactttttctttggtccccggatccggtttttcgcattgggagaggtcaaaccccggtgccccagaaatcttgttacattttattgtttcacgcttttcctgagctgctttcgttactctacttatttatttaaagcatttcacttaccccactcgctgtctacttatttatgtaagcacgtcactatgctgtcctaacttcaacaactagctccagtgaccatggaaatgtgccagatttccatcggatcaggaattccgtatttgaggtgcatttaagtttgttgcatattttacaataatatgtaacgacatgaaaataatccgggaaatggtgcatcgcttacaaatcggtaaaaaatcagcacatcacatgacaatacttgttaaatggaggttttttatataatttttacgaaagcccgaattaattgaggctgaataaatagttgtttttcggggaaagacatgccattaggattttattgcattttaatatgactttttctcagaatggcagtcacaggtgtttttaccagttattaactgttttattgcttatggttttgtttaagtggagtatggcacaaactaaatttcttttacttaaaagcgcgaaactttagcaagaaaatcaattttaattcaaagttaattaattaattcaatataattgacaaaaaaaaaatggaaacgggagacatcaattttatttcttgctgaaggcagaaaagctaagctttattgctgctctaaaaatctaaaattagttacgaaaaacaaaattttagctcttaagaagattaatgatgaataaatatataggtaaaggaaactattaccctaagcttacaagtcaatcaaagtttctgtatttgctccaaatcttttggaaaggattgcaatttgctttgatcaaatgaaaaacatgactatggtgatatgttgactagccaaatataaataattgattgcgaaaatagttaaattacttttcgtttatggaaaacggcttttggggaaattgtgtcaagtttaagcattgcacgcactttaagttaacaacatatgtaaacaaaacaaattcattgccagagaatgaatcacctaatgtttagaatgctaattagataatcaaaatcagaatgagtataagcattgtaaaatgttaattagataatgaactgaaaacaaatcagaatgtgaatatttttgtaaattggctaatgacatatataacatttaactttataaaccttggaatcttagatatttaatcaccttacaagtatcatatcgtatcggtggcacaaagaggaatacttgccgctgaaaaatctgaattaataaaagtaacgttggctgggttttccatcggagggaacttcctttgctttcacgaatgtgtggccctttcctgcaaggatttatgtccacatgggtatgcagttcacgccgagcatgtttttctttaccagagatgccattaaattgtgcgtggatccaggagcaggaaaggatctggaatgagtgggtggagggagtgatgttgcctcatttctcaggactgacaacatggatgctaaagccccaatgcctgtcagtcgcatagctccttaatcgcttaagcggtttgagctcggggtaaaaattccccagcaacgcaacaaatccaacaaccctttgttcagacatgaaatgtgggccaaaagaattagcccgattgccaaaatgacttccgtttttcttgtttattaccaaacagtttgcattttttggcttaaagcgagattccgttctgttttggtccctttgtccatggcacatccacatccgcatgctccctgcccctcaagctactttgcatttttttcgcattttttcctctacactctgcttagtttttgttgttttatttggctttcgctttggctttttttctttcatttcttgctggctagttgttagtttatttggccatttcggtgggcgtaaaataatgtaatacaatgcggatcagcacgcttgacttgctcaacttctgctgtgtgcttttgacactttgttgctccggcatttccgttgttccgcttttcccccgccaacttctatcccagctccttggtcttggtttgttaatccgctttgatgcctatctgggaaatatatatatactctgcccagatgacctcctgtcatccactgatgaacggatactaccgacatcggtcagtctgaaagtttgtgctttttttatgcgtgccacatcactgattgccgcttgggattatgttggggcggggggaagcgcataaaaacgattgatatcaatatcgggggcaatggtgactaacacgtgacatgtgatgtcctgtcatcaggtcctacttggctcctccggaccagccagtcttttacggccattgctttttgctgcctcgagcatcttgtaattgaggtcgtacaataaaaataataaaattcccgggcacttgtgatttaatgacctttgaccatgaattccacgcctgttctacataaaagctttacttgctctttgctcgtatacgaagtaatattcttgaaggctttaacttttcagctgatgccgtcaaagagttggaaactctgcatcccttcgaactcgaaaagtgccattaaatctaagcatttaattcgactgtataaatagctctggggcagagccaagctttatatgcaattgttgccaaataccactgacgttgtaaaaatcgtattttattgtggcaattgaatggcgaacgggcgtggaattgagtaatgaaaagcaaagtgggcgccgcttcaaataaaatttacaaacaagagggaaccgcagtggcaatcacaactgggtccccaatgacggtggcactgtcaacaattattattctgatatgttttttacagccagtcccccagtgcttctccttttttgtcgccagattcatggccaaaagcttgctaaacgcctcattttcgggagctcagcagctcccagctccacaaatggccaattaatcagagatggggtcataaatcagacgaatgtcgttgaaaagtggctctaactttatacatagcgagaaaaataaatgtgacctattaaactcttttgttaggggacgatatctggaaaattatggcagcatttgaaatcttaaggtgctcttacataaacaaaatttttcttgcttaaaaataaacttattttcaggtttttattagatttccatataaatacttctttcgccttgttaaagaatttcgaagtttcgtagaagttgcaaattatatgaataatatccaaatgatttttaatttttttcacagaaattactcatgagtattttattttagactctaacttttatgtctgtttatcagaggacctcaagctgttccccttctgtcgaaggcaagctgtcgcctgggaaacttttaactatgcagcattttcctgcccaactgctgactgctgggggtgttggatgtgttggggggtcaagggtcaacgggttgaagagctgtcctttgtgtctcacgctgataagctggccagaagtttcgatgtacctgcccaggatgccatttgcctgtcatgagaatgaaatggaaatgcgactgggagcgggttcattgaattaagatcttaattgcctgcaataaattcgtgcaaattctgcgatgcccagcccagctgagcaaagttcccacaatttgtgtaaaatgtcgtaattggcgtaattagccagcgttttgcaatctctttctctctgcctatctcggtctctttcggcgcctctgtttgagttccattccattgtgctattggattggattggccattctgttatggtaattgttcgcctttgtttgcctttcgcacttgtcgctctcaacttgacctataaaacatggcacatgctgtcatggcatgcaaaacctgtgacaaattgtcgctggtacacgcaacttctttgtcacttccgtttccgctcgcccctttcaagttagccatccgtttccactttgcgcttcctccatttaccccataggtggcgccaggtgtccaaaagggattcccatggcgcattctttccacctggcattcacatcggccgactaatcatgattaatttgcatcaatttgagttgttgctatttttagtcgtcggctgcattgtatcgccttaatcgtttcgagtggaggtcttttattaccgcacgggaatgccagcgcggctttctcgcatttcgtcacacatattgtacatacaaatgtgacactcaagttggcgaaagtcgatatatgtgccacttggatacaggtaatcaaatcggggcacttctatattgatgaacttttaaattcatacacctatatcatcatgtcaatggaaacgggtttgcttgattgatgtatttcgatggtctgatatcatttcagagttcaaatcaagtagtgtaattcaatattttctggtagtccaaatgaaataaatctcatatacctaactggtgccaaatctgtgtccattctgtgctgcttattaccctgtgatattttaaggtaactttaaaattgtacaaatttattccaattattggctctttacatacaaaaagacagttgtttcaatacacactggtttaattacggataaaactgatttttgcgtactttggactgccggttgattgatggtttgtttggtttttcaatcgaatactcctgtgtatttattctgtatggcagtatattcaaacatcgttgtggaaaaataaacattcagctggttttcccaaaaggtcaaccaaaagggttgtgggattctcgtcatctggtcattgcagacgctacgaacttcagacaacttatgagacacgcttgcggtgttgtattttcgttgttgtcggcgataacaagaaaaggttttcatttcagtgtccttaacaacaaaagcggtagcagaaaaaaggacaccacgactgggattacataactatgtttaattgtgtatgcatgggtcggcagagcagccccaagtatcttaatgcataatcgagtgtgtttttctatgagaagaaatattttcgtttgtggcacacttactgattcagcgaattcgaatctttttgatgctatttcacttcatcttgatttatgggtttccttttttgtctcccctttgcaggcagctttaagcgaccgactggtcgactgccactttaatcgtcagcgacggatgtcctgattttacgacgaagggatacccatacccatacatatacatacacaattagccacagtggatgggtctgaaagttgcgacccgcacacggaaaccgcataagcactcggcgaaatcttcccggggcgaggaccccaaaaagcaccggccaaacaaacaaaagcagtcgccccaatgtcggacacaatctctttcgagttgggctcagctgccgaccggccccccaacaggtttcaagtgaacccggtcaacggcaacagtcgtaagtcgcagggagcggatggcccaggatccggatcaggagcgggagctggagcaggagcaggagctggggaggatgggccgcacgaggtctaccgccgactaacaaacgccgagggcgagctgctcgaggacgacacattcgatgcgacacaaatgctcaaccaacgacagcccaggcagcagaggtgagtcagttgggtgtgggtcaggggtcaaagggcaggggagacagcactcgaagaaattactgcactaagtatatttcaagaaaagcaactctgaagaaattaccaataagaaaaaaatttaatatacctaaaaaaaatatattttctagacctgcttctaaattggtatttgtatattgtcaaaagttgaaattcgatattttttgatattattttcattttcttttttcgaagtgtacttggggcctaaaacggttgctgttgttagggtttcgtcctattccacctttttctttgtctagtgcagaatgtaaatttcttgaatttttcattttctggtaattgtttagtgtttcatcaaacaaggattgcttttgtcgcctcctgtattttgtcctcgcttaattatggcgttaaaattccgacctggttccatccggttacaaaagattctgagccccaatgattccaaacggaatgttgaaaagcagctcgagaattatcgctgcgtcaggaaggacctttgaatcaattaccgagttagtagggaggtaccgagttgaatatcatttaggtacaatatggccgaaaatgcagattgaatcgatttgaggagcccaaggaactggtgtctggattagctagctatataccagctgaacaagatgcctcttaatcattcacgccacatttgctgcagctgtaattttcagtccaccagcttcgagtgcaatcactcaaaattgattaaattctacagaactccctgagaatatctcgatttcgaccattctcatctatcacagagcataaagttggcgacctgagacaggttcaacactcgatgggcgaagggttcaacaatcgcctgcagaaatcaaacaataccaccaatcacagactaaagtaataaccatcatttacgctcgtattccccattcgcaccgtggacagccaatttgcatagtcctgggaattggatggcacaagtcgttctttgtctgcacttcgccttggcactataaaatatttgtttcaatatgtcgcagcagtaacattataaaaaagccaaccgagttattgtaatgaggcttatgaaaatttcatggcccacagccttcaaggagcgcgggaaaagacaaggcaactgaatttcgactaaaagcccagcgttttcacataaaaatgcctcttaatcggctcaaattggcagcagcgagtttctgcataaattaatgataagcttacttaagggtcttctcgagttttaatcgcctgctttcaccgtcccaaattgataattaattcctgattttttttgggcttcctcacccccaaacgctgcgcaaattaaatcaatcttattgagaaacaatcgactggatggatcatcattatgagtgcttttcacgttcgcggctgccaggcaatccttaaagcccagcacacaagacactcataaattttttctccgacaaaggagcatatatcatataaatatctagaggccatagaggaaagacgtttggtaaatttgaaggcgccagcggaactgctaactcgactagaggatacttattcatttgtcaaaaatcgaaatcaatcttcaaaattctacttattgtagactttacttagtaattaaactgaatatatataatatttatgcaatcgcaataaacgacaattcctcacatgattcaaacataaaattcgcggaaactcttaatttacctgtgatgtattgaatttattacccataaatttaaagcttacaagatacattttacaacattttcatgttaatattctcatgtgttgcttgcgttttacttttccctttttattgtatttcctgaaaatcgtaatttgcattgcgatgcgcaagacatgtttttaaactttattgctcatttgcagctcacaaaatttaaagagttttaacttcgctatttctcatttaaagtttaaagtttatcaaagttttggtacatcccagtgtagaaaacatgggtatttcagctcctttcgattaacggatgcaaccactagggtgtcagaatgtcagattgtcagacgctcgtccatgcagcgcataatcggttgcggggggtgggaggatcggggttgaacgtacttctaggcgcgtgggcgtgtcctggggcggtctgcacgctcacagactggcaggagtcatctggggcacacaaaatcacacaatgggcggcaatcagaaagtgcaggccttgaattggggggctggaacgaactataaattcaataaattcaatttaatttcgtcgaactgaattggctgataatgaaagttatttgcagcggagttttaaattgaatcccatgttcactggccgaatggatttttaaatctaatcccgaacttttgtgctcaactcccaattaaagtggtaacctggggcaacgatgggctgggctgtaggagatgtaccgtaaaaaatgaatgagccatctaatatcgtatctttgtcgctcattcctaggcaatcaatcaaaagcagtttccgcgacaaggataaaccgtcaaggttcaaggatctgcaaacgacgacccgcttccaggtggatccccaaaatgaggagtccgacgagtccaatgactcgcaggaggagcgcgagctgctggacaacgagtacgacacaaaatatggtaaaagtttccggtcagtttgcattgctcccaaccttgttacacagataaaaataagctagaattattggaattgcaattattaaaatttttaaataattatttaaaagtttaacttaaaaactacctactacctaatgtcaaactgtctatattttgtttaaaaatttgtatatttctaatacatgatgcagtaagtaacaaaaggacccaaaatctttttcttgataagcattagtactttcagttaggcttgtttgtgattatttttctctgtgtattttctgcttcgccgtcgaaccttaaccaattaaaacccgactcctatccacaggcatttcaccagagaggcgttaccccgcctggacaactaccgcaacatgatgtccatccaggcggcctaccgtccaacgctcgacgagctgcataacgccacgctggtgggcaaggtgagttccacacatacttgcctttcggatggggttaactaaatgagaaataacgcgcaagtcgtaaagataccgcaggataatcgaaaaccacaaattacaaattcacaggacacataaatgctttacgagtcgcagggaaagacaaattgaaatttacgctcatacgcacccgcgaaaaaattcggaaaaaaatgcaaattcaataccctttacgggagaattgacccggacggggcagtgtcaaatcgacggcggaaagtgtcagcccgtctgatccaaaaagccagaaagccatttgccatttggcacttggcatttcccatttcccattttcatttttgcgcaggcacataagcgtgactgcgagtgccgccaggagtcaaatagctcggtcgttggcactgcaggctgggaaatccctgggaaattgcttgtcgaatgcaattcgtgcggtcccgaaatttattccaaaaatagcataactttggcagacttaaccgattaaatttgactgtgcggctattaaatctgacaagtccattgacttttcatttgacttctaagcccttgctctgctgtgaatcattttaaaaagttttcaatagatcccaaagatccaaagccatcaattggcactaattgatttccacacattttagagtaattgcttttgtttttgcctcacaattgactgggcaaatgattgtcaataagaaatgaaaagttaaatttctacgagctgcatccgaaggtccattgagaaattgatgcgatgcgttgcacaatatcatgccatgtggcaagctcttttcttattagctggagtccacataaatgggttgacgagcaagtcgtagtaattaagtataactataaaaaagagctttctcaatgtcactggggcatcttgtaataataagcaattaagatggggtctcgttaaaaagtgcaaaggttcaagacaagatcaattggcacaacgggtgctgcggtttcgggggcgtatgattaatctattaataatggttgaatgcggcaatgacggctgcccagaattcccgaaggctgaagtcatcttttttcagcgggatttcttttaagttcccgaaaaatttccatgtgcctccatggcctgcaaattatcaaagaattgaaagatatttaccccaacctccaacttcacgctgtttgccgaatcatttatcaacactagacagctttattgaaattttctcaagaacactctaccctttgcactttacacccacgtacagagagaataaaacttatgaaaacaattttattttcagtaatctgtacaacaatatattatgttgaaataaaatatgtacaagccatggagaggtggcagcttaggttcatgattttagcatgcaaaatatatcaaatcagatatcaacacatttttcgctctctgtattcaaacatagaacacgcacagcttgacacgtaatcaggacccggagtcgggcatcctgaatggggtcctgaaattcggttggatcaaaggtgtgctcgtccgctgcctgctgaacatctggggcgtgatgctgttcctccggctcagctgggtggtgggtcaggcgggcgtcatcgagggattcgtattaattctgacaacgactgctgtcacgaccatcacggccttgtcgatgtcggcgataagcactaatggtgtcatcaaagggggtgagtacctacacccacaccctgcccaggtggccgccttttaaacggctctaagtggtttcgacgctttcgcttaggtggcacatactatatgatatcccggtctctggggccggagtttggtggatccatcggtttgatattctccctggcaaatgcggtggcgtgtgccatgtatgtggtcggcttctgcgagtctatgttggccatgatgacgacctttggctgggagatcatagatggtggcgtccaggatgtgcgcatcattggttgcattaccatactgctgctcctcatcattgtggtcgtcggcatggagtgggaggccaaggtgcgtatgcgaaatatgcaatctagttatggacctaattctattccgattaaccaggcgcaaatcggactgctcatcatcctgttggtggccattggagactttgttattggcagctttatcggaccgaagagcgatgcggaaatggccaagggatttttgggatataatggtgagtcggtagagatagatgtatacaattgtatttactaataatatactataattttccatagccactttgtttaagaacaaccttttcgcggactatcggccggaaaagggaggcattcaacacgattttttctcagtgtttgctatattcttccctgccgcaacgggcattttagctggagccaatatttcgggcgatctgaaggtaatttttgaacctaaataagacgtttgaaaaataattgaaaatattaaatactaggacccacaaaaatccattccaaaaggcacgatcctggccatcgttatcaccaccggaacctatttgattatggtactccagtgtggtgccacagtggctcgtgatgccacgggaaatctttcagatgtcgtaaacggcacctttgcattcctcgactgtcagcctggtaacgaatcgatttacagagattgttttatgaaaacataatttaaactgcaacactttcgtaaccaaccaggtgaatgcaattacggcttgcaaaactcatttcaagtaattgagttggtatccgcgtttggccctctgatttacgccggttgctatgctgccacgttatcctcggcattggccagtttggtgtctgccccgaaggtcttccaggtgggataatccagttgccgtatcgaggccaaatgtctataagtatatccatatccacaggctctgtgcaaggatgagctgtatccgaagattgtgtggtttgccaaaggttatggcaagaataatgagccagttcgtggctatgtgttaactttcatcatcgcctgtgcgtaagtagatttttaacatacaaagcttaattcaattaaaaaagtatgaagtataggcaagtaatgccatatagtggccataatttggtgtttataaaactatatccatttaccttaatgtttaaaaaggccatattaaattggtttaaaccatacaatattttgtaagcactaagcaatttttccctctgaccctctagcttcattttgattggcgaactgaacctgattgccccgctcatttcgaacttcttcctggccgcctacatgttgatcaacttcagtaccttccatgccagtctggccaagccagtgggctggcgaccgacctttaaggtgagcaaattgatttaagtcctccggcagtagatgctaactttggatcgcaatcaacttagtattacaatatgtggctgagcctgttgggcgccatcctctgtgtggccgtcatgttcctcatctcgtgggccacagcgctcatcacctttgccgccgtgctggctctgtacttaattgtggcctaccggaaaccggatgtcaactggggctccaccacccaggctcagacgtacaagaacgccctgatgtcggtgcagcagctgaacaatgtggaggagcacgtgaagaactaccggccacagatcctggttctttccggtttgcccaacacacggccggtgctcgtcgacttggcttacatgctaaccaagaatttatccctgctcgtctgtggtcacgttctgaaaggttccagctcgcagaagtaccggacatatctgcaggaaagggcgggcaattggttccggaagcatcgcgttaagggcttctatgccctggtggatggtgaggactttgagtccggcactcgggctctgatgcaagcaactggtattggaaaacttaagccgaacatcatcctgatgggctacaagactgactggcagacgtgcgatcacaaggagctggatcagtacttcaatgtgatgcacaaggcactggacatgtacctatccgtggccattttgcgtgtgccccagggtctggactgttcgcaggtgctgggctcgcaggatggttggaagaccgtttcggatgtgccgagaaccctgcagccaaacgagagttccggggatctgcaggcggtggacagtagtgtcaggaacggtttaagtggcagcattgattcactcagcagaaatgtatcgcaaggtaagggacaggagtccacttggaacgagatcggctatatgatattttttaattaacttatatctttcgattatattccgcatgtctctctttacccccttgaaatcgcaccaccccactcaattgcaccttctgcaccacaattgcaatcacgtagaagaccgaaaccgcaaccagttggtccacagcgagcagaacagcctgaagatagtcaaatgtgagtagcatgcgcggtgaaattgtaatggtttacattagggtggacctgctgttacaaaaagaagggcttgccctgtcatcggcagaaaacatatatcgtctgaaaatatttccttgttcttggaaatgaatatgcaagcagctatattcaagtttaattaccctttactgagaatctttttaaatagttttgcactaagtatactcaaatttcaaccataccaaccgttagccagcctattaattattattgattttaagtttcatttcattttcatttaattaaatatctcatttatattaaaaataatatttacacaacacacagtacaacataccgcaatattaatcatacgtcccgtaaacactactttataatgtgaagtataatatggtaggaccacatacattaagcaatacgcaggtccaccctacccacttgtcgagcgacaagtcagtatcccaaccaattatccttcgcaattaaattggtattttcgtatcatcgaatttcgtatcttctggggagccgcagtgcgattcaagcagggcctgcgtagaatgcgctcgtggccaggtgcaggtgaagttgtgcttttgctaagattgcgtgtgatagcatagagccttgaatggaatgtgaagttgttgtaggctgagtaggtaaatatgaatacgaatgggctgccaagccaccacattatggcgcacaaacaatcactatcacgcatggcagctgcagcatgtggccttgcttcgcaatctagccataaacttttcaagcgaattaacgtaattttacagccaaactaaccccgagctcatcccagcttttccagacacccctttggcggttcggcatctgtgcatgttggaaaccttttgggacccgaaaattaatgcaatgcttgtaaatttgaattttaaattcgcacaatgtcctgccggactcgcttctctcctcgctggagctatgctccgaatctgtccaacatggtcaccctgtttggcctaaagggactgttgtatgtcctgtatatatacgcatatatacgccggaaaatggcgaatctgctgaattcctgctgcattgtttgttgtctgtgcatgtcccgaatgacgaaatgattttgctgtgttgccaaagattttttgtttgcctatcgtttgctactttttctacaatccaacttcattttttccattcagcctccagcacgagtgacctgtcctttatagcgggcaatcaatcgaaggatgtttccggcatgcccgatcccctggatgccaaatcggccaatcttgtggtaattcctgaatagccatttaattagcatttgcattcaattcgattgaccttcgttcaccattgcagagcaattcgttgcgcaagtccaagctgaagcacgatgatccggcttccctctacaagggtcctggtggtgccgagctgcccaaggaggtactggcggaccttacccaattcacgagaaaacgcagccacgccgtcatcgatgtctggtggttgtacgatgacggaggactcactctcctcttgccctacatcatcagtacgcggcgcacctggcaatcctgcaaattgaggtaggtatatggcgaaataccgcgaaatgctagctaacgggcaagtaattttcactcggggattttcagccatgtgctctcttccttgcaaagcagaaatcctgattaccaaaaaggcacacgcttgagacaacttttctgttttatactatgtatttttccgtgtggtgctacccgttgctcatgtttatattctcttaacttttttttttattttaaaaaagattttcacatttatttgcactttattttggaatagtaaacatattttttgcattgtgcaatgtttttcatatttatttgctgcacagaaatataattttcccttaaaaaaacgtttgcgagaggagcaaagcattgtgctcttcataagttgcataacttgtaggtgatgcgttttaaagttcaatccagtaaatacaacatactgatattttcatgaactgcataacttcgcgaggatgggcttgaaagacattaaatcaatttgcttccagttcaaaacacaaacaaacgtaaacatcgcagttgtcggaattaattaagcctgatggggctgcgcagttaattatcatgtggctttttcaaaaatccacaaagccaaatatgtatttgaaatcaatgcggtaattttgtaattttccacccgtagagtttacgcgctggctaacaaaaattcggaattggagttcgagcagcgctcaatggccagtttgctgtcgaaattccggatcgattactcggatttaacactgattccggatataacgaagaagccccaggaaacatccacgcagttctttaatgagctgattaaggactttgttgttaccgaaaaggatggcgagaatggcaccagcagcagggcaactctcaacgaggacgatggtaagttcacattgaattatattaaacttgaaatatttgaagttaacttatccatagaacaatatctaatgtttccatctatatttttcagccctcataaccgacgatgatctgttggcggtgcaggacaagacgaatcggtatttgcggctgcgggagtacctgcgggagcagtcgaccaagtcggacctcgtggtgatgaccctgccgatgccacggaagaacatcgtctccgcacccctctacatggcctggctggagagcctgagtcgggacatgccgcccttcctttttgtgcgcggcaatcagacgagtgtgctgaccttctactcgtagaaggaatataaatactgttctagaagtcgagttaaattcatatttaaatgcagtgctaataatttttaaaattgctttttatttgggaaatataaattggtttgactatatattgacttatagttaaaagaaattatatggttacgactacagttataaaagaaaatactcctttgaagtccacattataggaggcatacattctacatatgtatgtatatatgtgaggagatttcttatgaatgaatgtttatattacatatattctatgtaaccgcaaaaacccctcgttatacatcaatccatcaaatcattgtcaaacaaccttcatgttataaatatacttctctgtcttttcatagtttacatacataggagtagggtttttctgttcaactccaaattgcttgcaacatgttcgagttgcatgaggcttgatgaggtcatatgggcagaagtcttaagattaacatctctagaggactgttttagaatcctttgcttaaggataacagtaaaatcataatatttactataacttaatatcttagctttgcttgaaaatatacaatataaattattagactcttaacatattactttcacttgctttttgtgcttttcggcagacctgtgagcttgatagctaattaattaacttattttttaaatctgtttgatgtttccaattaaagttgtcgaaccgtctatatatataattcctgagttccgtaaatatacctaatttggttcaaagaactaccactaattgaaaaacgaataccttacataggttcaattagttagaaaaaattccttttagctacttcttttagatacaaaatggtagtttgtatgaaactcccaaacaaacaaagtttgttttcttatagttggagccgaaaaaagcagttaaacatacgttgctgtagaaacgcctgaaaggcatttgctgacgtgttttttttttttttggttgtaatcaagttgtttcatacgaggatacgcgtaataacgcatagcttcgtttattgtttggttcatggcctggccattaaactataatg

SEQ ID NO: 40703 - DNA, 3907 bp, DROSOPHILA
tgcgtttggatagctattgccatagctcctcatcggaatcggaataggaatcggaatcgtttgtcggatcagctgccacgttttgaactcgaagcagctttaagcgaccgactggtcgactgccactttaatcgtcagcgacggatgtcctgattttacgacgaagggatacccatacccatacatatacatacacaattagccacagtggatgggtctgaaagttgcgacccgcacacggaaaccgcataagcactcggcgaaatcttcccggggcgaggaccccaaaaagcaccggccaaacaaacaaaagcagtcgccccaatgtcggacacaatctctttcgagttgggctcagctgccgaccggccccccaacaggtttcaagtgaacccggtcaacggcaacagtcgtaagtcgcagggagcggatggcccaggatccggatcaggagcgggagctggagcaggagcaggagctggggaggatgggccgcacgaggtctaccgccgactaacaaacgccgagggcgagctgctcgaggacgacacattcgatgcgacacaaatgctcaaccaacgacagcccaggcagcagaggcaatcaatcaaaagcagtttccgcgacaaggataaaccgtcaaggttcaaggatctgcaaacgacgacccgcttccaggtggatccccaaaatgaggagtccgacgagtccaatgactcgcaggaggagcgcgagctgctggacaacgagtacgacacaaaatatggtaaaagtttccggcatttcaccagagaggcgttaccccgcctggacaactaccgcaacatgatgtccatccaggcggcctaccgtccaacgctcgacgagctgcataacgccacgctggtgggcaagaacacgcacagcttgacacgtaatcaggacccggagtcgggcatcctgaatggggtcctgaaattcggttggatcaaaggtgtgctcgtccgctgcctgctgaacatctggggcgtgatgctgttcctccggctcagctgggtggtgggtcaggcgggcgtcatcgagggattcgtattaattctgacaacgactgctgtcacgaccatcacggccttgtcgatgtcggcgataagcactaatggtgtcatcaaagggggtggcacatactatatgatatcccggtctctggggccggagtttggtggatccatcggtttgatattctccctggcaaatgcggtggcgtgtgccatgtatgtggtcggcttctgcgagtctatgttggccatgatgacgacctttggctgggagatcatagatggtggcgtccaggatgtgcgcatcattggttgcattaccatactgctgctcctcatcattgtggtcgtcggcatggagtgggaggccaaggcgcaaatcggactgctcatcatcctgttggtggccattggagactttgttattggcagctttatcggaccgaagagcgatgcggaaatggccaagggatttttgggatataatgccactttgtttaagaacaaccttttcgcggactatcggccggaaaagggaggcattcaacacgattttttctcagtgtttgctatattcttccctgccgcaacgggcattttagctggagccaatatttcgggcgatctgaaggacccacaaaaatccattccaaaaggcacgatcctggccatcgttatcaccaccggaacctatttgattatggtactccagtgtggtgccacagtggctcgtgatgccacgggaaatctttcagatgtcgtaaacggcacctttgcattcctcgactgtcagcctggtgaatgcaattacggcttgcaaaactcatttcaagtaattgagttggtatccgcgtttggccctctgatttacgccggttgctatgctgccacgttatcctcggcattggccagtttggtgtctgccccgaaggtcttccaggctctgtgcaaggatgagctgtatccgaagattgtgtggtttgccaaaggttatggcaagaataatgagccagttcgtggctatgtgttaactttcatcatcgcctgtgccttcattttgattggcgaactgaacctgattgccccgctcatttcgaacttcttcctggccgcctacatgttgatcaacttcagtaccttccatgccagtctggccaagccagtgggctggcgaccgacctttaagtattacaatatgtggctgagcctgttgggcgccatcctctgtgtggccgtcatgttcctcatctcgtgggccacagcgctcatcacctttgccgccgtgctggctctgtacttaattgtggcctaccggaaaccggatgtcaactggggctccaccacccaggctcagacgtacaagaacgccctgatgtcggtgcagcagctgaacaatgtggaggagcacgtgaagaactaccggccacagatcctggttctttccggtttgcccaacacacggccggtgctcgtcgacttggcttacatgctaaccaagaatttatccctgctcgtctgtggtcacgttctgaaaggttccagctcgcagaagtaccggacatatctgcaggaaagggcgggcaattggttccggaagcatcgcgttaagggcttctatgccctggtggatggtgaggactttgagtccggcactcgggctctgatgcaagcaactggtattggaaaacttaagccgaacatcatcctgatgggctacaagactgactggcagacgtgcgatcacaaggagctggatcagtacttcaatgtgatgcacaaggcactggacatgtacctatccgtggccattttgcgtgtgccccagggtctggactgttcgcaggtgctgggctcgcaggatggttggaagaccgtttcggatgtgccgagaaccctgcagccaaacgagagttccggggatctgcaggcggtggacagtagtgtcaggaacggtttaagtggcagcattgattcactcagcagaaatgtatcgcaagcctccagcacgagtgacctgtcctttatagcgggcaatcaatcgaaggatgtttccggcatgcccgatcccctggatgccaaatcggccaatcttgtgagcaattcgttgcgcaagtccaagctgaagcacgatgatccggcttccctctacaagggtcctggtggtgccgagctgcccaaggaggtactggcggaccttacccaattcacgagaaaacgcagccacgccgtcatcgatgtctggtggttgtacgatgacggaggactcactctcctcttgccctacatcatcagtacgcggcgcacctggcaatcctgcaaattgagagtttacgcgctggctaacaaaaattcggaattggagttcgagcagcgctcaatggccagtttgctgtcgaaattccggatcgattactcggatttaacactgattccggatataacgaagaagccccaggaaacatccacgcagttctttaatgagctgattaaggactttgttgttaccgaaaaggatggcgagaatggcaccagcagcagggcaactctcaacgaggacgatgccctcataaccgacgatgatctgttggcggtgcaggacaagacgaatcggtatttgcggctgcgggagtacctgcgggagcagtcgaccaagtcggacctcgtggtgatgaccctgccgatgccacggaagaacatcgtctccgcacccctctacatggcctggctggagagcctgagtcgggacatgccgcccttcctttttgtgcgcggcaatcagacgagtgtgctgaccttctactcgtagaaggaatataaatactgttctagaagtcgagttaaattcatatttaaatgcagtgctaataattttt

SEQ ID NO: 40704 - protein, 1171 aa, DROSOPHILA
MSDTISFELGSAADRPPNRFQVNPVNGNSRKSQGADGPGSGSGAGAGAGAGAGEDGPHEVYRRLTNAEGELLEDDTFDATQMLNQRQPRQQRQSIKSSFRDKDKPSRFKDLQTTTRFQVDPQNEESDESNDSQEERELLDNEYDTKYGKSFRHFTREALPRLDNYRNMMSIQAAYRPTLDELHNATLVGKNTHSLTRNQDPESGILNGVLKFGWIKGVLVRCLLNIWGVMLFLRLSWVVGQAGVIEGFVLILTTTAVTTITALSMSAISTNGVIKGGGTYYMISRSLGPEFGGSIGLIFSLANAVACAMYVVGFCESMLAMMTTFGWEIIDGGVQDVRIIGCITILLLLIIVVVGMEWEAKAQIGLLIILLVAIGDFVIGSFIGPKSDAEMAKGFLGYNATLFKNNLFADYRPEKGGIQHDFFSVFAIFFPAATGILAGANISGDLKDPQKSIPKGTILAIVITTGTYLIMVLQCGATVARDATGNLSDVVNGTFAFLDCQPGECNYGLQNSFQVIELVSAFGPLIYAGCYAATLSSALASLVSAPKVFQALCKDELYPKIVWFAKGYGKNNEPVRGYVLTFIIACAFILIGELNLIAPLISNFFLAAYMLINFSTFHASLAKPVGWRPTFKYYNMWLSLLGAILCVAVMFLISWATALITFAAVLALYLIVAYRKPDVNWGSTTQAQTYKNALMSVQQLNNVEEHVKNYRPQILVLSGLPNTRPVLVDLAYMLTKNLSLLVCGHVLKGSSSQKYRTYLQERAGNWFRKHRVKGFYALVDGEDFESGTRALMQATGIGKLKPNIILMGYKTDWQTCDHKELDQYFNVMHKALDMYLSVAILRVPQGLDCSQVLGSQDGWKTVSDVPRTLQPNESSGDLQAVDSSVRNGLSGSIDSLSRNVSQASSTSDLSFIAGNQSKDVSGMPDPLDAKSANLVSNSLRKSKLKHDDPASLYKGPGGAELPKEVLADLTQFTRKRSHAVIDVWWLYDDGGLTLLLPYIISTRRTWQSCKLRVYALANKNSELEFEQRSMASLLSKFRIDYSDLTLIPDITKKPQETSTQFFNELIKDFVVTEKDGENGTSSRATLNEDDALITDDDLLAVQDKTNRYLRLREYLREQSTKSDLVVMTLPMPRKNIVSAPLYMAWLESLSRDMPPFLFVRGNQTSVLTFYS

SEQ ID NO: 40705 - DNA, 3035 bp, DROSOPHILA
gtgtccaggtttttattagcacccgactaacggacacttgtccgctcgctcttcttcctcagcaactgcagctcaaacaaagccgccagccggtaactaattttcaaaaaagccaagatgatgactactcgtggttggagcgagcttaagctgtctttcttgcatcctgttcgaggttgtaaagttgaaatctttgtgcattatatttgcgttattgagtgaatgtttagatgcacactgtatactatttttttgatagtatattcttgaataaaaaacaaattaaggggttggggaactaaagtaaaatttcttatattatgaaaaatgtaaacaatttgcgtgcatacaaatttaaataaagtttatttttctaaacattataattgtaccgaaaacactacatgtccagcttattcaacttacattgatatgaaatcattgatatttcttctttttcttaacccttagcttattttaaatgaaataagtacttaatttattaagtatttaatcaaagaggtcacagtggcgccctcagcatttgcttattgagatggtgaactaatggaaattgcctactatcagttgtgcttagtgtgcgtccaccttttggttgaaataagcaactatacaatgtagtatcatcgccacctttggctgttattttgaactatacacagctgaccgctaacgtcctcttttggcctatgattgaactagatagtttcttttgtattccgcaagggacaatatgcggcgaattcactccgtgtggcgaattcaatctccaaaagcggatttatacaccaaaattaataaataataataaaaaaacattttttttatatacttgcgagtagcatttcaagtcaatatataaaataagaaataatgttgatatgcgatatttcgtattaaaaactatcgcgataaaagtttacatatcgtaaatatcatcgatacatcgatattttattaatacaatcaagatgcaacacacaaggcgcatggtaagtaatattattaaaaagccggtaaattgcaaaatacaatgaacaaacatgttattttttttagctgaatcctctgttgaccggcctgcgaaatttgccggcacgcggggcaacaacaacaacggcagcggctcccgccaaagttgaaaaaagtgagtatttcttaggtttagttatgaaattgaattaattttgaataaataaccacagctgtcaacacggtgaccattttgggacgagttggcgccgatccgcagctgcgtggatcccaggagcatccggtggtcaccttttcggttgctacacacaccaactacaagtaagtgcatttgtgtgcgttttgccgcccagcatgcgtctgcaactgaacttgaaatcacatctcagaggagggaaataaaaaagctacataaatgttgacaattaagttagttcttagccttaacctccaagaaaatatcacgttgagctgctaattcagatttatgtaatgagttattagaacatttgctgtatgtaattacctaatgataacggcaatagtgtacatttccttgttcaattaacttcagtgatcaatttcttcttaggatccatgaaatgccggatttcataaagaaaatagctaccatttcatttaaaaagcattcatgaagtcttaaatatttccccacagatatgagaacggcgactgggcccaacgcaccgactggcatcgtgtagtggtgttcaagcccaatctgcgtgacaccgtgctggaatacttgaagaagggacagcgaaccatggtgcagggaaagatcacctatggagagatcaccgaccagcagggcaaccagaagactagcaccagtatcatagccgacgatgtgttgtttttccgtgatgccaacaactaaaatttaagcccagatcaccaaacctaatcttaagcgaaaagttgaacttgcagcattgtaagcatttataatattcgttggatatattgtgttatcagattacatgcgtagtcgtactccacatgtgtcttttggttttaactccttgacctttttgcatgggaacggtgcgttgaattggcgtgcatgttcgttataaagctgctcgaactccttttgaacttgtgtgacctggctcttcaatttttcgatatttttttccatagactccagtgtattattgtggtaatcgataagcttggttacctgttgatacactcactttagaaactctaaatacaacttttagtcatcatttcataccaaatttacggaaggtacttttgcggatatctgctcattatacgtcgcgacctcctctttgatctgattgcaatgatcgactgtttttttcgaagacatcagcatactcagcaaatcctgatatgtggtacttgccaaaggaaacacttggcctgccagactctcaggactcggatagctctgctccaatttcgtaactgctttctccgcctgtataaggttaatctcgttttcatgcagctccatttctaccctaagcatggtgcactttactgatctcagggtatcatcgatgggaagtgcctgttggagtatgaaaaatttatatcctgtttgcctatggccattgagtctcacatttttggcattgtctaggcaaatttgttcctgttccttaagaaattttaacttggtattgaaatctgattccatttcaaggctgtcctgcattaaaatatccgccagcatatccaagtacaggaatgtcgacggatctgataagtttggctcacacataattttaaaattaactttaaatgaattttatgtattttttgtatgtgtttttgtgacttatgttttgtttgtcactgagtgttaggcaaatcaaagcttgctaaggtatgagttttctgatcgtattctaatctaagggatccttgccaagaggcatcatttattttcatacatcaaggattataatggtgattacagtttttgaagctcttaccctcgagcagagtttgctctttagttc

SEQ ID NO: 40706 - DNA, 553 bp, DROSOPHILA
cacaaggcgcatgctgaatcctctgttgaccggcctgcgaaatttgccggcacgcggggcaacaacaacaacggcagcggctcccgccaaagttgaaaaaactgtcaacacggtgaccattttgggacgagttggcgccgatccgcagctgcgtggatcccaggagcatccggtggtcaccttttcggttgctacacacaccaactacaaatatgagaacggcgactgggcccaacgcaccgactggcatcgtgtagtggtgttcaagcccaatctgcgtgacaccgtgctggaatacttgaagaagggacagcgaaccatggtgcagggaaagatcacctatggagagatcaccgaccagcagggcaaccagaagactagcaccagtatcatagccgacgatgtgttgtttttccgtgatgccaacaactaaaatttaagcccagatcaccaaacctaatcttaagcgaaaagttgaacttgcagcattgtaagcatttataatattcgttggatatattgtgttatcagattacatgcgtagtcgtactcc

SEQ ID NO: 40707 - protein, 140 aa, DROSOPHILA
MLNPLLTGLRNLPARGATTTTAAAPAKVEKTVNTVTILGRVGADPQLRGSQEHPVVTFSVATHTNYKYENGDWAQRTDWHRVVVFKPNLRDTVLEYLKKGQRTMVQGKITYGEITDQQGNQKTSTSIIADDVLFFRDANN

SEQ ID NO: 40708 - DNA, 7117 bp, DROSOPHILA
taatttatatttaattttaaacatgttttctgttgacgacgacacgcgaaaagttcccccgaacctttcgctttaatcagagaccttatttacacaagtgacgtttgcatggtaatgaagtggagcaaaagtttccaccgcctgtaaacaattaagatcacctccgtggagagcgtcatccaggcgcggaggagctaataaagtcacacgcccgtcatgtggcttcgatccggttttggcatgcgaaaagtcgctttgtgataaagaatcgaagcgtgtaaacaataacaggcaaataaatgccaagagtgtctggcccattgaccaagggtgtcgtttattagccacttttttgcgacccattgttgtgataccaaaacatgaagtgtatttgttccaagttccacaggcgtgtttatcatatttctgcaaatatgtgatagaaacttctcatatatttattcttcaacggaaatctttacgatttacttataaaacatcacatataaaaatagtttctgggaatacataatgaatgaagaggtttgagaaagtagcaatacataggctgtatttggtggatgaaatgtattaacagacatattcttcagttagggtatccataccttcgattcctctttgccagacactcacttcttttactcatttgttttggctgtcgaaaagagcgggtaaaaccgtcgagcggtgtgggaaatgcgtgtcgaacaggcggactaggctatgttgatagctaattggcaagaagccgattctggctgggatggggtgtactttccatggtaggggttgttcagaggccgcacgcgcgctgccccaacggagttggtgggggaaaagagcgaggggcaggcgcgaaaagcacaacggtgtactttgctctcgggaagctatatcgcggagcttcggctgcgatcgccgacgctctttggattcggatgcggattcgggttcagtctttagtcggctggctcccgcgttggttgtgcgcgcgttatactctctagatacgaaaaacaaactaaaggcctcttgcctctggagcgtagttatataattgagctcgagcgcgacaagtgtgaatgtgcacaattgcaatcaagcgaatcgagcaaagtctggccgctttattgggccacagcatccacaagatagtagtgtatcttgtgaagttcagaaatcaaatcagaaatagcagagccaaagatagctgcatcatcacatatattttgtaactgtagtgactgcgagtgaaagtttgcaattgtcggttttgaagagtgaaagccgcataccgctaagataggcggaaacggaaacgcaaatcggagttcgagatcggaagtgaaacagtgcaaaagcgacaagatgctgcggaatagcacttaccagtacaatctgcccgtcgattaccacaatattcagcaaatggcagtcgctggcgacatgatggaggactttgtggtcatatttcgcgatatgatgggacgggtacgttgctgacaggccccttttactacgaccctttgtaggccaaaattccataattctttatgcgacccagtgcagcggaagctgactcattcgccagttatttgttgtgattatcttatcgttcgtgtggtttttccctggaacttcaacggggtttgccataaggtagtctctgcttgatgggacttacccaaagtagtaatattaatgatctctttcttggacaaagcagtgcctttgctttggatttactttaatgctacacgtgtgtgctattttcgcgctacttcctccctgttgtgcatctaaaaatatactttaaaatgtctgcgattgaattcccattcaacttcgcagctgttgcaattgttcgctgcacttgtgcacacttacacaatgtttcgtttggtgccgcgtcgtggttttggtattcgggtttttaagttgccccatggacgttcaagtcgcctagcaacagacgttccaccgatggatgacgcgccaaaagcgagcttcgtcgggtgacgtgctgatatggaaccggtctgctctgcccctcctccccgaaatcgccaacagcaggcagactttaacttttacgatcggcgaagacgacatactttactcagaaaggcacacatggcacttggcctaagatttgcgcttcgcgtggctctccctctttttttttttactctctcgtgtatttgagtatttctgccaacttgttgctaggcgcctgcaaacgtcacgcttttgtgctcttggccaacagggcgtatgtgtgttaacgcgccttagcataattcatatgagtgtaacaagtatacgcacagtgggtgagtgactgagtcagagccatgtgattgacccgctctccctcttgcctcgttatccacaatttggtcaagcccccacaatttgtgtgacgttagcagttttctctctttataaacgtgttgatatttacattacactgatgtttactttgacgtcggttgcggggaaatcaacccgcgtcaagatcaacgcaacaaattctgcgggcatgagtcaagttcatcaagtcggtcgatgatccaccctacctactatgtatatgccttgaaaaaaaaaaccccagatatcgtacagcgatggcttatagccttgctatcttgcttgatcggccattcaagcgtattcgccttgaatttatgttagttcattagtccaaggcgtttaaaagcttgtaagtggctctttgtgatcaaagattgttcattcatggttgcggaaaagccaagctaatcgttttttaacctgttttctttgccaacgagagagtagtctcctttcagggtcatttccacgtttgtgcgccaaaatcacggctaacttataaatagatcattgtgtataaaaaaagctctttcgcactcatgtgactcgatgtttatatatcaaatatatatatgattatatatctgaaatcgagaattccattagtaatgacgttgcattaaaagaggacgatttaaattccgtaacatttccatcgctctttttgcgctggattaatattccatttcgttaattggccaactaattcccacaattttctgaatggaaaccccatgtgattgcaagttgctaattgtgagtgcaaactgaagtcggtttaaatgcttaagtacacttaacccattcagcgaacttatacccttatatttggcatcattaccagaggctagaactcgcattccgcgaagagacttctcgaaattgtcaccgtgtgtgaatgtgacagacacgccgaatgatttggcacattcaaagcggatgttttcaccgggaaacactggatatatcttgctccgctaaatagataaacaacaaatcacttggcttctgttattattcgcatgtctattgtccaaattagtttcaatgacaccgggcaggctgtttgggggggtataagtgtaataaccttttatgttcgccctgaggttctggaaaatttctttataacgctgcaagtgggaatcaatcggattcagttgggttttttgctcgcacgaaagcttcgaacatcacaagacttgataattgttatcaatatcagacagcttttcggctatcagcggtattaattcgatttaaagccaaaagctgtgcaattcatacgaaatcaaaaataatatttcacttcattcaggcccacttggcgttagttttttttaagaagagagagaaagagatccgccaaattgcacaaccaattggcgacagacaaaaggcaggcgagccaattataattattttcggggtggcgcacgtctgaagaaaaatccgcaaatcgagaaaataaagtacatagttgcagcacgaaccagatatatgcacatgcatacatatatgcagctgtctatgtgttcctgcacgaatggcaaaactaatgtgaatgatataacttttgtttacggctctgcatcgttctttctcgcccgcttccgcaattctcactgggcatcgggcgatggggattttagtggcgcgtgtggattgcccagtccgcccatcgcatcacatcactcttttgcattctgcataagcaaacagcgttattattcaatattaccgcacctggttgcattgtttgtctggcaaatagagatagcagtcggtgctaaattggtttaaaatcatggcgctggaggctctcaaggaattggttaacttggtggaggatgtcgaagagtgtcgcctctccgaggaagtagttgttcacgtaaatgaatgcatacttttaatttgtatttattcgctagaaggaatggaactcgtaaccttttcaagctatacccatctatgttaaatcctttttcctttaaattagactagatcctagatcgctataccaaaacacgagtaatttaatcgcttacctttggatttttgcagtacctcgacattggcgaggatatgaacgtacctgatgacttcacacagaaagagatgcagacgggcctctggtggcgacacttggtggccggtggcatagctggagcagtttctcggacgtgcacagcgcctctggacaggattaaagtgtacttgcaggtgaatcaacctcgatacacggtatatttctcttgagatctaaacaaacgaattctcccaaccaggtacaaacacaaagaatgggaatctcagagtgtatgcacatcatgctgaacgagggcggatcgcggagcatgtggcgaggcaatggcatcaatgtgttgaagattgcccccgaaacggctttcaagttcgctgcctacgaacagatgaagcgactgattcgcggtgacgatggcagccgccagatgagcatcgtggagcgattctatgcgggcgcagcggcaggcggaatttcacagaccatcatctaccccatggaagtattaaagacgcgcctggcgctccggagaacgggacagtatgcgggtattgccgatgcggcggtcaagatctacaagcaggaaggagtgcgcagcttctatcgtggctatgtaccgaacatcctgggtattctgccctatgccggcatcgatttggcggtatatgaaaccctcaagaggcggtacattgccaatcacgacaacaacgagcagcccagctttctagtgctcctcgcatgcggcagtacatcgagcacactcgggcagctctgctcgtacccgctggccctggtgcgcactcggctacaggcacaaggtaagacaataattcagggtcataattggttctatcgtaatgctataataattttaccattttcacttgcagccgccgaaacaattgccaatcaaaagcggaaaacgcaaatacccctgaagagcagcgacgcgcacagcggcgaggaaacgatgacgggcctgttccgcaagatcgtgcgacaggagggactgacggggctgtaccgcggcataacgccaaacttcctcaaggtcctgccggcggtgtccatcagctacgtggtgtacgagtatacgagtcgcgccctgggcattaagatgtcgtgagatgtctgtcttaatctcgttccaatcaggttaactcggctcggcccggccacctcggctctgcggccccgctctgcagggcggatcgggctgcggccgggatcgggtgcggctggtgatccggctgacgctgtgctccattttgtatagtagtagcgttaggttaagtcggctcggtggtcgccactcgctctctgccgcaatgagacagtctcgtgctgcttctttccttaagtgtaaagcaggcctcttccacgttctgggttatccgttttaagtttttatagttgaattagtttttggttattttcttaaaatataaaataagtgatactatggctaatttatttataaaccaaacgcaaaggagaaaatgcaacattttgccgtgtgctaatcccaaaacatttcttaggccaacaatcctgcgacctacaagtaggtttaggccactctatctcttaagagctaatttatttacaattgtacgtaggctacgacctttgttgagggccatcgctcttagtgaactgctaaaaacacacataccaaaaaaaaaaaagaaaaaaacgaaaccggcttcgaagagtttcacgggtttttagttcgtcccatccgactgctttcgaaagcgaattagcttagcataaatcagagtgagccaggcaggcggattgcgagtgggaatcaggtatctgaaatcgagggatagacggatggatacggatactcggcagcgtttaagcttaaacacaaaagacattaaaactacgatgtactcgtttttgcttagattaatcgattacacaaaaaaatgagaaacacttaacgtttacaatgtgatgataatagtttataatatacacatataaatacatataactatacctatacctactaaaataccgacttgtaagcttcaaatagctgtcgcagtctcttgagcaagttcggcggcgaggctgaagaaaactttgtagcattttatttgttaagtttagtaacacttcctcttagatcgtattgcaattgaagccaacgagattaattgtgacgaaagctaacaaacaaaacaaaaccaacacaatacccatacaccatgtaatttatttgatatatcatgtgaatctgaagccgatcgcaaaaccgaccaatcataagttcaatcctattttatatacacactgtaatggttttgaatttaaaagcatatgtataatttgtaccctactcttaattagccaaattgaattttgtacgactgtagtgaaaataatgactttttaaatatgatttatcactgtcccaaaaaacaaaaaaaaaaaacgctttaccacagcaccgcatttttaagaagtcaaacacacttgaatcatttgacttgatcattaaaaatcacccaatcattattcgagtaaataaatacaaagattataatgaaatctacgcaaaatttgtttataatttattagtcttttgtttttacttctacaggattttcgtatgtagtttgagatcattttaagtttgttgtcctctgcattttgaca

SEQ ID NO: 40709 - DNA, 1990 bp, DROSOPHILA
ttggttgtgcgcgcgttatactctctagatacgaaaaacaaactaaaggcctcttgcctctggagcgtagttatataattgagctcgagcgcgacaagtgtgaatgtgcacaattgcaatcaagcgaatcgagcaaagtctggccgctttattgggccacagcatccacaagatagtagtgtatcttgtgaagttcagaaatcaaatcagaaatagcagagccaaagatagctgcatcatcacatatattttgtaactgtagtgactgcgagtgaaagtttgcaattgtcggttttgaagagtgaaagccgcataccgctaagataggcggaaacggaaacgcaaatcggagttcgagatcggaagtgaaacagtgcaaaagcgacaagatgctgcggaatagcacttaccagtacaatctgcccgtcgattaccacaatattcagcaaatggcagtcgctggcgacatgatggaggactttgtggtcatatttcgcgatatgatgggacggtacctcgacattggcgaggatatgaacgtacctgatgacttcacacagaaagagatgcagacgggcctctggtggcgacacttggtggccggtggcatagctggagcagtttctcggacgtgcacagcgcctctggacaggattaaagtgtacttgcaggtgaatcaacctcgatacacggtacaaacacaaagaatgggaatctcagagtgtatgcacatcatgctgaacgagggcggatcgcggagcatgtggcgaggcaatggcatcaatgtgttgaagattgcccccgaaacggctttcaagttcgctgcctacgaacagatgaagcgactgattcgcggtgacgatggcagccgccagatgagcatcgtggagcgattctatgcgggcgcagcggcaggcggaatttcacagaccatcatctaccccatggaagtattaaagacgcgcctggcgctccggagaacgggacagtatgcgggtattgccgatgcggcggtcaagatctacaagcaggaaggagtgcgcagcttctatcgtggctatgtaccgaacatcctgggtattctgccctatgccggcatcgatttggcggtatatgaaaccctcaagaggcggtacattgccaatcacgacaacaacgagcagcccagctttctagtgctcctcgcatgcggcagtacatcgagcacactcgggcagctctgctcgtacccgctggccctggtgcgcactcggctacaggcacaagccgccgaaacaattgccaatcaaaagcggaaaacgcaaatacccctgaagagcagcgacgcgcacagcggcgaggaaacgatgacgggcctgttccgcaagatcgtgcgacaggagggactgacggggctgtaccgcggcataacgccaaacttcctcaaggtcctgccggcggtgtccatcagctacgtggtgtacgagtatacgagtcgcgccctgggcattaagatgtcgtgagcggccccgctctgcagggcggatcgggctgcggccgggatcgggtgcggctggtgatccggctgacgctgtgctccattttgtatagtagtagcgttaggttaagtcggctcggtggtcgccactcgctctctgccgcaatgagacagtctcgtgctgcttctttccttaagtgtaaagcaggcctcttccacgttctgggttatccgttttaagtttttatagttgaattagtttttggttattttcttaaaatataaaataagtgatactatggctaatttatttataaaccaaacgcaaaggagaaaatgcaacattttgccgtgtgctaatcccaaaacatttcttaggccaacaatcctgcgacctacaagtaggtttaggccactctatctcttaagagctaatttatttacaattgtacgtaggctacgacctttgttgagggccatcgctcttagtgaactgctaaaaacacacatacc

SEQ ID NO: 40710 - protein, 370 aa, DROSOPHILA
MLRNSTYQYNLPVDYHNIQQMAVAGDMMEDFVVIFRDMMGRYLDIGEDMNVPDDFTQKEMQTGLWWRHLVAGGIAGAVSRTCTAPLDRIKVYLQVNQPRYTVQTQRMGISECMHIMLNEGGSRSMWRGNGINVLKIAPETAFKFAAYEQMKRLIRGDDGSRQMSIVERFYAGAAAGGISQTIIYPMEVLKTRLALRRTGQYAGIADAAVKIYKQEGVRSFYRGYVPNILGILPYAGIDLAVYETLKRRYIANHDNNEQPSFLVLLACGSTSSTLGQLCSYPLALVRTRLQAQAAETIANQKRKTQIPLKSSDAHSGEETMTGLFRKIVRQEGLTGLYRGITPNFLKVLPAVSISYVVYEYTSRALGIKMS

SEQ ID NO: 40711 - DNA, 3236 bp, DROSOPHILA
atagacggaagcttaagcaaaagatttgcattacgagttaatttctcatttttacaatgatttcgtttccaacaagggtcgagtacttcggttgggttgtgaagagttctcgactaacagatacccgaaattcagcaaagaatctgtttcttagattgctcacaactctctgtaaaaatcgataggaatcgtcattgaaagattaaagtctgaagttcattggttctcgcatacagacatcctttgaatttaatcaagaaattacccaacttggttcagtgatttgtcgctagagattatcccatccataactccactccgtgagtcagatagcaaaccaaaccgaatgcgtccatgaagaccataaccctggccacacgcgaatgtggctacatacatacatacatacatcatcatcatgcgcatcttcgcagctccaaccattatcctttaagagctagcttggactcgctgtttaaatatttcatgtcctgtcgaatggacaagtaaagaggggaaaaggagcaaggggcagggggaggccaaggaggcgtcggcgacagacgaagagaataaaaaccgaaaggcagaagacgatggcatataaataatgtaaaaagtgtgaaatgcgcctaatggtgtgacaagcctgatgtaaaagcggaaaggctggcgaaagcaaaaaggatcccacgaaatggcgcataaaatgacaattgacagctgatgatatttttgcttgaatgcgctgtctgtaaggcaaacggccccaaaccattcatgtatatcataaatatttgatcgaacatcaggtctatgtaacattttcgtttcttgttgccagcaaaaggctgagtaaaaataaaaagcaacagtttcagttcagctttcaaaaaaacgcaaccaaaaaccccaatagcgcaagatcaataccaactttcacataacactggttgccgttcctaccacttcactccagcagaagccatccaccatcgatatgtcatgcaagaattgccctccctacaagaactccgaattgggcatcttctttccggattgcttcgaacgcgtcagcggtcattgcaacaagaagaatcccggcaatgtccagaatctccacatcctggcccatcgggtgatgcccaaattctacgatggcatcgaactggactacctccaccgcctggcacccaacaaatatatcacggccgcctgggttctcagtcacatcaggccatcgggttttcgcttcggcggactatacacgtttcgggttcaagacgatactatggtaattaaatttataatttacaaaaaaaaattaaattatttattacatgatgcaaaggtacaaatgtaattcttgttttatatattgcagtacaccccaaccattatgggcgacatacatcccacttcactcgctgccaacctgaacatactgtactatccttttcaatcccttcgcatggaggccgtgctgcagaaggccagggaggccgcggtggagagccagtatacgatcgagtggacgaggccatgcgacacgtggaccgccaacttttacaatgtgcggaatgaaagtggacgttgcacaatgtccgtgatgagatcggtatccgcacactgggccctcggcggggaacttctactggagtggaacgatccccagaaactgactccggatctggcgctcgcagcacggtaagattgtaataataccataatcaaagagccttaattaatagagatttcttatagttactcccattataactattccttggctgccaccgcatcgaggcagggattggatgtcacctactggcagcgcattcatccccatatccagatggccaatctcttggcgtggaatcgtaatacccgaaagaccattgccacgatatgctatcaatggaacttctggaactcagccgtccatgggatgttcgattcggatgcctccgtgggcttcatgtggacaaagtgagtatagaatcaatctcgaaagactgaagttaatcttgtttttccccagatacctgacgcatttgccactgcaaatgggtttcagtgtagtgatgaatctgcccacagatcgatttgctttcggcatgcgttttgttttggacccaagtggattgagacgtggcgagtaattttctgtattggttttactacatgtgtacaacaaaattatcaattgcaagtattagtccagagttcaatgaattacaaaattggcgttcggaaaggttttatttcatcatagatagaaaggaattgtctgatactaattttaattttttctccagtctcttgaatacatttgcggtgcaacttagttccgaaatatttcttattctagcactttttgccacacgctgcacattaaaagcgaacacatactcgcaaactcagaaagttttcctttttgcagcgaacagagaaatctcgcatgcatttgatttatgcgctggcaagtctagacactgtaaatattttttaatgccgcacgaaagaccagaaatctcggctcaagagggagctaagaaatttatatgtacttatacacggacatatgtatctataaatctaaaataaatacaatttacacaataaatttcccgctgcgttgagcatagattaagccaaaaagataatggctcttaatccgatatagagttcacagatacacccagatgctccactacatgacccataaaccgaaagaaaaagaacagagaatggagtatccaaagcttggggcgaaactttgaattgatttttggttttggccggaatgagaaaaactttttagccagctgaattttcttaggcagacatgggttggctttaatttgctgggtggtgagagtctgcatgtgtgtagcttaagttatgaaaagttttttgctcgcacacacggacattcactcatacatatgagcacataataatatttcaataaatgctgaaaatccttttcccagcctatgctgaaaccccaaaaaatcaagggggtaaggcgttgtaaacttttcccgaaggaccccagggccagtctgttttccctttacacttttcccgcttatcgacgcctttacaaatcattagattttcatatccgatgaatttcacaacgatttacacaacaaaaagaaacgagaccgaaacgcaaatttactgtctcctgcttttgcaatttttcggcctcgatatgtcaatttgtt

SEQ ID NO: 40712 - DNA, 1037 bp, DROSOPHILA
atgtcatgcaagaattgccctccctacaagaactccgaattgggcatcttctttccggattgcttcgaacgcgtcagcggtcattgcaacaagaagaatcccggcaatgtccagaatctccacatcctggcccatcgggtgatgcccaaattctacgatggcatcgaactggactacctccaccgcctggcacccaacaaatatatcacggccgcctgggttctcagtcacatcaggccatcgggttttcgcttcggcggactatacacgtttcgggttcaagacgatactatgtacaccccaaccattatgggcgacatacatcccacttcactcgctgccaacctgaacatactgtactatccttttcaatcccttcgcatggaggccgtgctgcagaaggccagggaggccgcggtggagagccagtatacgatcgagtggacgaggccatgcgacacgtggaccgccaacttttacaatgtgcggaatgaaagtggacgttgcacaatgtccgtgatgagatcggtatccgcacactgggccctcggcggggaacttctactggagtggaacgatccccagaaactgactccggatctggcgctcgcagcacgttactcccattataactattccttggctgccaccgcatcgaggcagggattggatgtcacctactggcagcgcattcatccccatatccagatggccaatctcttggcgtggaatcgtaatacccgaaagaccattgccacgatatgctatcaatggaacttctggaactcagccgtccatgggatgttcgattcggatgcctccgtgggcttcatgtggacaaaatacctgacgcatttgccactgcaaatgggtttcagtgtagtgatgaatctgcccacagatcgatttgctttcggcatgcgttttgttttggacccaagtggattgagacgtggcgagtaattttctgtattggttttactacatgtgtacaacaaaattatcaattgcaagtattagtccagagttcaatgaat

SEQ ID NO: 40713 - protein, 320 aa, DROSOPHILA
MSCKNCPPYKNSELGIFFPDCFERVSGHCNKKNPGNVQNLHILAHRVMPKFYDGIELDYLHRLAPNKYITAAWVLSHIRPSGFRFGGLYTFRVQDDTMYTPTIMGDIHPTSLAANLNILYYPFQSLRMEAVLQKAREAAVESQYTIEWTRPCDTWTANFYNVRNESGRCTMSVMRSVSAHWALGGELLLEWNDPQKLTPDLALAARYSHYNYSLAATASRQGLDVTYWQRIHPHIQMANLLAWNRNTRKTIATICYQWNFWNSAVHGMFDSDASVGFMWTKYLTHLPLQMGFSVVMNLPTDRFAFGMRFVLDPSGLRRGE

SEQ ID NO: 40714 - DNA, 5278 bp, DROSOPHILA
gttgttcatcttttatccgcgttttatattcaattggttggggtttcctgtttgggaaagtagcaagctgcacttctggcttacctctttcaatttatagtaatttcatttagcatttgcggtttaaagaatacataaatattcttaaatcaatcttttctcccgtgaagcataattgtgaagcattatttacagtttgctctgcttggactgttgttattttccacttgtttttccacttgatggcgttcgaatttgcactggaataacaaaattctacagtcatgtctatcactcgaaatacatgtgtttgtgagccattatgcagtgtcagcagagttgagtgaaaacaggagaattcctaaagtatgccacccatgccgaggcgttcggattgacgcatgcatttctcgccggaggccgcctgcatgcatatttatgattcgtgtgcgtcttataaataaagaaattgcaaaatgaaaatgcaaatgcaaaaacatcagttcctgtggaactgtgtcaacaacgcgtgccataagtctacctgtgctcacccaaaaccgagccacaatctgaccagagtcgtcttgcacttcacattcagctggtgttaagttgttgggtatattttcatgtcttttccagctgaataagaaaaaaaatctagcaataaaatgtttaatttttttctatgagttgtaagcatgcttattgaactgatattattaatagattatattatttaaactgtttcatgaaaaccacattcaattataccccaaagaaaaaatatttaaggggtatgaagtcctgctgacatcatcggaaaatgagaagacgatatcccaagaattaagggtggctgttccgacgtatcaacagttggttcccagctgcagttgagggcaaggatacggataggattgcgcacaagtatccagaaggggcgctttctgggcgcagtgaggcgtggtcgaactgctttatcgacgctatgtaggttgccaagcgaccgtaaccaagcgttgccgacgaaaacagaaaaacgcaaaacacacaagacccaaacaccgaggagccagctgggcagtaaggagcgcaaatcccgagaaaacgaacggctgtgcgaaaaaatggtaagaaatgtgcctggaaaatgttatcagatactccgaagatacttatgtccctgtccagatactttcgcgcggaaaaaccgactcggcgagctcgagaaatgccagcggaggtcctggcagtggactcggcgttggaaggcaggcaaggaagactccggcaccggcctccctagaggatttcatcatcaggcgggactacacgggagcccgggcttttctggaggtgcgtatggattacttttgccccaaattcagtggacaatcgttgctgagttttcacattttattttcttatacatggcagcattaactgccgcagccagttttaatttaattggtatgggttgtttctttacctatatacattattttcaactaattagtggtgataagtacacttttatgtgctaatgttgattttagtttagcttacaaaagctttttatagccaaatctaaggcgactgattaatttcttgtcaaaacacaaatcgatggaaaccaatcaaatattacatcaaaacaaatttgtttatttgcttaacttataaagcaatagtgcacaataaattattcagcttaattcgcgttcgtcggaattactcaacgaaagtgaagttaaattatccagaatacgcctcgaaggtaaattcatcgagaggaacagcaggtgcatcttccgggaattgatctttgaaattttcacacaattccgcatcacttatttcatccaggcatttttgaaaagacggcgataaaggatctgccttaactgcgattagcgcgattaaaagacacacaaacagagacaagaatttcatggtagagatcacaatgcattctgactagatgtcagctgcttttataccagtttggaagatgttgaatttggcctagactcgtttttttgtgacttacttatatagattaatgacgcgtataactttgcatctcttagtccgaatacattaatcgattgatagccatccattgttttctgaacgaccactgtaaaatttgagtctactgaagttcaatctgtgaattaatatattgtggttcaaagacatgttacctttgtttattcataatcgatttgtgctaccacagagcatagtattagttttatcagaaaaccacttgctgtgtttgccgaaacggacctgttttatacataacttgtttttcgattagctaatttttgcatttatacacaatgcttttattagtcactattaaagcagtgacgttaaatgtcgtgatttttaacaaacatgtgtaactctcaataatggtattaaaaggaaaacaaattatatatatgcggtgtgtcaagtgtaatgttaaatcgaattgtagaatatctaactggtccatccatttcagttcgccaacgacgacgaggacgaggaggagggtgctcatggatccaagcagagtcaggtggatcagtggattgccttttgcaatttccatttgggtgactaccaacaggcgctggcccaatacaaggccatacagcagggttcgtcaactcctgatgggaaattggatctcaacctggccgtgtgtatgttctacttgggcttgtacgaggaggcccaacaactgatggccaatgcggctgacaatccgctgaagcagcgactcctcttccacttggcccacaagctgggcaacgaggaggagtggagccagctgcaggaggagctgcaggattcctcgagcttggaacagcagctcagcctggcttcgatgcactacatgcgggcccattaccaggaggccatcgatgtgtacaaacgggtgctggtggacaacaaggaataccaggccatcaatgtctatttggccttgtgtttttacaagctcgactattacgacatgtcccaggaggtcttggatgtgtatctcagtcaacatggcgatagtaccatagctattaacctaaaggcttgcaatcgatttcgtttgttcaacggtcgtgtggccgagcaggaaatcaagaatatagccgataatggcaccttcggagcggatcttctgcgtcacaacttggtcgtttttcggaacggtgaaggggcattgagagtcctgccaggattattgaatatcattcctgaggctcgcttgaatctggctatatactatctgaagcagggcgatgttcaggaagctcatgctctgatgaaggaactacagccaacttcgccgcatgagtacatactcaaaggagtggtccatgccgccctgggccagcaattgggatcggtaaggaaatggatacagatctcgatggggaaagcaatgttaccatatccttttccttatagaaagagcacatcaagacggcccagcaaaacctgcatttggtgggcagttcggcaacagagtgtgacactataccgggtcgtcagagtatggcctccgcctttttcctctacgagcaattcgaggaggtgctggtctacatgaactccattcgcagttacttcgtgaacgacgatgttttcaactataactttgcccaggcgaaatgcgccacaggatattacaaggaggcggaggagttgctgatgcagatctccgacatggatatcaagaaccagcatacctactgcatgatcctggccaagtgccacatacattgcggtcaccctgagctagcttggaatgtattcatcaccagggatacgaatgcggaggcatttatcctgttgcaactgattgccaatgagtgttacaagtgtgccgaattttgggtggcagccaaagcatttgatatgctcgaaaagtaagtggattaattaagtagcaaaattaaaacaatttacaaataattggatttaacagactagatcccagtccggagaattgggagggcaaaaggggcgcctgcgccggagttttgttcgccttgtgcaccaaggcacaaagaggtcgtcctggtggaggaatctcagaggtcatcggcatcctacgcgactcgtcgaactcgcaggctgaggccatgatcaaaacgattcgaaagcacatcaatcattttaaataaataataaactgaaggcaaaattagattttgtttatgttaaggccaatttcacacatattaatacaataaaaagttacttttcaaaatcaaatatttatatgataagcttggcaaaattgtggtcgcctttcaatgcttaagtgaaatcacttaaaattggtgtactattttaataattaatttaaatttggtcagccgcaactcaagtcaaagacgatggattttggagagcttatttaaaatggaaatagcttctaagtggtgaaaaacgatactaattcatttgcaattggcctggcagcagttttcacatgatacctgattaatttgcggcatacacgaatataatttgtatccgcaaaacaatttggttaattaattgaagagcaattttatcaagaaaattgagacaggcatttcaaaagttatgccagtgccagccgctgtccacttaataaatcaggcgcagcaactttcaaaaactaattgataattaatgaaataaaatcccgtcttcatcttttgttgcctctgacgcgctgccaacgaaattctcggctcaatttaattcccttgagaggcaattatgcctgaaaggaggaggcactcctccattaaccccctaaagcccctatacacaccgctttctttgcctgcagtttgcttttgttcaatttgctggccatttcgcctgcaggccaaaggatccaggattctggccctggaatggaaacagaaacaggaccagaggcccagcagcaaatgggggaaaagcataattaatgcgattagcaaaatgcgaaagtgtcactgaaataacaacaatacggcaatgataatagccaaaaaggaagccattccggcaaaataagaaataccctttccattcactattaaaacagatagcttaaaaacatcttaaaagtgtaaactgaatttagaggcatatagcacatatattaaataaaaaatatatattaaaggaatattatagctgagaaaaattcaactaaattttgaatttaaatgcaatttgattatcgattaaaataacgatttgtatatttagattaatttggatctcaact

SEQ ID NO: 40715 - DNA, 1934 bp, DROSOPHILA
gttgccaagcgaccgtaaccaagcgttgccgacgaaaacagaaaaacgcaaaacacacaagacccaaacaccgaggagccagctgggcagtaaggagcgcaaatcccgagaaaacgaacggctgtgcgaaaaaatgatactttcgcgcggaaaaaccgactcggcgagctcgagaaatgccagcggaggtcctggcagtggactcggcgttggaaggcaggcaaggaagactccggcaccggcctccctagaggatttcatcatcaggcgggactacacgggagcccgggcttttctggagttcgccaacgacgacgaggacgaggaggagggtgctcatggatccaagcagagtcaggtggatcagtggattgccttttgcaatttccatttgggtgactaccaacaggcgctggcccaatacaaggccatacagcagggttcgtcaactcctgatgggaaattggatctcaacctggccgtgtgtatgttctacttgggcttgtacgaggaggcccaacaactgatggccaatgcggctgacaatccgctgaagcagcgactcctcttccacttggcccacaagctgggcaacgaggaggagtggagccagctgcaggaggagctgcaggattcctcgagcttggaacagcagctcagcctggcttcgatgcactacatgcgggcccattaccaggaggccatcgatgtgtacaaacgggtgctggtggacaacaaggaataccaggccatcaatgtctatttggccttgtgtttttacaagctcgactattacgacatgtcccaggaggtcttggatgtgtatctcagtcaacatggcgatagtaccatagctattaacctaaaggcttgcaatcgatttcgtttgttcaacggtcgtgtggccgagcaggaaatcaagaatatagccgataatggcaccttcggagcggatcttctgcgtcacaacttggtcgtttttcggaacggtgaaggggcattgagagtcctgccaggattattgaatatcattcctgaggctcgcttgaatctggctatatactatctgaagcagggcgatgttcaggaagctcatgctctgatgaaggaactacagccaacttcgccgcatgagtacatactcaaaggagtggtccatgccgccctgggccagcaattgggatcgaaagagcacatcaagacggcccagcaaaacctgcatttggtgggcagttcggcaacagagtgtgacactataccgggtcgtcagagtatggcctccgcctttttcctctacgagcaattcgaggaggtgctggtctacatgaactccattcgcagttacttcgtgaacgacgatgttttcaactataactttgcccaggcgaaatgcgccacaggatattacaaggaggcggaggagttgctgatgcagatctccgacatggatatcaagaaccagcatacctactgcatgatcctggccaagtgccacatacattgcggtcaccctgagctagcttggaatgtattcatcaccagggatacgaatgcggaggcatttatcctgttgcaactgattgccaatgagtgttacaagtgtgccgaattttgggtggcagccaaagcatttgatatgctcgaaaaactagatcccagtccggagaattgggagggcaaaaggggcgcctgcgccggagttttgttcgccttgtgcaccaaggcacaaagaggtcgtcctggtggaggaatctcagaggtcatcggcatcctacgcgactcgtcgaactcgcaggctgaggccatgatcaaaacgattcgaaagcacatcaatcattttaaataaataataaactgaaggcaaaattagattttgtttatgttaaggccaatttcacacatattaatacaataaaaagttacttttcaaaatc

SEQ ID NO: 40716 - protein, 570 aa, DROSOPHILA
MILSRGKTDSASSRNASGGPGSGLGVGRQARKTPAPASLEDFIIRRDYTGARAFLEFANDDEDEEEGAHGSKQSQVDQWIAFCNFHLGDYQQALAQYKAIQQGSSTPDGKLDLNLAVCMFYLGLYEEAQQLMANAADNPLKQRLLFHLAHKLGNEEEWSQLQEELQDSSSLEQQLSLASMHYMRAHYQEAIDVYKRVLVDNKEYQAINVYLALCFYKLDYYDMSQEVLDVYLSQHGDSTIAINLKACNRFRLFNGRVAEQEIKNIADNGTFGADLLRHNLVVFRNGEGALRVLPGLLNIIPEARLNLAIYYLKQGDVQEAHALMKELQPTSPHEYILKGVVHAALGQQLGSKEHIKTAQQNLHLVGSSATECDTIPGRQSMASAFFLYEQFEEVLVYMNSIRSYFVNDDVFNYNFAQAKCATGYYKEAEELLMQISDMDIKNQHTYCMILAKCHIHCGHPELAWNVFITRDTNAEAFILLQLIANECYKCAEFWVAAKAFDMLEKLDPSPENWEGKRGACAGVLFALCTKAQRGRPGGGISEVIGILRDSSNSQAEAMIKTIRKHINHFK

SEQ ID NO: 40717 - DNA, 3776 bp, DROSOPHILA
gtcaaacttcaggtccatgtcgtattgtgtgatcgaggtgaagttctcaaagttgctacgcttgcaatacctggaagtgggtatgggcgagaacttcagtacctccttgggacagaagtcggtgtccgtcagcgagatcttgtcggagcggaggaaggcacgggcatgctccgagggctggcgagatgaaaacgttgggttaaaagagaatccacttcgggcttatgtacacttacaccagctctagctgcaaactgcaccgtggaacccttctccgggcactcgctctcctcggtggccaggccaaacaccacatcgccattcagagtgtgaggtcgcttggtaaacaccagcggttcataggtcaacttggtgcaggcctaaggaaaattatgcaaatgagtgagaaaatcctgtatccttaagtgaaacaccatgtgttttttttaatgctttttaaaataaacctaaaatctgtcaacttgattttccaattatgaaatatggaatacaatttaatttcctagccggtggttcttcacacagtatgtcccagtaggtcaatagccagctatgctcggcacgagtcaagtgctccttttgggtggcgggtgtgacaccctgtaagtattatgtagttacactgctttcctcaagcgtggaggcaagaaaatgtggggttcagctgttcgctgaagctccaggcgagtggagtgggccacattaccatgacgaaacagcagacaacggagccacaacaactgcagcaacgattagcgaacccacacacatcctgactgtatgattgtatggccctcttccgccccaccgttcgtgcctgcgtgccaccttactacacacacacacacacacgcaacccatcctttcaagcactcaagcagtcgccgcaattgttggcccacattcgtgggttgtttgcgtcccggaatcgagaccgagaaccgagtctggcaaccggactagagtaaagcaggcctggcggtgtaagtagccccgtttgatcaatacgactcggtgggagctcagtagaaggcatccagttacgctactgttcagacgaatttctcctgtcgtaaatttgttttgggaaaaaattacattttcttttattttgtaagaacgctgtaaaaatctggaaaaaagacccagtgctctcgacctattttatttcggtaccgccatcgggagcattcagttgcgttgcttttataaatttatgtttacttgattctcggtcggacaaactgcaaaatgacttcggtaagtgatatataagaagcataatagatatggattcttatgtagccactttacctgcttctccagatcgagtcaaaacgcgtccaatatcgaaagtatttggaacgcgccggagtcatcgatgccttaagcaaggctctgattaagctttacgaagagcagaataagccggaggatgccattcgctttgtacgcaagtttatgtgcgagagctgcccggacgatgcccagtacgatgtaatgaagaacgacctcgaggaggccaagacccacatctcgaaactggagcaggagcttgaacggctacgcggacaaatgtgagtttctaagatcgcgtcttgtctgtccagtcttgatttagattctatttacactcaatagcaaaaagtcaccggaggagtaccaggagctcactactgagggctacaaatcgctcatggatgatgaggagaacgtgagctcactgctgcgcaaatacctgactccggaattgctggaggagtacatgctggtcaccacacctgcgccggtggatgcctacctatacgattgcgccgtctccggattcgagcaccacgacgcgcccgtgggcattttcgcggcagatgctgacagctatgacgtgttcaacaaactctttgatccgatcataaaggactatcatggccagatggacaacgagaacgatgtgctgcagaaagacccagactttggcaacgtggacgagatcgagaacttggatccggagcgcaagtacattctgtccgcacgaatcagattggctcgcaatatcgaaggtctgcccttcttccccaaactgaccgagaagcaattcatagaggtggaggagaaggtgcgttcggccacggagacaatggatggcgagctgattggctcctatctgacaatggcggacatcgatgctgagacccaggcggagatggtcaagagacatatattattccagcgcggcgatgagaagctgaccacagccggctgctatcgtttctggccaactggtcgtggtgtctaccacaatcccgccgagaccttcttgatctgggtgaatcgccaggaccatgtgcacattatgtccatggcacagtgcggcgacttgggcgatgtttacaatcgccttgtcaacggtctaaccgaactggagaagacgttggcctttgcccggcatccgcgttatggaaaccttacggcttgccccaccaatttgggcaccaccctgcgggcttcggtgcacatccgtctgccgctactcagcaaggaccccgatcgtctactcgccctcgccgaggaacagcagctgcaggtacgcggcaccgatggcggcgagctgtccaccgtggaagatggtgtcatggacatatcaaataagaggaagcttggtttcaccgagttcgaactggtcaaaactctgcaggatggcgttgtgaccctgattaacgcagaggaagagctcgaaatatccggacaggagggttagaaacaaatagccaatacttaaaaaccttgtaaagcaattaatatcactataaagtactcacgaacactcacagacgaacacttagagaaacaggagaaacgtatctttggttaaataaatttgtccctagccacagacaatcactcaccttccagtcgtcctcgtcatcctttgaatttcgctgaacctggccggtcagcttgaaccaattggacttggtcgatgccagcacgtccagggtaatgttccatctatgaagtgcatccgcagcatgattttcgttcatgtggtccgtgtgctccaatgtaaggccgatctgcttgcctttcatgtccgacgttttcaaaacgtcttcggcacaaaagttaccttcgatctgaacgaaaattggttttagctttaaatattgttaaatatttaattttatttctcaccctggtgttcttctcgttgtacataagcatggtaaagttgcgatcgtggcccaggtgtatggaacttagctgggtgaagccaaatatgtacatcaaagcattgaccaccatattgccggagaacccactggaagtgaagtgattagctgagtagcaaatcggtttcgaaattcaaaaattacttctccgtgaactcggactttagcagcatccccctgtacttgatgagctcgttgagattggtggtcatgctcagtcggacgcccaaatccgtcattgggtagctaaatagttgaacctgcgagcttgactttattattattcttaattttacccattttcagatgcttaaagtagttaattaaatttagttaatttatttcatatattttggtattatttttctcaacaaaacacttaccacatcgttccgaccctcgggcaccatgatctcttcgaagggcgccgccgctgtcttcgtgatcaaacccctggtcttggtcaccgcccgcgacttgaaggacaggccactggtcaggttttggggtcgggagaaggagtagcgc

SEQ ID NO: 40718 - DNA, 1649 bp, DROSOPHILA
cggtgtaagtagccccgtttgatcaatacgactcggtgggagctcagtagaaggcatccagttacgctactgttcagacgaatttctcctgtcgtaaatttgttttgggaaaaaattacattttcttttattttgtaagaacgctgtaaaaatctggaaaaaagacccagtgctctcgacctattttatttcggtaccgccatcgggagcattcagttgcgttgcttttataaatttatgtttacttgattctcggtcggacaaactgcaaaatgacttcggtgatcgagtcaaaacgcgtccaatatcgaaagtatttggaacgcgccggagtcatcgatgccttaagcaaggctctgattaagctttacgaagagcagaataagccggaggatgccattcgctttgtacgcaagtttatgtgcgagagctgcccggacgatgcccagtacgatgtaatgaagaacgacctcgaggaggccaagacccacatctcgaaactggagcaggagcttgaacggctacgcggacaaatcaaaaagtcaccggaggagtaccaggagctcactactgagggctacaaatcgctcatggatgatgaggagaacgtgagctcactgctgcgcaaatacctgactccggaattgctggaggagtacatgctggtcaccacacctgcgccggtggatgcctacctatacgattgcgccgtctccggattcgagcaccacgacgcgcccgtgggcattttcgcggcagatgctgacagctatgacgtgttcaacaaactctttgatccgatcataaaggactatcatggccagatggacaacgagaacgatgtgctgcagaaagacccagactttggcaacgtggacgagatcgagaacttggatccggagcgcaagtacattctgtccgcacgaatcagattggctcgcaatatcgaaggtctgcccttcttccccaaactgaccgagaagcaattcatagaggtggaggagaaggtgcgttcggccacggagacaatggatggcgagctgattggctcctatctgacaatggcggacatcgatgctgagacccaggcggagatggtcaagagacatatattattccagcgcggcgatgagaagctgaccacagccggctgctatcgtttctggccaactggtcgtggtgtctaccacaatcccgccgagaccttcttgatctgggtgaatcgccaggaccatgtgcacattatgtccatggcacagtgcggcgacttgggcgatgtttacaatcgccttgtcaacggtctaaccgaactggagaagacgttggcctttgcccggcatccgcgttatggaaaccttacggcttgccccaccaatttgggcaccaccctgcgggcttcggtgcacatccgtctgccgctactcagcaaggaccccgatcgtctactcgccctcgccgaggaacagcagctgcaggtacgcggcaccgatggcggcgagctgtccaccgtggaagatggtgtcatggacatatcaaataagaggaagcttggtttcaccgagttcgaactggtcaaaactctgcaggatggcgttgtgaccctgattaacgcagaggaagagctcgaaatatccggacaggagggttag

SEQ ID NO: 40719 - protein, 458 aa, DROSOPHILA
MTSVIESKRVQYRKYLERAGVIDALSKALIKLYEEQNKPEDAIRFVRKFMCESCPDDAQYDVMKNDLEEAKTHISKLEQELERLRGQIKKSPEEYQELTTEGYKSLMDDEENVSSLLRKYLTPELLEEYMLVTTPAPVDAYLYDCAVSGFEHHDAPVGIFAADADSYDVFNKLFDPIIKDYHGQMDNENDVLQKDPDFGNVDEIENLDPERKYILSARIRLARNIEGLPFFPKLTEKQFIEVEEKVRSATETMDGELIGSYLTMADIDAETQAEMVKRHILFQRGDEKLTTAGCYRFWPTGRGVYHNPAETFLIWVNRQDHVHIMSMAQCGDLGDVYNRLVNGLTELEKTLAFARHPRYGNLTACPTNLGTTLRASVHIRLPLLSKDPDRLLALAEEQQLQVRGTDGGELSTVEDGVMDISNKRKLGFTEFELVKTLQDGVVTLINAEEELEISGQEG

SEQ ID NO: 40720 - DNA, 2785 bp, DROSOPHILA
taaagtccgtttccgactttggggaccggcaagtcggctggtttggccgaaactttggagtcctatagcccaactttcgcttcttttccgcctgcaagtgattttcgctcacgtcgtcggactcgtaatgatggttataaaaccggatgccgtatattgcgggctttggctaaattaggtagatttatctttagataaattaatattttgtgttatagatagtgttgatggttagaaactgagacatatctccaaatctccaatactcacagctctcttgcgctcctcatcgtagccatcgtcatccgaatcatcatcctgttcatcattgtccatttcaatgggaatccggtcactggtcaccggcacctggggcacgaattctgaggcacttgctcggagtccattaggggagaccgcggtcggcggagaagcagaagccgaagtcggaggagtaacggctggagtcacctcattgctcatggactctagttccagacataaacgtttgtaggccatcgtggttctttccaagtggttgagatccaatttgccagcgatatgggcaacgttctggaggaattttttactttcatccataaagagcgaagtcacaatcaaattcctttgtggatggcgcaaacattaaaaattttaaacatttaacacaaacttgatttgtttagcattcgatgtttcgattcgatttctgacagaaaatctggaactgtcaaacatatttaaattggttgatgtacaacaatttataaaaaaatattaataacgaactaaaaaacttgtagtatttaatggaattgtccacaattttaaaaatttagctcagtgtgaccatttcggtcgcgacttatcggtcttgtcgataaattagagctgcaaaatttgtaaacagtggacgcctataattaaaaacaatatttaacatcgaaaaaataacgttttcaacgttaatttaaataattaatttaaaatacaattcaacatgccggttagtggatacttgcgcatcaaaggcaaacgagttggcgttgagatattcccagttcttttcacctgctttcgtgaccccctgccaagcataaaaatttccaagggaaaaggcaatcttgtaaattaactatgctttcaggcctaccactcgcagatcaaggaagtgcgccagcaggtgggcaacatggccatcctgccgctgaggacgcaggtgcgcgggccagcgcccagtgcgaatattgagagcgacatcattgatgagtcactgtactacttcaaagccaatgtcttctttcgcacgtacgaaatcaaggtgaggccgtaatccgggattcagaaccattacctggtcacgtgatggtcatattgaatccttatgctacttgctacttgaattcacaaactatgttttaccattttcagtccgacgtggatcgcgtgctcatctatgtgacgctctacataacagagtgcctcaagaagctcaatcgctccacgagcaaggcccagggacagcaggacatgtacagcctggccatctccaagttcgacattcccggcgatgctggcttcccattgaacgccgtctatgccaagccgcaaacggcccaggatgcggatctgatgcgccagtacctgctgcagctgcgccacgaaaccggcaaccgggtactggagaaggtcttcaacaccgaggatggcaagcccaataaatggtggacctgcttcgcgaagaaaaagttcatggagaagagtctggctggacctggacaataaacagctatccacaatatctggtatcttgttttgcttctacgacgggtaaaaatacccttcaattaagttttactcgcagcgtggtcctaatttgcagtatcactgccaacgtgtcacaattaattaaattcattaaccactaaataaattatttgaatttgtaagcctttctgttttaattaatttatgtaaattctttttacaaaattaacgtggataaaactgcaagtaactttcataaataatatctgtttctaataactgaccagcaaatggaagttattgcctataatttgtgtaatcaaaatcggaatagtaaagtattaactaagtttcatttatttgtagtcgctccgtcattggaaaaaatgctttctattggcctgttaattaaataaactttgtcatctgtcgaatacaacgtggaactctttgaatataaataatttatatttattaggccagttgagtaattaaaaaaaatacaactgactttcgcttaagacgaagccacagcaacgatctttaattggaaaatcgttctaaacaaggaattctaggggtacaagcaactttaacgatagagatggtcggcctgcaagttagaggcaatctcggactcccacttgtcgccgttgcagagaagcttctccttgttgtacagcagctcctcgtgcgtctccgtggagaactcgaagttgggtccctcgacgatggcgtccacgggacaggcttcctacgcggggggacaaaaagatgcaattagtttctagtaaattgtggcgccactttgctcctcctcacctgacagaatccgcagtagatgcacttggtcatgtcgatatcgtagcgtgtggtacgtctgctgccatccgcgcgctcctccgcttcgatggtgatcgcctgtgcggggcaaatagcctcgcatagcttgcaagcgatgcagcgctcctctccactgggataacgacgaagggcatgttctccgcggaatcgcggg

SEQ ID NO: 40721 - DNA, 594 bp, DROSOPHILA
atgccggttagtggatacttgcgcatcaaaggcaaacgagttggcgttgagatattcccatttcaggcctaccactcgcagatcaaggaagtgcgccagcaggtgggcaacatggccatcctgccgctgaggacgcaggtgcgcgggccagcgcccagtgcgaatattgagagcgacatcattgatgagtcactgtactacttcaaagccaatgtcttctttcgcacgtacgaaatcaagtccgacgtggatcgcgtgctcatctatgtgacgctctacataacagagtgcctcaagaagctcaatcgctccacgagcaaggcccagggacagcaggacatgtacagcctggccatctccaagttcgacattcccggcgatgctggcttcccattgaacgccgtctatgccaagccgcaaacggcccaggatgcggatctgatgcgccagtacctgctgcagctgcgccacgaaaccggcaaccgggtactggagaaggtcttcaacaccgaggatggcaagcccaataaatggtggacctgcttcgcgaagaaaaagttcatggagaagagtctggctggacctggacaataa

SEQ ID NO: 40722 - protein, 197 aa, DROSOPHILA
MPVSGYLRIKGKRVGVEIFPFQAYHSQIKEVRQQVGNMAILPLRTQVRGPAPSANIESDIIDESLYYFKANVFFRTYEIKSDVDRVLIYVTLYITECLKKLNRSTSKAQGQQDMYSLAISKFDIPGDAGFPLNAVYAKPQTAQDADLMRQYLLQLRHETGNRVLEKVFNTEDGKPNKWWTCFAKKKFMEKSLAGPGQ

SEQ ID NO: 40723 - DNA, 6518 bp, DROSOPHILA
accacgtgggataaatccaggcgagcacgtgcctgcgacaggtgaattatcgcaagaagttgccttacaagaagaataagccaatataagtgttaccttataatttaaggttcttaaataaatcttacaactgtataaaattgcctttaggtatttcataaatgaaacacaagcagactgtgaacaccttaattagtattttttagattagtattcttatagtaagtaaacatatatatgggcaaaattgataaagcaggtttgttgcctaagtcttttgatttctgaccttttgccaaaagttcttcaaacgtgtattccattttgtttccattttgagcacagttttcaaatttaaggtcccgaggccgtacgtgggcctcatcttcttgaccctcaattaatttcgcatcttgtttttctcatcatttacgccgtaggtaaacatttcttttcagaagtatgataatatatgtatctccatatttgccgaaaacttgttttggcagatgaatgtttttaattgtatttctaagtcacccaactggtcgtacaatcacgcccaacacttttgctaattaagctttattctggcgtactttaaatggatttgataaaaatatttgattttaaatttaaaattccagctccttttcgtaagttttcgcccaaaacaaaaataggtataagtgggcaactctgatgcccaatgaaaactaactcgatcggaaacccgaaatgtaatcataaatcagttggatgtgggcgactgaagagcccagcatcgaacatgttccaacgcatttttccctttgcctttttattttatttttcggaaaccaacgcatttctcgggggagttttgaaacccatcatcattacagcaactgcatcgacagaggcagaggccgaggcataggcagcgaagccccatctcatccagaggccctagacgcacgcatctgttcggaccgcatttcattctcggctcgcacgttggcgcaaacggttcattagctggcggatcaattccattcggtcgggtttcgattgggttttgggccaaaagtgcatttcctaacatcggcattggccggacagcagaagcccctgggtctggtcatctgctttgtttttttgcttcatttacctcgagtcgcgtcggttgatgaaattccgcttcttattgttattggtgcgctggcgttgcattcgattggagttcgagtgacgaaagtgccaagagtcgaagacaatcaattagagggtgcattacaatcggcgattcgatgcatcccatgacgatgatgatgcttcacatcgtgattttagcagccacttttacggctgcgcagtgttttcaattgaacagtaagtgtgtattacaatcaatgggaaagatttatgttccgtgttaattttgtttatgagcctattaaaagttctgatagttgttaaataatcagactagcaatatgtaaatggtgtaggaaggcttgtgctaagtagagaacgtaatactcttctcaaatcaacaatttcataaactaataaatgagttctagtatttgagtaactagagttataggggaattatagagcttgtattgaataaatattacaacgtagttaaaaccacaaatcacgtaaaacccatgattaatgcaagttgaataagcgtttttcgtgcttcctttggcaacggggaagttctaagccgacaaattgaaaaccattatgcagttccatttgttcagattgcatgttatgcttgtcaatcgatataactatagaacactttgccaacgctagcattatcccaatatgcacctgatccgcctatttgcgtgttcggctccaaaagttccccgcccgaattcgggctacaaatttgatgacgaagcagtattttgacaaacaattaactcagccaaagtgtctggaatttgccaagagattgaggcactcgaacttgacttgaccagcaaaaaaaaaaaaaaaaaaccaaaggcagtgcgattacaatattgacatatgcttgtttggttgattccatcaatcggaatagagaagaatcggaagaatcttccagcaaatgcaaaacaagttcaagctcgggcaaaggaaactagtttcctttcacttgactgaccagccaatgaacccggactgcagttctagcgaaaaaaggacctgcccagttcagaaacttgtttcccacttaatgagccgatttatccgactgattcaccatattgtttcttgatctgctccgttcccttccactttgcagtgacgcagttctatgagatgcctcctctatacgacttggatgactatgatcgttgcctccaggaattgaatggccaggcgtccacttactgcttcgtccgcgcggaagtccagcccgatgagtctgtagcggcatggcgggcaattgcagagatttcgcagtacgatcgccatcacttcgatcaccgacagctctatttcggtctctgcctgcgcgaatgtgaggcgtctctggccgggttgaataaaagcgaactggaggccctgcaagccggcctgctatcggaaaatgcaaaggtaaggccacacggaggtgtcacctcattggtagcgattcagctgcggctaacgatcgatttaattcaatcttcgaattcgctgctgggcagatacagatacaaatacacatatttcaaaacccatccgcttgccgaggcgtcggccgtaatggtcaatcaacaatcatcggacacagaagccgggataacaacgccaaagtttattcaactcgagctccccgtgagctgcacattatgtgggcagtggcgcagtaaagggggttttagttcacatatttgtcattggcatatacaaaggtttatatctgcttgctataaagagctatcatgttttaacttcttaaatattcgagtatgtttttaaacaggtttatcgttttttgaaagtggccaatttcaagggtccctctcacaacgaacataaaatgaatcccatttcaaagatcccccttgcagacgcctctggctaaatgcgtgatctgtatcttcattacctataaatattgcataaattacagccggaaaatccgctgattaaacatcggatagcggggcaatgggtgctgccagcagatgggagatggggatggggaatggtgtggcgatgccattgatgcagtcgccatcaaaatgcatttacgatggctgattaaacaaagcgcttatattggcttaggcgttggctaaaaatggaaatgggcggtcagacagcgaaattcgatccaattccatcaaatcaaatcgaactcatttctttcaaggccaagggcctgacgttgacattttggtattttaatgatcgcaacatggtcaatgcaatattcggcaggtgaacgtatatctggacttgttctcgatggaagccaataaccgccaacggcaccagcgcttgacaaatgcctgcctgaactggcgtctgcagcgtcgtggattcggggtgctggccaagagcgtggtggagtactgcgatgaggcgggacatcaagtggaagatggtgagtcacagattatatcatcgtgtaaataatgtttctttgcattagcatccaaaaagtgttatgcatttaatggcgatgaggtaatactaacgaccgataaaataaatattccttctcggctttagatgcgtggaacctgaccttctacggaatcttgggcactctactggttctggcttgtctgggtagcttagtggatctgcatctaaagcgaagccgtcatgataaaatgctcaaggagcgagatcactacaagacaccgcccaagagcactgcccaacaggtgctgctcaccttttcggtggcccgcaattggtaccgacttaatcaggagccaagtggtaagatcggtcgcgagctgagatttctcgactgcttcaagttctttgccatgttcatggtgatatttgcgcacaccaactgggtgatttacgagagcgccatcagcaatccgcaggatccggagcgactgcttcacacggcagctggcactttactcgtttcgggatcattgatcactgtgaccttttttgtgatcagtggtttgttgcttaccattaactggctggccgtttcacgttcgctagaatctaaaaaggacacctggagcttcggccagtatgctttgctatttgtcaagtttaacatcttccgatacatccgactgacggttccatatgcctttgtattgctcatgagtggcgtttactttgagaacgctggaggtccactgtggcggcacatctttgagcgggagcagttggcttgtcgacgcaactggtggaccaatctgctctacgtcaacaactttgtacgcacggatgagcgggtaagtaatgagtgctttatctaatttatcatctaatccactcaaaattccattcgggatgcagtgcctgctccaaggttggtatttggcagcggatactcattcctttgtgctcagcttggtgctgctgatgctgggtcaccggttcgtcagatggagcaaacagctctatgcgggcattttgggtctttttgtggtggtgccaatggtgctcacatatgccatgaactactatcccatttttgtacccacgccacagtaagtgatcggacttaaaaactttactacttgattacaatcattctacccatctaccaaacagaacccagaaggattcctttatcggagatcgtcaattcaccgaattctacacgtcgtcctttatgaacttcggtagctatttctgtggagtcctggccgctttggtttacgatcagttggcattgaagcaatacaaactacgggagttaaagagcttccagcttctttggtttacacttattccagtggggattctatggctgtttagtgctcatcccatcttccagcactactacgtgacgccgtcggccatttggggagcattatatgccggcctgcagcgaaacatctggggcttcgggctgggaatcttcatcgtgggcatggccagcaaagtgggatgtaagtatcaactgcgagatatgcttggtatatccttggcaaatcttactgttctttcacagggattttccgtaagttctgctgcttgcccattttccgcattttgggacgcctcacttatggagcctttatcgtccaccttcttgtggcgagaatcgtcttggccacagtgcgggagcccatttattttggcacgggcatgatggtgagctcacttctggcattcaataggaattggattttatgtaactcaaattgttctcatcttatctacagtttgctttcatcttttttacggtgaccgtgtcctatctctgctccttcttgctggccatctttctggagcttcccgtctcctccttcctcaagcttatgaggtagcccaatgtcctaacttaaagattacttataactagaataaaagacataacttaattaaatccgtcaccaaaaaatttcacttaccctgcgccaatctggctggaaacgtcttcatcgagattgcagcttcctttgagctcaaggaagtaacgcagaacagcattgctggcgtcctcgtttaggaccggatttaattcctggcgagcataggacaagaacttcttaatcagtatgggtgggagcaggtccaagtccccctcctccggaagtacctccagacgtttgtcaagatcataatcctgctgcataatgctgtcattatcgtcctccgttttgattgtgtcatcatcttttcccgctgccggcacattaaggctgacctcgcacatggagtcgctcattttgggcttaagagcatagcgggctgcaattctcgctcgtttcctagcgcccgcatggagagcccttacgtgggcagtcagcgacatatctctctccgagggcttgtccaataatatgtaaaccaaatggaactcccgcagcaaagagggtgaaatattaatattctgtagaaggtagcgcccctcatcgtattgtcctctttgtggatttgcgcacgctatcaccgaaggttgcgccgggaatgaggcaaatgctcctgcaagtggaagatttacttcctctgattgtaggcactgcaacagtacggcctgcttggaggcaagtttatccacatcatcgagggtgcagtgaccgcctccactggccatcatcaaggaacccgcttgtagcacacgcttgttacgcccagcaaacgtaacacccagttgctgtgcggattgagccccacgttttccactcacgtgggcaccacgttcagcgatctgagcacaactttgcagaatcttggtctttccaattccgggatcacccaccaggagcacgttgatggcttcagtctccgcacctttcccgccgagaagggatagtaaacaggcggctttgggtagctcatgtccgtatacctccggggcaatggattgcaccagtagctta

SEQ ID NO: 40724 - DNA, 2581 bp, DROSOPHILA
cgcaaacggttcattagctggcggatcaattccattcggtcgggtttcgattgggttttgggccaaaagtgcatttcctaacatcggcattggccggacagcagaagcccctgggtctggtcatctgctttgtttttttgcttcatttacctcgagtcgcgtcggttgatgaaattccgcttcttattgttattggtgcgctggcgttgcattcgattggagttcgagtgacgaaagtgccaagagtcgaagacaatcaattagagggtgcattacaatcggcgattcgatgcatcccatgacgatgatgatgcttcacatcgtgattttagcagccacttttacggctgcgcagtgttttcaattgaacaatgcctcctctatacgacttggatgactatgatcgttgcctccaggaattgaatggccaggcgtccacttactgcttcgtccgcgcggaagtccagcccgatgagtctgtagcggcatggcgggcaattgcagagatttcgcagtacgatcgccatcacttcgatcaccgacagctctatttcggtctctgcctgcgcgaatgtgaggcgtctctggccgggttgaataaaagcgaactggaggccctgcaagccggcctgctatcggaaaatgcaaaggtaaggccacacggaggtgtcacctcattggtagcgattcagctgcggctaacgatcgatttaattcaatcttcgaattcgctgctgggcagatacagatacaaatacacatatttcaaaacccatccgcttgccgaggcgtcggccgtaatggtcaatcaacaatcatcggacacagaagccgggataacaacgccaaagtttattcaactcgagctccccgtgaacgtatatctggacttgttctcgatggaagccaataaccgccaacggcaccagcgcttgacaaatgcctgcctgaactggcgtctgcagcgtcgtggattcggggtgctggccaagagcgtggtggagtactgcgatgaggcgggacatcaagtggaagatgatgcgtggaacctgaccttctacggaatcttgggcactctactggttctggcttgtctgggtagcttagtggatctgcatctaaagcgaagccgtcatgataaaatgctcaaggagcgagatcactacaagacaccgcccaagagcactgcccaacaggtgctgctcaccttttcggtggcccgcaattggtaccgacttaatcaggagccaagtggtaagatcggtcgcgagctgagatttctcgactgcttcaagttctttgccatgttcatggtgatatttgcgcacaccaactgggtgatttacgagagcgccatcagcaatccgcaggatccggagcgactgcttcacacggcagctggcactttactcgtttcgggatcattgatcactgtgaccttttttgtgatcagtggtttgttgcttaccattaactggctggccgtttcacgttcgctagaatctaaaaaggacacctggagcttcggccagtatgctttgctatttgtcaagtttaacatcttccgatacatccgactgacggttccatatgcctttgtattgctcatgagtggcgtttactttgagaacgctggaggtccactgtggcggcacatctttgagcgggagcagttggcttgtcgacgcaactggtggaccaatctgctctacgtcaacaactttgtacgcacggatgagcggtgcctgctccaaggttggtatttggcagcggatactcattcctttgtgctcagcttggtgctgctgatgctgggtcaccggttcgtcagatggagcaaacagctctatgcgggcattttgggtctttttgtggtggtgccaatggtgctcacatatgccatgaactactatcccatttttgtacccacgccacaaacccagaaggattcctttatcggagatcgtcaattcaccgaattctacacgtcgtcctttatgaacttcggtagctatttctgtggagtcctggccgctttggtttacgatcagttggcattgaagcaatacaaactacgggagttaaagagcttccagcttctttggtttacacttattccagtggggattctatggctgtttagtgctcatcccatcttccagcactactacgtgacgccgtcggccatttggggagcattatatgccggcctgcagcgaaacatctggggcttcgggctgggaatcttcatcgtgggcatggccagcaaagtgggatggattttccgtaagttctgctgcttgcccattttccgcattttgggacgcctcacttatggagcctttatcgtccaccttcttgtggcgagaatcgtcttggccacagtgcgggagcccatttattttggcacgggcatgatgtttgctttcatcttttttacggtgaccgtgtcctatctctgctccttcttgctggccatctttctggagcttcccgtctcctccttcctcaagcttatgaggtagcccaatgtcctaacttaaagattacttataactagaataaaagacataacttaatt

SEQ ID NO: 40725 - protein, 717 aa, DROSOPHILA
MPPLYDLDDYDRCLQELNGQASTYCFVRAEVQPDESVAAWRAIAEISQYDRHHFDHRQLYFGLCLRECEASLAGLNKSELEALQAGLLSENAKVRPHGGVTSLVAIQLRLTIDLIQSSNSLLGRYRYKYTYFKTHPLAEASAVMVNQQSSDTEAGITTPKFIQLELPVNVYLDLFSMEANNRQRHQRLTNACLNWRLQRRGFGVLAKSVVEYCDEAGHQVEDDAWNLTFYGILGTLLVLACLGSLVDLHLKRSRHDKMLKERDHYKTPPKSTAQQVLLTFSVARNWYRLNQEPSGKIGRELRFLDCFKFFAMFMVIFAHTNWVIYESAISNPQDPERLLHTAAGTLLVSGSLITVTFFVISGLLLTINWLAVSRSLESKKDTWSFGQYALLFVKFNIFRYIRLTVPYAFVLLMSGVYFENAGGPLWRHIFEREQLACRRNWWTNLLYVNNFVRTDERCLLQGWYLAADTHSFVLSLVLLMLGHRFVRWSKQLYAGILGLFVVVPMVLTYAMNYYPIFVPTPQTQKDSFIGDRQFTEFYTSSFMNFGSYFCGVLAALVYDQLALKQYKLRELKSFQLLWFTLIPVGILWLFSAHPIFQHYYVTPSAIWGALYAGLQRNIWGFGLGIFIVGMASKVGWIFRKFCCLPIFRILGRLTYGAFIVHLLVARIVLATVREPIYFGTGMMFAFIFFTVTVSYLCSFLLAIFLELPVSSFLKLMR

SEQ ID NO: 40726 - DNA, 3875 bp, DROSOPHILA
tttgacccaatttatttgagagttctttttactttctattttccccgcgaacggcttaagaatataacgcgttgtgggacgaacgattttatggacctcttgttaggcttttgatttggggaagtcgatttactttcatttgaggaaatctttttcgggtttgtcgaacattttttgatttatgggcgttcccgaacacttccgttgtgatattggttgaaaagaaaataggtttaatcgtttcggataggaaatttcaccttacagcacgagtaaaagtagccaattaatcggctttacacacagcttttaagttctgttcacatggtatacaccgtttcagcacacagaattaacctttattaatcccacaagcaaatgtggtcagcactctttgatgacttgtaattacgaagcgatcagaaaaagattttttcaccacacatgcggtttaacctttaatgttctcatcgacctttagttggattcgaatttaattatactcctttctgggtcgtgcaaatgtaaagcccgattggcaatttctctgaaacaaaaaatgttttatttgcgaaactagaacaaaagttataaatctcttatgcgatatcaatccagaaattagatttataacccaaagctgcgggaattttttctatttcggacaaaaagaaagcggatctgactattaacataaaatttttataaagacaaaacatggaatcgcttcgtagacatcaaagttctgcggtggtaaaatgttaaaattatatttgccagatttattgacaaatgggttcggatctactttgtggaactaggtcgagtgatgataaagggctttcgattgaagatttggaatatgcaaagaaattttgctgataaaatagtttgatggacagcctaagagcttcattaagttgttaatgtttttcgcatatacttttaagtatttgaatattaagatggatctgttgagctgtgctataagaaccgttaaatggctagggcagcccatcagtttgtgtttgctaagcgattcggtcggttcgccgggaatatgaaactcaatccgccagcttttctactccttcttgctcttatttcgatctgcgatcgaagctgggccgtctataattataagccaccttcccgcggttatttctatccgaagccagagcgtttgccacctctgccagtcaatggatctacgacttccagtaccggcccaccgcccggagttcaatcggatttcattgatgatctgattgagggccataagcagcaaatcttatcgaatgtcttgggcgtggccagtgaaactccctcggatacagcctcctcactcggatcgacatccttatcctcgtcagcctccccggtctttcccctcgaaggcggtggtgccaaggcgtttcgcgttaatcgctgtgccagctgcagtgagttggggaaattgtagtgccaatcgaaaccagccagggaatgaaacgatcccggctaatctccgggtaataattgggaatttgaatcggttattgtacgcctatcggaaaacgcaatgcatccaaacgtgtttgtgaaacgtgctgtgagcatagtgaacgactttatttctttacgcttttgtgtaatcatatagtccaaatcaatgaaacagttgccatacggttaagcattcattagtaatggcgctttacaacattttaaactgccaaaactgtcattaaattacaattaattaagtgcttagccaataaaaaaaaaaaaatttgcagacaaatttttcataaaatgttaaattgctaatttaaaaaataaatacaataagtaatcaaatgtaattaaaaaattaatttaaattaattggcgcacaaaacttttctaatgctatctcatatttttgtgaattcgttactatcgcttatctaaagaaaccaaacattttcgagttcaactattaaggttgcttaacttccggtcatcctacgttttcactccctggctaagagagtctgccacccaagaccacatcgaatccaaatttcaatcctcttacagcctgcggcgttccgaatgtgaatcgcattgtgggcggcacccaagtgcggacgaataaatatccgtggattgcacagatcattcgcggtaccttcctgttctgcggcggaactttgatcaacgatcgctatgtcctgactgccgcccactgtgtccacggcatggacatgaggggcgtgtccgttagactattgcagctggacaggagctccacccacctgggagtcacccggtcggtggccttcgcccatgcccacgtgggctacgatccggtgagcctggtccatgatatagccctcctgcgattggatcaacccattccgctggtggacaccatgcgcccagcctgtttgcccagcaactggctgcagaacttcgacttccagaaggccattgtggcgggatggggcttgagtcaggagggtggctccacctccagtgtcctgcaggaggtggtggtgcccatcatcaccaatgcccagtgccgggccacttcgtacaggtccatgatcgtggacaccatgatgtgtgccggttatgtaaaaaccggagggcgggatgcttgtcaggtgggtttaaagctacttggaacattctttaaaggttacatttgaccactctctatgaaccacctttccagggcgatagcggtggtcccttgatcgtcagggatcgcattttccgtttggctggagttgtgtcctttggctacggatgtgccaagccagatgctcctggtgtctatactcgagtgtctcgctatttggaatggatagcagttaatacgagggactcttgttactgcataaactaatccgtttaaaataataataaatcgtgtaaacattatttatttgactaaccctaaatatgatttttaattgaagcctaattaaagttaatatttaatttctttattgaaatgcatattttcgtagaagtatttgggagggctgactttgaacttaaagatagttctttactaatttgttgtgcaattacacaataactttcctttacacattgaataaaggagtaattgatttcgattgattaaatatatatatcttcccatcggaagtggagtaactttttgctattcagcagcaacccacggtcacataaaaatccagttctctttctcgatcgtggggtagggtttatttatttcgtttggggaattggaccgcgtgtgtcccacgcaactccctcaatcgacatctgattttactttcttaatgcaaaagaaataaaaattgtacaaatattttgtggaaacaggttatggaaaccctagcagtggcctttcactttttgccccgcgactgcttgcagaaatcaataaaactcgaacgcgaactcggagttgaagttgaagtttgctgagcgaaaatcgaatcgaagccaaggacgttttccgtcgacatcgcctgacacattgttatcacttgtcaaggctccacaaccgtcctgcgaatcgcggagttgacaaaacctttatctttatcccttttggccgggcaggccgacttgtggccgacagttgtttaatggattttcaagttatttctggtattttgttgtagttgccgctgcatgtcgcagaaatacggcaaaacaaagatatctctccgcggaaagaaactcgtttgtggctaggggccaaagaaaatgccgcataattgccgccaccacgacttgaaaacaaaaagggggcggggcacccagaaggggcggcggtggcaggctagccaccgaatcgacaatcttgtcaatgctggctgccctggcatttgattttatttttaactaga

SEQ ID NO: 40727 - DNA, 1236 bp, DROSOPHILA
atggctagggcagcccatcagtttgtgtttgctaagcgattcggtcggttcgccgggaatatgaaactcaatccgccagcttttctactccttcttgctcttatttcgatctgcgatcgaagctgggccgtctataattataagccaccttcccgcggttatttctatccgaagccagagcgtttgccacctctgccagtcaatggatctacgacttccagtaccggcccaccgcccggagttcaatcggatttcattgatgatctgattgagggccataagcagcaaatcttatcgaatgtcttgggcgtggccagtgaaactccctcggatacagcctcctcactcggatcgacatccttatcctcgtcagcctccccggtctttcccctcgaaggcggtggtgccaaggcgtttcgcgttaatcgctgtgccagctgcaagagtctgccacccaagaccacatcgaatccaaatttcaatcctcttacagcctgcggcgttccgaatgtgaatcgcattgtgggcggcacccaagtgcggacgaataaatatccgtggattgcacagatcattcgcggtaccttcctgttctgcggcggaactttgatcaacgatcgctatgtcctgactgccgcccactgtgtccacggcatggacatgaggggcgtgtccgttagactattgcagctggacaggagctccacccacctgggagtcacccggtcggtggccttcgcccatgcccacgtgggctacgatccggtgagcctggtccatgatatagccctcctgcgattggatcaacccattccgctggtggacaccatgcgcccagcctgtttgcccagcaactggctgcagaacttcgacttccagaaggccattgtggcgggatggggcttgagtcaggagggtggctccacctccagtgtcctgcaggaggtggtggtgcccatcatcaccaatgcccagtgccgggccacttcgtacaggtccatgatcgtggacaccatgatgtgtgccggttatgtaaaaaccggagggcgggatgcttgtcagggcgatagcggtggtcccttgatcgtcagggatcgcattttccgtttggctggagttgtgtcctttggctacggatgtgccaagccagatgctcctggtgtctatactcgagtgtctcgctatttggaatggatagcagttaatacgagggactcttgttactgcataaactaa

SEQ ID NO: 40728 - protein, 411 aa, DROSOPHILA
MARAAHQFVFAKRFGRFAGNMKLNPPAFLLLLALISICDRSWAVYNYKPPSRGYFYPKPERLPPLPVNGSTTSSTGPPPGVQSDFIDDLIEGHKQQILSNVLGVASETPSDTASSLGSTSLSSSASPVFPLEGGGAKAFRVNRCASCKSLPPKTTSNPNFNPLTACGVPNVNRIVGGTQVRTNKYPWIAQIIRGTFLFCGGTLINDRYVLTAAHCVHGMDMRGVSVRLLQLDRSSTHLGVTRSVAFAHAHVGYDPVSLVHDIALLRLDQPIPLVDTMRPACLPSNWLQNFDFQKAIVAGWGLSQEGGSTSSVLQEVVVPIITNAQCRATSYRSMIVDTMMCAGYVKTGGRDACQGDSGGPLIVRDRIFRLAGVVSFGYGCAKPDAPGVYTRVSRYLEWIAVNTRDSCYCIN

SEQ ID NO: 40729 - DNA, 21808 bp, DROSOPHILA
gaaccacgcgaaatcggcagattccacctgtggcgaggattacggtggtggctggtggtttgatcgctgcacacagtgcaatctgaatggagaacatggtgtccaccagagagcaagtccagccattatctggatgaactggcggaccgggaccgataaaccgaagagctcgcggatgatgattcgacccgtaaatcccactccgggcgataactctgatggggattaggcggcggagaactgggaaatttaaatagcaattccaatcaaatgttgcacgtatttctgcaattgaacgttaccgatagttggcactgcaaataaacgttaccgataggaatcgaatttactggcactttctaaataattctgtgtttattcctgatttaagctgtttccattattatgaaaattggaaggtattttcgtatcataggatttccttaatttgtctaaaatttgaggaaagcaggaatttatcgagtattatcgaatgaatgtgagtgaaagcaagaaaagtcgcgagctaagcattatggggcgccaaatttatgaatttcaatgattaaaatgaaatatgtttaaaatgatcttggggcaactgtttacaaaatttattgagtcattattataattattaagataacgtttcttcgacaagaattgcacacaatttactcaagtttacaatgtagttaccacacaatggcaaagttttgcttttggccacaaaataaccttgcacgaagctagttataacccagcgaccttagattattaataaaatttaccctaagattataataatttcattaaaaactgcaatcaaagtttccctttttgttcgcattggcgctcaatgtggccgcagaaaaataccgcaaaacgacagtaataaaaaaaagtactaaaatgtacacatatgactaaaaccaacggccagtcgtcgataaattttcaaatcgttcggttgcgggcggatgattcttgattgttttagtcctaacaacattgccgctcggacgcattgcggcattttattgattcgcgataatccttgtgataatcaataattaagcatagagtcagcggataaattaaaccaataaagcacatatcctatgtgccgttattggccgacgactgtaattgtttttgcgcgggtgtaaagtgcacgtgtgtgtgtgtgtcaaggattacggcaaaattgtaactgtttgtcgtgggcatgtgtgtgtgcgtgggagtttgatggaaaccgtaaagttataaacaaaagccgagttccacgaaaggtgagaaatcgaaagcgctgattcgcggcacttgccgcaatcaatatagaaaccaccctccaaatagcgtctgtttactatgtcaaaaaaaaagaggatggagaaaaccggatttctcagcctcgaacaaaggaaattgggtgtttttctgggctcggggatccaaattaagttatccgtctagaccgattctgcactcgattcgcaatgcgattggttataaataaaaccagcgcaggaatcggagcagacaaagtgctacaaacttgctgtcgccagaggaggggaataatggacaggcgccttgtcttgtctttaatttatgcagctcatctttatttagcccagctcgattcccattcattgagaatagtttcatcttttaccatataccatacccatttattataacatacctcatatctttaaacccgtttaggcatctcgttttggtttcatttctgcttttgttgtgccatgcaattcgcttttatttgtgctcgccgagtggctggcattgtataattcaatttaaattgattttttcattgttgcggcgtccgtttcactttttctcgcccaacggccgcttgccatcctgctctttctatccccatccccttccccacatttgagccccccccccccttccttcttatcccatcttctggatatttggggtcccctgtttgctgtttgtctctacaattggattttcgcacgcctgttatttctacaacagctttgtggtaattagaagccattggtctcagtcgctttcaattcacgtatgtatgtttacttttactttaatttgttagtttcgtgttaattatttgattaaacgtgagcacttaatagtacttttcaggctttgattaagttatcatttgttgcggctgaaaaatgatattgttagcagctaaaaaaataccatcgtgatgcgcttaatctattataatattattaccatttgttctaagagcaataacaatggatttagaaaatcacataagaaacgattttccgctttcgaattcgtactctaattgcaatttattcttctctccactttaatggccctagtcaattcttaggaagaaacattactttttgccgacaggtagtaaatccattttgggtgagattttatttctttgcgtgtcgcgtcgaatttagttatccacactaacttttcgattagaatcagacttcggcagcaacataaaagtggaattccagaaccgaggttctcaagttgattcgccttcgattgtttttgctaatttgcaacttttggacattagctcgtatttatcgcctcatttgcatggacatcccatttcactggcaggcaatagttgcagttggcgaaaattttcccataatcataacaatcgatcgatcatcaaatgtaatgaccgaaaattgttagcccctcttcggcgtcgctggtcaagtggccaggttgctcatggagctgaaaggatttggtgtgggccggaatattagatgcctggcaggcaggttcattgacttccccatggtgctctagacgaccggggatgatgatgatgatgatgacgttgacggaaccgcaacagttactgcaccaacaaaagcagcacataacccgacaaaaacagcaatagcagcaacaaacccagtggcacttgcactcaacagctggcaaaaaaaaggaaatcaaataccaaccacaaaaaattaaaccaacaaaaagtccggaagaagagccaggttctggggtgttttgaaactttgaatactcttgcagagttttcccaaacatttttaaattgttgacataatgtgcatacttagataagatacttagagttattagaatatctaacttacaaataactattagtttattttgcaattaaagtccccagaacctagattacttgtattaaaaatgtttaagaatcatcaactagattgcataacaaactagtttagcattttaaaaccggttttaaggtgcaactacaaatgcgttccatttctacaccatctgatgagtaatttattattaaattatttcgctgaaggaatgtttgtacatatacaatgaaaaattcttaatatcccacttttgaagtgtatgatccaaaacaaaccgaaacggtggctaaacgaaataaaacgagatttcaatgcaggaatttccattacaaatgttgcggttgttaatgttattgttgctgccactgaagtctggttttgtcaaccgtcgttgggggccattggggcgctatgcagcgaacggaggattggggtcttgaaacgggaaaacaacactgcactctcgacggcaactggcaatttgacaaacgttgcacgcacttggccggaatggggcttccattggaggtgcctcagcgtcgttgttgcacgtttaggccgagtgcaaaactcaaatgtcgctttggcttcgagtactgccaacaaggcggtaggatgcaattgacccgaaaaccgaacactgcaaagccaagtggacaagtcgggggaaaggagccaccatcaccaccatggccaccactgcagggcgcaaaaactcgttcgagttgatttggcatctttgtattcatcttgtggttcaatgagtcaggcccagcagtctggtccggattttcgatgcttgacaacgttccgcctttcacccggccacttctttccgctcgaaaccaggagagggcctcctcatccttcgagtccgaatctctgccctcaatcgctcgggtgccagatggccatttggcaggccgtaaatgcaaaagggattggccaggggatgggggacacaataaatgggtccgggtggttcacaaagcagatgttctgatccattcagaattaaacttttatgcggagaggtgctgcaacaaagttatcaatatacacagcgaattaaaactttgcagacggctttctgcagtttaatctgtatgaatgaaaacgaatcatttatcagcagagtaataataggtgcttggtatttcaatatcaaagattcccataaaattcgtcctttgataccttgttattgctatgcttattgattgaaataaatcagttttgatggtcctttcgaaaagaaatacttagaaaatagttcttcatacttttttgggatacatgaacttaaaaccatagaaatttcttgcagataatatagcgttataagttatacataagtaatatgaaaataagttatttgtcatacagcattatggttggtaaatgattatctatagtgcctgccagactttgatcttaattcaagaacactggtcccgccccatcatcagtcgtgcccatcctgctaatgccttcacttgcacttgctccgtggccgtcatcataattatcatcatcgcctttgtggcccatcttcgttgtcgtttgtcggtcgtcggcgttgtctcatttgcgtgggcttatactcagcaacaaacagcaaaacaacaaacagaggactgagcactgaagacaacaactttttcaagggcctgtgccaattctcgattgctctctttccgtctctgttttgttcggcattccacggtcttggtgttgccttttatggctgctttacttggcaatcgataaacaacgaccttccgccccacaacaccccccatttttttccaactaaaatggctggaagttactgggattacttggaggagcattctccagtgttctggtcggactcctttgtcttgtcccgtttaggagagcttattcgccacttgaagctgccagccaagtcagccactcgagctgcactctcctcacttcttcccactttatccatcccacccatcctccaacactcatcatccatcagggaggtggcctcctggctttatcctgcgtctgctcccgctccttctgccacttgtttccaggcatttttcaaagttaattgctcgctggcagtcggctgagaaaaagtgctgaaagtgctgaaagtccgtcgaggattagtactctccagagggtaaacaaaagccatactccaagatttgtaactgaaactattgacattcattagctccccatgcggaaactttcaaattaccaaaaaaacagtcgagattccataactcgagcttagtattcttagtattagtattagtattgccttttaaatcatttaatcgacgttcttatgcgttacaagtaaggattaagcgaacgaagtgctctttaattttctgatcccgattctggacaggaaaaggcaccttaaatgagttcgcagaccaatgccaaagtaaagatttccacgttgtggctgtaacggaaccaaaatgggttcgccaatagccaaagacgttcaagaactttacaacaaataaagaaaaatattatgtatgtacaaactaaaatctcataaaagatagtggaaatgaacagcacaaatgaatttttaaggagctgtgaaagtagttgaaaggaatacctcaaaaaagcaaagatagcagtgaagtatctcacattctaaacacaatattgtaatagatgcaatatagatttaatcatgcagtagctcagaatcttagacatctaaatgaccctagaaatgctacttaaacatttttcttacaagtcatcacattttccatgccgtctgggtttctttttcaaataatcgcaagaagcaacagaaataattaataagtacagctgtcaacacttgagtaaaaagcaacaacccaaagcaattccttcctctgacaaacaggagaaaccgtagggaatcccagttgatgcttcccacctcaaccagttgtaaaacaaaagtaattccagctgctgctccaagtcgagatgagaaaaaggggcgatttggcgaacaccttcgcactccaaggggcttgcagggggatgacctggtgcaggggtggtggatcattccaggctgtgactacatggcgctgatgttgacggcgccgacaaagcaaatactaaagcccaaactggccaacagaaaagaaccagcaacaacttggccgaatagatcgcagctgccgcgtactagcgatgctccttctggctaaaataattctttaaatccttaactaaaaatatttcatctgttataattcaaacagatggttcaacattctgctttatcggaatctaaaaaaaaaattcaactatacagatgccttagaactttataatatggtttatttataaagtttattgtgtttacttaaagtttgctttcttatcaacgagcactttgcttaatcgacacattttttggtttccccaaataggaaatgaaatagaaagtcaagcccgacaaatgtatagtcttgagaaatagctttatggcaataccattatatttttgaacattgtaaaactcggtatgtatgtacatatgtgaaaaaagagaaaacaagggattatttcttatcttttcaatcattatatgtcagacttttttggtggtccaatgttcccttagacagattgagtatattatatatactatatatgatattacattatgttatattattatattatgtatactatatatgataatatattatattatattatatatactatatatgatattatattatattatgttatattatattatattatattatgttatattatattatattatattatattatgttatattatattatattatattatgttatattatattatgttatattatattatattatattatattatattatattatattatattattatattatacatgttttttatgtccaagtggacagcactggtgaagggaccaccactcgtgggcgggagggcggcgtgtggctggtgctgctgctgcaattgccggctgctaacgagccgaggtgacccgaacacaacccgagttccggcgtcgaggagagcctgccacgattcctgaggctcctcgtttcgcggctcagttgctttcggtcgctggcagtgggtgcgtcgctggtctcctgcagagacagctgttccatttgatccttttcttgtcggcaaggacaacgcgagtggaaaaatacaaataaattgagagggaagactggaggatgggcgattgttacagcaaatcagagtgaaaggtcaacaatggctttgtagctttgtctctaattacgagtattccattcggagccaataaaggttttaatccgacgtgcattcatttaaattaagcgagaaaaacgtggcaactttccgcatcctttttcttgctgcattgtgtgagacaaggaaaaacttttagcccagcgttttgcgagtgtccgtttggtggtgtgtggttgtgtctgtgtctgtgtgcaggcgctgatttatgtgttttgtccttgttccgcgccaggacgaaaggactttttgccatcccgtttcgtgtgtaagttggtaatgtaagtttatgtaatagacatgtaaattgcagtttattttaaggtctaacaatgagaaatgttgggacgcgattgctaaatgggtttctttgcggtttcctaggtgattcatgctgccaagtttaaatagttttgcatttatgctttattaataggagacgttgtcatttgtgatacataaatacattagaagtaggaagtgtacattttattgcaaaaaaactagtcactaagcatttcattttggatttccttgcaattttttcttttcctctacaaagctcgtaataaatttcatattaatttaaagccacacatcttaatcagcatttctttgtaatgcatatttttcacatcgcattgaatatcttcatcattccagggccaggaactaagagttgatgcctcaagtttcaggtttctgccacaagctgctggtgatcattcccctttcaatttcccgacagcttgtcactgcagacagctggtgtatcgatttccatgataagtgtattttcccgctttcgtgccactaaaattagccgaatcaaacgcgaccccccacaaagacaagagtcggatggaagtacgacttcgactataactccatgcggttattatttatttccattagttcatacttaaatttaccccatccacattggttggcggatggcgtgccggtgctgtcaattttccggtggcaggtttttggttattgcgatgtcatgtcatcatgcaatcgtatcgctttaccgcataaaccgactcgcacaatgtaatcattcgatttcgatcctctatccgcccgacatgtagatctgcctggaacatcgtatatacatattatatatatacatattagtacaaggctaatgatgcgtgaagaaaaaaaaacaagcggggagttcgccatgaattggccaaaacgtatgggacacgtcgctgatggatgttccggatggatgttccattaatatcggagtaatcccagttagccacggctcgctgttggccatgtgtcattcggtttgggccacagttacacttggttggcgggcacgaaagcagctgtagtaataagcttgtgttctagcgttttgctaaatagtgcagaacccgctctgggtttaaatggtcatctttgaccactcatcggtggatattgaaattggttttttttctaaacagtcaccatggaattcgtttggaaatcgattggcggaaggcaacaattgatacgtgagtgaaaatgaagccatagaattttcataaaatgtcaaagcttaacttggcaaacaaaacaatagattctagcagtttattttcaaccatttaacaatgaataattcataaaagcggtttcaatttacaaattgctagcagccattaattcaaacaccatttaattggcactggcaattatgaaatcaaagcccaaatagtaaaggaaccataatttatgttgttttttatgtgagctaattaaaaataatacaagctgaaattttttacatcgaagcaaaattgtttattagaaaaaaggaaatgcaattccgattgcgaatttgtagttgtcatagacatcgcgtttaatgtaaattatttatttatttcataatgagcacatcatcaatgatgttgaaatatataagaattaagagagcaaaggcttattattaaataccaaaacggtctgtggctttaaacttcctaattcttcgtaatttaaaggaaatccgctttgtaggtctcattaccttcaagctcgcaattagttaacactttaaagcaacagtgagttagaacttttatttcgttaggtaaacagaaatgagacaatagacccacttcacattagtctagtatctgtgatctttggggagcgaatggtgtcaaaccgcttgagcgggggcttccaattcactcaaagttcccaccatatgaggacctaagtcatttctacttatatggaagcgatcggtaactgtaaacctgccttatatacattacaatctaggggggagggagtgagtcttttcccaccgtttagctccatgaaattgaaacggaaaatttcataatcaaagccataaacgttgttattgtttcgcactgctcccccagcccattttccttttgtcttggtctcgcgtgaaaaatatggaaaacaaaaacaagaattaattttcatttcattttcctctgcgtacttttcgccaaacaatgcaaaacccagacaaactcaaacgccaaggaaccatccgcacaatgtaaaaagtctcacgttccgggttagaaaaaaaagacgcacattttatgaggcgacttgtgctttgtcagcatctaaagcattttatagcttttggcgttaaggtcttagtccgagccatatcaataaactaatggggggaacccgctaacaaatgtaatcataaattgcttaaatggtcgctttaggaaagctgagaaagaaagtacctatggatgtgcatttaaagtttaaacgcaacataatcataaaaaataatgctacatatcagtagttttgcggacaattttagctttgtattcaggataaaattatattatttgcaattatccgattggcgcaatccacacggcttgcatagcgatttcattaattagtggcaaatcaattggactcacctaattggcaaaatgtaccgtggtctatttgattagtgttcaagtggccggaacggaagagctttctgtttatctctctccctctctctgtgggccacttttgcaccaatcaattgcagatattagcaaatgagttttgattgcttaataaccgaaaccgctagaggaaatcaaccataaaccgttgcgatcgaggagcgactttctccacaccattgatgggttccaattcctgtgggcatcgtggaaacccatcgatatggatgttggctacaccgtatgctctagtatcgcatatagctccgctcgtatattgtgtttttcctgttgacatttaatcaacattggcgctactcccgctgctttttccctcccaccataccaggcaatccctatatggtccggactggtcgtgcttttggccaagtttatgggcacagactgtaatgtttttgtatttttttttgttttgtttatgtacctttgtccatatgtcacgtatggcatcgctgcataagtgagtaactgtgaatttgaggggctagctccaaagttctgcttgtctaacggcatccagtccattgctacatatgtatgtatgtaccatccatgctcctccgtaccccgtaccccctcccccccccctaaaatttcctcgttcgcttcgttggcttgccattaacaaggggcccttcagcagcgggagtgcttttttctaattttttttattttggttccatttactcaattgtgggtgagtcacaaaaggtgcgatatgtgggcagcgactttgttttatgtgttgtggaacataaaatagaacagcataaatcttgagaagaacacaacgggtaggttttaatgaggtttctaaaagaaatatttttagatgtcgtgggcaggtacaaattaaaaaaaaaagtattacattaaattatgttgaaaattagggaaaagtctctaagcccaatattatttaaataaggcatgccaagtatataagtaattgatagttgtagaaccttacttatatataattagccataatataaagtaattgctttccataaactacagttatactaagtgtgtgctattataatctaagtgaagttcggaaaatctccttgcaattatgaatctcaaagtggacccataatttactgctatgcatcttttgatggttaaaatgcaattataaaatgcgaaatgaaaagtggaacaatcttgattgcagtaatcttaagccagatcttgacaacttcctctggtaattgccctccatatgtcgcccccacccgaagctactcatcatttgtaggcctgattttgggtttttgcttcgctgactatgctaatgacctgctatagtttggcccaacttggcccggctggtctcaagttatttttattttttttttttggcttgtttcttttcagtctcatatgattatatgtatggtgggcacatgccaagcacacacgctctactggcgacttaaccggcgcattactcatgctcatctgctcgggaaaattgccataactggttgttcacccatccacgcccatctgcgccccttcggtcgctttggtcgctttggtgcaacgttagtttctttaattaaaaaagcatgaactctttgtaaagttctgggaccttgctaaacttcttgcccctatggcgtggctctcattgcccatttctctgacatcggcaaaaggcgagcaaagggaaccccagctgccactattaaagtccaaagtcagagttgaaatttgctttagtatactttggttaagttttcaactgtgtttgagtgctcttataggctttataaatgcagaacttaatatgagataaagataaaggtttgctaaaagcctatttatgcaacaattaacttctgaggtgtttttatgctctaatataaagcgaccatataacttggttactattaatttctatatgattatggaagggtattaaaatgtcggctcgatttcccctttacgttttttctttgctattttttggggaacttttttgcgtttgccgctaagaaaacagttttttaaccgtttcagtttgttgaggcggccctcttttccttttgccttcagctgcagctgcaatttccgtgccatttatgcaaactattgtttttgctcttgttgttttttggccctccaacgtttgccatttttgaactgaatttacgttcacagttctgccttctgtcctttttcttggccttctttttcggccttctaaggtgattgcagtgactttcaattaactttttgccagaaacttttaattaaaaggaaatgacttttttttgcaatttaaaaggtcgtgattatgctctaacataaataatagcaaaaaagcgactaatttgtttcccttttcaattgtagcgaaagtttgtaaactaaaattcgattggaaaagtattatgaaattgaataacatcgatacaaaagttcgacttccacctataaaaaaaaggaaaatagctaacagcaaagtttacaattgattcgtagggctttcaaaaaagttttccatacacaaaactgcaaatttggttggcaggagcacaaagaaaggaaaccgaaccaaccaatacatcattgacacagtgtctatcaggggacgcgactattagataccccttgatcgttaagtttttatttacttcagccacaactttaatattagtaaaaaataagcatgccgatcaatgaaatgaaacaaaaaaaaacctgtgagtcataaggccgaactacccacacccataccctggatttttgccactcaacagggtggcaaatatatatccatttgcattgaaagcattcacatgggcgcctcaagttgcaactccaaacgaaattaagctccttcagggggatttcaaggggcagcagagcaaagggtaaggacgaaaaggaactaggatatcagcaaagctgactttttgagttgggtcccctgttgaatagggatggctagaatatcacacaaactcgaacgcccacaatcagcaaaagactggaaaggaactgagggcaaaaggaagcaaaacaaagtcattttccaattcgaaaatttattgggcagaaggagaaaagtgacggaaagcagccacaggagaaaaaaaggataacacgtcaaaggaaaccgaaggagctatacgtgccgcctcccagatgaaggttgtcatccattcggagctgacaaaatggttgacaaagtgcaatttgcaatggaatcaaatttgccagaaaactcttctcaaaattcgtgatgacagcagctagaagcaaattcgtagtacttttaaaatagatacacggaaaagaaaatcataatatttatattaatcaaattattttatagtatgaacaactaaacagttgaactgtgtcaacgttttccgttgatgtattttaaacgcttttttaacttttaacgtgccatttttttttttgctggaggtaacaaagtgctgtttacaaatgaactttagatgggctcctattttttctgtgcacttatgcagaataaatgtgctgggaaaacgttttgatgggggtcaagaacgagctgcccggagcagttgacgcttgccatcttcggtttggtttccttggggcaggaagttatttagctccttggtcggaaggaagtgaaaatattcgactaattgaaataattgaggcaaactttgttgggaattgttgctgctgagaagttttacagtatcagcagagatatcaaaacgctggtctggttgcctccaaaccagaatctctaacaatttctcccatctgagcattttctagaggacttaagctttggtttctctgttcttttattatttttctttttttttttcctgcagcacacttgccacacaattctctgtggagcaaaaatgaatggggggaaatgaatggggctcttgggacaggggaaccgcttaaattaccataagagtggttggaggagggttgtgtgggtgagggatgtggtgagtggttccgttgggtgacaggtggtggcttgtggcaacatcagttaatgtccgctgattagcataggataggacccctttttagaccagtggaacatttgaatggatgcaacgatgctggtgctcgtcggaccttaaatgcttttaaattttaattaaattgaattcaatgttccgtggtcaggagataatgcttttctctgcgcgtcgaagtgaaataaaaacctaaattatggcgaatggcaaataatagtgaataaatcatgtgcagctgtggaaattgttaacttgtttaacattcatttttgtctctcatttgtgggccattaatttatttggccgcaatgggttggccatggattgtgtggagttcatagctccattatggtgaaaaaagtttgtggcaaactatgcaataatttcatcattgtgaaaagttctgcgaacatgtgaagagtttttgattgagtttgcagtttgcatagttcgtttcgttagtttgacttgcgtgcttgggcaatccggaagtgctgacgtttctgtgctgaactttgaactcaatcacgaatcatggaagattatgaaatctctacattttttatctttaattcaaaattcgtatgtttttcacatttgcaagtaaaacgtggccagaggattgtcatttctttatctattccgttctacatcacatttctttgtttttaatttaagaggcatacaagcaccttgcttcgaattttacatattcctgacaagcatttatgcattccttaccaccaggccccaggcactttttcctcttcctcgctcttgttatggtttaattaaattctcgactaaacttcctgccctcttgcatatgaaatattcaaacactcttgtggcaaggacagcccaggcaggattagtgaggggaaaataaaatcagaagcaggatttagcttggtataaatgtgtggttagctacctatttttaacgttttgtgcatgtataagcggcttaaatgctagttatttaggtttaaatgcagtgcagttcaaaacagaaggtgtctttttaaaacatcatggcatttaataatattttcctcccatgggctatctgtaataaatctttttatatcctttcagatgtagaaaacaatcaaagtaaagaagaatcccagcagcgagttctttccggggaatcccagccggcgacaaacaagcgcagtccactgacgaggatgtcgttcaagctattccgtcgcggatcggcgcgctgcatcggtctgctatcggcgttcgtaacgatcctgctctgcctctactacatctccattggccagcccaatccgacgcccatttccgagacgggtgccccatcggcggcgttacggggatcaccacttagtggcctaactggtttcagcgtcgacggaggttcgtcctcgatcatccaccaacagaagcagcaacttgtgatcgcctcaaaccaaaagaaatcctcggaaacaaagtcggcgcaaacatcggtatcgccggaggagcaatcagaggagcagtacaccaacagcaattggggcgacaagtgctacgaactaatccagagcaatacaaacataaccgctagcgaggagcacagcaagtttgactttcaggtacgaagaagctctactgccatcttgagtaacacattaataataagaatttcttacagccggaatggatgcgatcgaaggagtactgggatcgtggctttgaggagcgatttgatgcgcagaagaaggacaagcagcgcccgccactaaagatcatagtggtgccgcactcccataacgatcctggctggctaaagacctttaccaactacttccaatcggattctcggcagattcttaacctactggtgaccaagatgcaggaatacacggacatgacgttcatttggtcggagatcagcttccttcagctgtggtgggatcaagcgcatccaaccaagcaacgggcactcaagcgtttaatcgacgctggtcgcattgaaatcaccaccggtggatgggtgatgacggatgaggcgaatgtccacatctatccgatgttagatcagctcatcgagggccatcagtggctaaagaacaacctgaatgtcacaccgaaagtgggctggtccatagatccatttgggcatggcagcacggtgccttatctgctgtccggagcgaatttcgagggaacaattatccagcggattcattacgcctggaagcagtggtttgctcgccaacagtcgggtgacttcatctggaaaccctattggagaagtagaaaagacaaggatagtgaagctggtagccttctcactcacaacatgcccttcgatatatactcgattaagggatcgtgtggcccacatcccttcatatgtctgaactttgactttcgcaaaattccaggcgagtacaccgagtactccgttaaggcgcagttcatcacagacgacaatctggagtcaaaggcgcagttgctactggagcaatatgccaggactgcctcgttgtttccacataatgtggctctcattccagtcggtgatgatttccgatacaacaaggatcgcgaggtggatcagcagtatcagaactacaagaagcttattgatcacatcatggccaatcgaaggctttacaatgctgatatccgatttggcactcccagtgattatttcgaggccatcaaggagcgcatgaaggatcataccccaggatttcccacctttaagggtgacttctttgtttattccgatatcttttcggagggcagaccggcctattggtccggttacttcaccacgcgtccgttctacaagcttctgagttcagagctggaacatcagctgcgatctgctgaaattgtcttcaccctggcctacaacacagctcgacaagcaaagcgagagaatgcgataaagatatacgagaagaactacgagcttattattaatgcaaggcgaaatttggggctgtttcagcaccacgatgccatcactggtacatccaaggcagcggtaatgagggactatgcaatgcgcctgttcgagagcacgcaaaacatggtcaagatgcaggaatcctgcctagagctccttctacaaaagggccagcctagacatcacggtttcctgctcagtgaatttgagcgagataacttcaacaagctgccgcgcaagatgccgattcagatggccaacggggacgagtccacgcccactgttccggcgggagaaggcggagccggcggatcatcttccagcggttcggtaggcagctttgtcctgtacaattcgctagctcagaagcggttggaagtcgtcacgctacgcgtccaacatcccaatgtaaagatagtcaacgataagggtgtagaattgaatcacatccagatcaatccagtgtggaacatcacggatacctacgaacagggtctgggcacatccgtatccggcactgtgggtcgcattcgcacttcgacgcgccaattcgaggtgatgttcgtggcggagctggaacctttatcgctgagcacttatcgggtacaggtggacgaggtcaacttcaagcgaaacatagcaactatatactgtgacgattgcacagaatcgcagccagcatcagtgagtccgcccgaagaaatagaatcctcaccgacgtcagtatttgaggcgcgtggcaagccagcgggtgagttttttttacaaaataaataaagtgaacaagttaaaataacgtttgttatacaggcgatatacagttggagaatcctcacatgcgattgctgttcgacgagaagagcggttttctgaagaccatcacgcgtaagaaccagaagaaggagttgctcaagccgcttcagtgcaacatcaagtttgccgcttatcgcagcgcccaattccactctggtgcatatctcttcaagaccgatcccgaacaaagtgaggccgagaaagaagtgcttgagggctatacggacatgcgcatcattattacctcgggtcccatagccagtgatgtgactgtcatttatggaccatttttggcgcacacagtgcgcatcttcaacacgagaactcatctggatgcagcgatatatgttgaaaatgatatagatttcgagcctccacccaagaatcgggagacggagctgtttatgcgatttgtcaccaacatagacaatatagctcaagctccgatgcagcgggatccgcttaaggagccggtcgatgcggctaccatgccggagcttcccgtcttctacagcgatcaaaacggtttccagtatcatgagtaagtcaagaaacgcaggaccataaaacactttctaactttgtgcttcacacttttagacgtatcaaagtgccggctattggcatcgagggcaactacttcccgatcacctcgggagcttttattcaggacagtcgccttcgcctcaccctgttgaccactcatgcccaaggagcagccagttatgagcctggacagctggaggttatgctggatcggcgcaccctgtacgacgattatcggggaatgggcgaaggcgtcgtggacagccgtttgacgcggcacaagttctggctgctcgtggaggacctcccgggtggtcagcatgttacgcagccaccgagttacaaggttctcagtcagcaggctcagcagctggcaaatgccttgcgttacccgccgaatctgtactttgtaagcaacctggagcagccagaactggccgctgcattgctgcctttggtcaggcttttgcctaagggaccgctgccctgtgacgtacacctaaccaccctgcgtaccctatccgatccggagttgcaactgtttccgtccgcctcggcgctgctagttttgcatcgccaaggattcgattgcagtgtaagcgctggcagggaattgtctatggaggccatatgtcccctgtccagcaagggattgggtaatgtgcagctaggtcggctcagcctgcatacaatcgaagccaccagcttgacggggacggagcagaaatcgtccagggagagctaccacatacgctctctggccgagatcagtctggaaccaatggagctacgcacctttaaccttactttccgctcggaggtgtaaggtggctgcagtgtatttagcggaaatagttatcatatttatttgtggtttagttctaatagttagtggtaaacgccaagtgcaaagttttcagctttatttagttctcgtcacgtctaatgtctgtctccaacagttttgaaagtacaaagcacacgacatagttataaacatacaaacatagggtggttaggtttttttttttttgttgattcatgtagaatgaaagttaatgactagttcgaattctgttcgtctgtttaaaagatcaaagcgtaagaagaaacgaggctacgtctagttacctgttgacttttctaaaaaacgtatattttattcaaaaaggtataatattacaaactacatgttagccagaaattctttaaactctttatttatataaatcgacccacccaaataaaccttcagctcgacttaatgcaataggccaaaatacccaactcgactgccctgagcaatgcattccgcttaagcctcccagcttcataccctaaaatatatgtgcaataaacttgaactaaatcgcaccatggaaatgaaacagcttagattaagaactagcttgattttagaatgaaatatttagagagcaaattaaatcaatttttgttttcgtttgcgcgattagcgttcgcatcgatttgtttagactgattagcctaaaacgattgcaaaattggcatgtaatattaatctcaattaatctattcactcctagcccttatccagaattaaccaaaacacaagtgtatgtaggatataagttttaaacgagcaacgtagtggggtagcaaaagtataagccaaatattacattacattcactagcaatattgtaaatagtcgaataggatttccaggcacggtaaaaatagctctaatatccgatataccacttatagatttaagctaagccctctctcagctctggtattgtcgtatacgagagtcattcaaatagttactactgaattcagaaacaaagcattcaaagcaagcaagacataaactctaaaatatccagaacgtagggataaaatgacgaaggatgggatggattacttctaacggaaacaactgttttgtgtatttatttataaaaacttattactatatatctaattttatggatacaagaaaataaagtattatatgaaaccaattgtggaatgtgcgtttgtcattgaaacgaattgcaagagcgattctccgagaagatttacttcttatctttaaatattttcaacgaaagtactgggcaagaatatatcaagtgaaattgatatggtcccgaaagtatgcttattaaatttaactttataaaaatgtaatcaatataaccacaactagaacgtaatggtgtgagtttcaaacagaaaaatgttttccatggcatttattattaattgctagacggcttggcttgcctcattttagaacccacttaacttatagttaaccagaaacaaaaaccacagacgttagccaaatattggcactatatcgtttgtcatttgcctagtccggaaccacttcgtacatgtttgcgcccttcatgagcaaatagccacccaggttagccatttccaccagctggctaaagccagtcaaaatgccagcccgggttccaatttcctttagctcatcgaattcgaagatgcgtcgccccaatgccgccgaacgtctcttcgtaagctccaaaaaattgcgcagttgagcgctctttccggctcctcctccagcgccgcctcctcctcgagttccttgcctgctggagccctccttgaggctggtctgggtgatgctctcggtcagcagggcgatcacatcgcgcacgtgctgcggactgaccacgtgggataaatccaggcgagcacgtgcctgcgacaggtgaattatcgcaagaagttgccttacaagaagaataagccaatataagtgttaccttataatttaaggttcttaaataaatcttacaactgtataaaattgcctttaggtatttcataaatgaaacacaagcagactgtgaacaccttaattagtattttttagattagtattcttatagtaagtaaacatatatatgggcaaaattgataaagcaggtttgttgcctaagtcttttgatttctgaccttttgccaaaagttcttcaaa

SEQ ID NO: 40730 - DNA, 5321 bp, DROSOPHILA
tcctaacaacattgccgctcggacgcattgcggcattttattgattcgcgataatccttgtgataatcaataattaagcatagagtcagcggataaattaaaccaataaagcacatatcctatgtgccgttattggccgacgactgtaattgtttttgcgcgggtgtaaagtgcacgtgtgtgtgtgtgtcaaggattacggcaaaattgtaactgtttgtcgtgggcatgtgtgtgtgcgtgggagtttgatggaaaccgtaaagttataaacaaaagccgagttccacgaaagatgtagaaaacaatcaaagtaaagaagaatcccagcagcgagttctttccggggaatcccagccggcgacaaacaagcgcagtccactgacgaggatgtcgttcaagctattccgtcgcggatcggcgcgctgcatcggtctgctatcggcgttcgtaacgatcctgctctgcctctactacatctccattggccagcccaatccgacgcccatttccgagacgggtgccccatcggcggcgttacggggatcaccacttagtggcctaactggtttcagcgtcgacggaggttcgtcctcgatcatccaccaacagaagcagcaacttgtgatcgcctcaaaccaaaagaaatcctcggaaacaaagtcggcgcaaacatcggtatcgccggaggagcaatcagaggagcagtacaccaacagcaattggggcgacaagtgctacgaactaatccagagcaatacaaacataaccgctagcgaggagcacagcaagtttgactttcagccggaatggatgcgatcgaaggagtactgggatcgtggctttgaggagcgatttgatgcgcagaagaaggacaagcagcgcccgccactaaagatcatagtggtgccgcactcccataacgatcctggctggctaaagacctttaccaactacttccaatcggattctcggcagattcttaacctactggtgaccaagatgcaggaatacacggacatgacgttcatttggtcggagatcagcttccttcagctgtggtgggatcaagcgcatccaaccaagcaacgggcactcaagcgtttaatcgacgctggtcgcattgaaatcaccaccggtggatgggtgatgacggatgaggcgaatgtccacatctatccgatgttagatcagctcatcgagggccatcagtggctaaagaacaacctgaatgtcacaccgaaagtgggctggtccatagatccatttgggcatggcagcacggtgccttatctgctgtccggagcgaatttcgagggaacaattatccagcggattcattacgcctggaagcagtggtttgctcgccaacagtcgggtgacttcatctggaaaccctattggagaagtagaaaagacaaggatagtgaagctggtagccttctcactcacaacatgcccttcgatatatactcgattaagggatcgtgtggcccacatcccttcatatgtctgaactttgactttcgcaaaattccaggcgagtacaccgagtactccgttaaggcgcagttcatcacagacgacaatctggagtcaaaggcgcagttgctactggagcaatatgccaggactgcctcgttgtttccacataatgtggctctcattccagtcggtgatgatttccgatacaacaaggatcgcgaggtggatcagcagtatcagaactacaagaagcttattgatcacatcatggccaatcgaaggctttacaatgctgatatccgatttggcactcccagtgattatttcgaggccatcaaggagcgcatgaaggatcataccccaggatttcccacctttaagggtgacttctttgtttattccgatatcttttcggagggcagaccggcctattggtccggttacttcaccacgcgtccgttctacaagcttctgagttcagagctggaacatcagctgcgatctgctgaaattgtcttcaccctggcctacaacacagctcgacaagcaaagcgagagaatgcgataaagatatacgagaagaactacgagcttattattaatgcaaggcgaaatttggggctgtttcagcaccacgatgccatcactggtacatccaaggcagcggtaatgagggactatgcaatgcgcctgttcgagagcacgcaaaacatggtcaagatgcaggaatcctgcctagagctccttctacaaaagggccagcctagacatcacggtttcctgctcagtgaatttgagcgagataacttcaacaagctgccgcgcaagatgccgattcagatggccaacggggacgagtccacgcccactgttccggcgggagaaggcggagccggcggatcatcttccagcggttcggtaggcagctttgtcctgtacaattcgctagctcagaagcggttggaagtcgtcacgctacgcgtccaacatcccaatgtaaagatagtcaacgataagggtgtagaattgaatcacatccagatcaatccagtgtggaacatcacggatacctacgaacagggtctgggcacatccgtatccggcactgtgggtcgcattcgcacttcgacgcgccaattcgaggtgatgttcgtggcggagctggaacctttatcgctgagcacttatcgggtacaggtggacgaggtcaacttcaagcgaaacatagcaactatatactgtgacgattgcacagaatcgcagccagcatcagtgagtccgcccgaagaaatagaatcctcaccgacgtcagtatttgaggcgcgtggcaagccagcgggcgatatacagttggagaatcctcacatgcgattgctgttcgacgagaagagcggttttctgaagaccatcacgcgtaagaaccagaagaaggagttgctcaagccgcttcagtgcaacatcaagtttgccgcttatcgcagcgcccaattccactctggtgcatatctcttcaagaccgatcccgaacaaagtgaggccgagaaagaagtgcttgagggctatacggacatgcgcatcattattacctcgggtcccatagccagtgatgtgactgtcatttatggaccatttttggcgcacacagtgcgcatcttcaacacgagaactcatctggatgcagcgatatatgttgaaaatgatatagatttcgagcctccacccaagaatcgggagacggagctgtttatgcgatttgtcaccaacatagacaatatagctcaagctccgatgcagcgggatccgcttaaggagccggtcgatgcggctaccatgccggagcttcccgtcttctacagcgatcaaaacggtttccagtatcatgaacgtatcaaagtgccggctattggcatcgagggcaactacttcccgatcacctcgggagcttttattcaggacagtcgccttcgcctcaccctgttgaccactcatgcccaaggagcagccagttatgagcctggacagctggaggttatgctggatcggcgcaccctgtacgacgattatcggggaatgggcgaaggcgtcgtggacagccgtttgacgcggcacaagttctggctgctcgtggaggacctcccgggtggtcagcatgttacgcagccaccgagttacaaggttctcagtcagcaggctcagcagctggcaaatgccttgcgttacccgccgaatctgtactttgtaagcaacctggagcagccagaactggccgctgcattgctgcctttggtcaggcttttgcctaagggaccgctgccctgtgacgtacacctaaccaccctgcgtaccctatccgatccggagttgcaactgtttccgtccgcctcggcgctgctagttttgcatcgccaaggattcgattgcagtgtaagcgctggcagggaattgtctatggaggccatatgtcccctgtccagcaagggattgggtaatgtgcagctaggtcggctcagcctgcatacaatcgaagccaccagcttgacggggacggagcagaaatcgtccagggagagctaccacatacgctctctggccgagatcagtctggaaccaatggagctacgcacctttaaccttactttccgctcggaggtgtaaggtggctgcagtgtatttagcggaaatagttatcatatttatttgtggtttagttctaatagttagtggtaaacgccaagtgcaaagttttcagctttatttagttctcgtcacgtctaatgtctgtctccaacagttttgaaagtacaaagcacacgacatagttataaacatacaaacatagggtggttaggtttttttttttttgttgattcatgtagaatgaaagttaatgactagttcgaattctgttcgtctgtttaaaagatcaaagcgtaagaagaaacgaggctacgtctagttacctgttgacttttctaaaaaacgtatattttattcaaaaaggtataatattacaaactacatgttagccagaaattctttaaactctttatttatataaatcgacccacccaaataaaccttcagctcgacttaatgcaataggccaaaatacccaactcgactgccctgagcaatgcattccgcttaagcctcccagcttcataccctaaaatatatgtgcaataaacttgaactaaatcgcaccatggaaatgaaacagcttagattaagaactagcttgattttagaatgaaatatttagagagcaaattaaatcaatttttgttttcgtttgcgcgattagcgttcgcatcgatttgtttagactgattagcctaaaacgattgcaaaattggcatgtaatattaatctcaattaatctattcactcctagcccttatccagaattaaccaaaacacaagtgtatgtaggatataagttttaaacgagcaacgtagtggggtagcaaaagtataagccaaatattacattacattcactagcaatattgtaaatagtcgaataggatttccaggcacggtaaaaatagctctaatatccgatataccacttatagatttaagctaagccctctctcagctctggtattgtcgtatacgagagtcattcaaatagttactactgaattcagaaacaaagcattcaaagcaagcaagacataaactctaaaatatccagaacgtagggataaaatgacgaaggatgggatggattacttctaacggaaacaactgttttgtgtatttatttataaaaacttattactatatatctaattttatggatacaagaaaataaagtattatatgaaacc

SEQ ID NO: 40731 - protein, 1249 aa, DROSOPHILA
MSFKLFRRGSARCIGLLSAFVTILLCLYYISIGQPNPTPISETGAPSAALRGSPLSGLTGFSVDGGSSSIIHQQKQQLVIASNQKKSSETKSAQTSVSPEEQSEEQYTNSNWGDKCYELIQSNTNITASEEHSKFDFQPEWMRSKEYWDRGFEERFDAQKKDKQRPPLKIIVVPHSHNDPGWLKTFTNYFQSDSRQILNLLVTKMQEYTDMTFIWSEISFLQLWWDQAHPTKQRALKRLIDAGRIEITTGGWVMTDEANVHIYPMLDQLIEGHQWLKNNLNVTPKVGWSIDPFGHGSTVPYLLSGANFEGTIIQRIHYAWKQWFARQQSGDFIWKPYWRSRKDKDSEAGSLLTHNMPFDIYSIKGSCGPHPFICLNFDFRKIPGEYTEYSVKAQFITDDNLESKAQLLLEQYARTASLFPHNVALIPVGDDFRYNKDREVDQQYQNYKKLIDHIMANRRLYNADIRFGTPSDYFEAIKERMKDHTPGFPTFKGDFFVYSDIFSEGRPAYWSGYFTTRPFYKLLSSELEHQLRSAEIVFTLAYNTARQAKRENAIKIYEKNYELIINARRNLGLFQHHDAITGTSKAAVMRDYAMRLFESTQNMVKMQESCLELLLQKGQPRHHGFLLSEFERDNFNKLPRKMPIQMANGDESTPTVPAGEGGAGGSSSSGSVGSFVLYNSLAQKRLEVVTLRVQHPNVKIVNDKGVELNHIQINPVWNITDTYEQGLGTSVSGTVGRIRTSTRQFEVMFVAELEPLSLSTYRVQVDEVNFKRNIATIYCDDCTESQPASVSPPEEIESSPTSVFEARGKPAGDIQLENPHMRLLFDEKSGFLKTITRKNQKKELLKPLQCNIKFAAYRSAQFHSGAYLFKTDPEQSEAEKEVLEGYTDMRIIITSGPIASDVTVIYGPFLAHTVRIFNTRTHLDAAIYVENDIDFEPPPKNRETELFMRFVTNIDNIAQAPMQRDPLKEPVDAATMPELPVFYSDQNGFQYHERIKVPAIGIEGNYFPITSGAFIQDSRLRLTLLTTHAQGAASYEPGQLEVMLDRRTLYDDYRGMGEGVVDSRLTRHKFWLLVEDLPGGQHVTQPPSYKVLSQQAQQLANALRYPPNLYFVSNLEQPELAAALLPLVRLLPKGPLPCDVHLTTLRTLSDPELQLFPSASALLVLHRQGFDCSVSAGRELSMEAICPLSSKGLGNVQLGRLSLHTIEATSLTGTEQKSSRESYHIRSLAEISLEPMELRTFNLTFRSEV

SEQ ID NO: 40732 - DNA, 9425 bp, DROSOPHILA
gaatctaagtggcatcagaaatctgatcacgactacataatggcgggatctggagttgccaagcagatatttgccctcgatttcgagatctttggacgagtgcaaggtatgcaatgcatttttctgattcggcttgttaaacagcgtattaaattttgcaggtgtgttcttccgcaaagtaagtactgggaggcctatatatatatctggaaatcaacatttaacttatgtacatttttggcttagcacacgtcgcatgaggctaaaagattgggagttaggggctggtgcatgaatacccgggatgggaccgtcaagggacaactggaggctcctatgatgaatttaatggaaatgtaggtaccgctgcactccactaattcaatcatttaaccatcgcccactaatttgaaggaaacattggctggagaacaaccgaattcccaacgctaaggtctcaaaggctgaattttcgcaaatccaggaaatcgaggactatacgttcacttcctttgacataaaacattaaaaacgaattattagctctttcgttgtccatccaattccgaaacaaagtctaaataaattaccagggctgcaacttgcgtaagcaggcatatctgcattgctatcgactgagtcgataacattcgatagtatgaacataagaaatattacgtttcgcaaaactgaacccagtactgaagtacaacaataaataaataataaattatttaaaacaaggcggaaaattattccgagaatcgatagtcgctagtcgaaagtgcgcaccactccagtatctactcgatatattgctatcacagccgatagtttgcagctccctgccatagacactggtcatctcgctcgcacacacaacagtgggccgcgccaccgccataggcggcgcacgtgcaagagcgagacaaccagctgggcgacagcgcactttggtctggcacagaaacgagtacagcttcgatacacgtcgttttgccaaaagcgtagcagagcagtctaagcgatgaaaaaaataaatgaggaaaaaagtccgtgaagcgaaaaccgtaattcctacagtgcgagtcacgccattgtgtttgcaaaaaatatttgccaattgtgctacgggcaatttttcggaacggccgaattgtgcgtataatgaaaaaaaatactacttaatttttaagcaatttacaaattcttgcgtgctgcctgcctgctgtcggtgtgttcttgcttgcatgtgttagtgagtacgattactttcgcgctgaaaacctttttccactgccctttcgctggaatctgggcgaatatagataggacacaaagcacatataactgatttttactgcagaattgatcgagacatgtggaatacaataaatgagattgtgtaaataactgaatatagtggcgcatacagttgcacgtgtgtgtgtgctagcatgtgcgtgtgtgtgtgtaaaggcgcgagtttccgtttgcctaggctaattgtagtggaaaaactcaataaacggaattacataaaaacatggtggcatgatcggcagtttcccgccggcagaagatgcccaatcttggaaaattgtaattttcgaaagtaaccgcaatgatttcgtcagtatgtaaagtagtctgtcagtccctgcatatgtttgtgtgtgtgtgttctatacagttttttttattgcgcatcatggtgtgcaatagcgcgctttctgacctctctctcgctctcatgggttctcttgttggccaaagcgacgctgtgtgtgtgttgtgtacgcatatgtagcatatgtacataacacgccggaaaagacaaaaaaaaaaaaccattccaaattttgaaatcttacggaggcgggcggtttaaacgagataaaaaataaatacaccaatattgttcttttatatgataacgcagtagtctcggaccgaatagtatgcctttattttgtcgtcctaacgctgaattgccgaaaaataatagcccgtttttggaaaattctcgacaggattagcataaagagacgccttaggagtcgaacgaaccaaatgccgcagcagccggccaacgtattagcatcagaacgatggccccagcgctcacagccgagccactaagtccaaaggagaagctaaccagcaccgcctcgccctcggcccgcagctcctcggaaagcggaggagttggatgtgcagttggcttggtcaagaagccggcaacacccacgccggccacggccaccacgcggattacccgctcatcagcggcagcggcctcagttaccgcttccccgcatctacaacagcagcgatcctcgctagcaatcaataacaagcgaaagtcgggcaacgctaaagccagcaatgaaccaatggggctgagcacagccccgactccacacagcaccacttcaccaaatccctcgacggatactgcggcagcctccacctctgccgtggagcacaacaataacgacagcaacagtacctccgccggcaacagcacctccgccgacaacagctccacgcccaaggacaactccaccgctcagctactggcggatctaaccatcaactttgaggagaccatatccgcggagatttgcctgaggaaaaccctacccgatgtgagtctggggaaagagccggttccgcctgcctcggtgctggcagtggccacaagttcaacgagtgctggcagcgctctatccttatctgcagtggatgaggtgaccaagatagaaatagataatatagaaggtgggtctaaggaatcactccaaataaatagtcttgactcaaaatttctctcgcccactgtttcagagcgtctcagccagctagatgggaatgccactggaaggcccgaggagcatgtggcaccaccttctgttccggtacccgtgcaggaggcgccaaacacgcccaccaggccacaggcgccaccaagtgcccatcttgagtctccgcagccggcgcgaacacagcagcagtccattcaacagatgacgccgcaaagcaccaccagttccaacaattttctcaaagacggagcagctggtgctgttctagaggatcaggatatcgaggaggtgcttaaagcgctcaaaacatttgacggtggccatgttaatccagataccatttgcgagtttttcgacgaagtttgggaagaggcagcaccggcagcgccattgccgcccgcgccacccgaaaatgtggtggatgtgccgggcgcgaagcccagctgcagtggcatcctcgttagcggcagcaacatttcccagccgaatgtgattattaagcaggagcagcggccctggcaggagagtcatgctgagttggagcagcagcagcacgttatctcgcgcaggatcgagtttttgctacgcaggatgcgcaagctccaggcgcgagcgatgtgccgtcacgcgagcgaggaggtggttggtatcatggagtggtctgcccgcagttcccataaggctccagttccagcgagaagttccacgctgactgagcaggaggccactgtcctatcgattgtctcagggcgtccgagctcaaccttctgggaggagcagaacaagcatccgctgcctgctagccagatgagtaatgtgatccggcatattgcgacggcggcaaagcatcagcaaatctgccactcagccagcggaagctctgctactctggcgccatcctccagctggtacaacagctgcaacagctctgcgctgccgatgaagcgtccacgaaagaatcaacttgatgcttcggttgcaacgggtgccacacccactgcacctgcgccaggagcggtaacatctagacaggcagctggcacgacgggatccgcaacgggttcgaatacaccgcgggcggatgatatcgtgcccggctacgacacctatgtgactaatgaactcacccatgtgtctggcctgctgcacacggagcttcgagaagtacagaatgccatcgactcggacgccacggagtcaagttctggtggagaatccgctgacgagatggtaacctacaacaacaaccagcagctctcgctaccaatgtgagtacttcgtattatttatgtacatacttaggttatcgggaatattttacaagtaaactttcttccatctttttttgaggggggttttcagcttctgtcatctttttaagatcattcttttgctatagaatttgtccgattaatgttggctcggtagttttctttcaaaattgttttgctttgacaggcattttaaacatgatttaacgtcgtccttagcaattgaaaagttgtaataggctttgattagagttgttgtacctaattatcgcatttacaatgcgatatttcaactatttcaacagtttttattaaaattgttaattagcgattatatatttcttttagctttttttttgtggtattctctttcctaatgctcttgaaatttgattctttgcagcactcgacgcgctgtctggcgatattcgagagatcgtgcagccattgccctgcgctggtcctggctctgctcccagctgaccgatttggagatgaagatccgtcagcacagcgacctttacatggatctaactcagtccaagggcgagatccagctggagtccacagctaagacctcaccgtcgctagcacagccggcaaatggcattaaggaggagcccggatccgactacctctgcagtcgggcacgtccattggtgctgtccgagttccgcaaacgcaagctcttccagaccacgaacatgcacacgatttccaagaaagccgcacgccccagcaacattaagtgtggctgccagtggccgcaggtgccatgcacactgtgcacgggtcggacagaccctacggcgcccagggatctggtcgagacgatgatgccgcaaaaccgggtggcattgctcgatgctggctaccatccagtgctcagcttcgccagcggtgagtgggaggttacactgagtggacccatttggttttcgtccatgattatttcttatcatctgtgatggtttaacattatttattctacacttgagatttgaactgaattgattaaaaagtaaaactttaaaatgcaatacttgcaaataatttttattcgaaactaaaacattaaaatcctcgtattctttacattggattccaaaatgaaaagaaatagtcggatgatgacagctaaagtggaattatgtttgaatatattcttatccctatcattcttgtttcccagatgtcagtcagtcggttcacttggaggccgttgcccgccagccggactggcagtaccgcgtcatgcgcagccagcccaaggccattgtcaaggccatgtggaaggcggagcgcgagacgatagcctcaggcggtgtcggcggacaaggtggcagccggcggtcgggcgatgcggcgaagcggcgttatatacgacgcaaggagcgcaacaacaactcaaataaggaggctgggagcggagctaaagctgctgctgtcgccgcaggaggagcaggcggaaacggaagcagtagcgtcgggggaggggatagcggaaacggtactggtactgctactacttcttcttctactacgcctactacaacgccacttgtggccaacagtaaattattgtaaacatgacgaaattcgataattgttattaacataaaacaacaacaatcttttgcatctcttcttcttctttttctttgcatcgatcaaccaaaacacgaaattccaccaacaccatcaacaaacaccaccaccaacaacaacaacgaaaaaccccaccaattgttttattttgccattccgttcttgtctccgtttcgtccccgttccgcatccaaatcacggacttgacgcaacatcagcagcggccaggggcaagcggcaaccacaacacccaactggagcgaacagttccagctcgctgtggccagactctcgccaacgccaacgacaacgccaccacagtccctcctcaacctcgatctcggcactgagcggcgctaagaaggcacgcaaatccgcaaccaacagcagcagcagcaattccacacagcagcagcagaatcaccacggcaccaaaatcaacaatcatcatctcaatggctacggcgatcagtggggggagcaaagcaggagtcgtcgcaactcttcgccctccaacagtcataaaaatgagaggtatgtttcggattcaataactgatcccagggattcgcgataagtagtcctgctttttttttataagatagattgttatatataatttatatgtatgtttcccttgcagaacctctgagcgtcgcgttcgtcccatctacgacatcaataacatcgttataccctacagtatgctagcccagtcgaaaatggagataattccctacaaggaaatacccatacccaagtaagtattcaattttgcgctaagtccttattttatatatatatgtcgcataatgtaaaataccaagatttgtgtatatctattaaaatcacccattccatctttgctttcaggtggcgcattgtagacagtgataacgataagggaaaacattcgtcagatgagtcaatggagcgcaaactgagcaatggctgtgtcgcatcaaagtcagaggagctagccaaacaacagctaccaccaccaccagatcaagatcaagagcagccggccctgcagcctccgaaggttaatggtttaaaggaaaatcaagcagtcaagcacaataacaataataatacaaacaataataataataaaaatggactggtaaatggtaacgccaaaaaggatgaacttaaggctgcagaggatcacgatacgcaatcaaaagaagacgacgatccaaaggaaaaggtggtcaaacccaagctcaacggaaacttgataaagaatccgattgacaaaactgccgaaacgcaagacaaaattgctcagccagcaccagaaccaccactgccaaagcgacccaagctggaaactccaacctccaacgaggtcaccaaggctaatgggcagttggtgcagcaacagctggaatcccgtgagagcgaggaggagccacagcatgtcgacgaagatctttcggatgaagcgtttattatgcgacatcagcgagctcttctcgaggagcgacgccgcttcgagactttccttaagttcccctggagcacccgatcgcgtgcaaataggcgcgtcgatagtcgtgccgaatctagtggcgccaacacaccggatcccgcctcaccagctcctcatctaggcggccctggtcacgacaacgaaagcattccctcgccgctggcgtacccactggacgcttttaacgaaagcggtgagctgctgactggcggacaggcacgccaagctcgtcgtcggactacgtctagcaagcttaaggatcagctggaacggcgcagcaccacgcccgatctgcgggaggtaagtcgatgtccaagtttcacatttgttgaactcatatataaaataaattctggttgtgcctattacttttgccgaattttgttttcaaactgctttgaatgttcaaatactgattgtatagaatagttttctaattgaaacccttttcctttttgtatagtcttacactgtgatgccatctccctttgagcccttgaactttccgctctccgacgaggtctaccagcgattgctagccgagacatatgcgccgcccaggtcaatgaccgtctcaaagcgggccaaaagcaagtcgatatcctcgaactgtgatggtgggaacaccttcacaggaggcagcggcagtcggcgcagcagcaagtgcaagattaagccaaatggtcagctaaatggccagctcaatggccaccctgcggcggcgaagttgaacggaatagatgcggcaaatgaaggtggaatttctgagccggaagaggaagagatgctgctagaagacgaggatgacgactatcccaagcatcatctggcgccgctggatgacgaggagccgtcgacaccagatgtcgagcatgagctttacgactcggcgatcgatgcctatctcgctgatccggaggcgctagaggaggatatgggcgaggatcccttcgaggacgacgatcccaacgatccggagtggaagacacggaccgagggtgttcgcagcagacgcatctaagaccaaaatccaaagttttcgttatttaagacttttaaacgatttgtcaatttttaaagccacaacacacacacacccacaaatcagccggagcagaccaacaaattttaatttgtttcaaacggtttggtttgcactcacaacagcattgcgtactctaagcaatcgtctaagttatttagttctacgagcccacaacaaaaaaaaaaaacacagatacgctacacacaagtacacaacaaaacaaacacgaagcagaagcgaaaatcttgaaacaatgtaaatacaagctaaacgcatagagctaagcagttactgataattgtacactaaccaacgatcaagaaatcatcgaacgcacccaccacgtcgcgtggacgtggtggatgcggtcggttggagcactggtcagcggttaagtaggcaccacaacaaacccacttgggcttcaagccgaagtgcgctaatgataaaaatattaagctaatctaaatatatatatatatacgaaaacatttaaatatataccatatgcatacattaacgtgtaaatgccgaagagagcagttagctgaagatttgaaatgtattcgcacctgcacacaaacgatataacaactaagctatagaaggcaattatctgtaaattgatcaagcttaaccattagctaaccaaccattagcctttagcccagcaagtaatcagtcggcgttggggccgtgtttttcttatattttaaaaagtttatcagctgtaaatgtatagagcggaattcgaaaggcggtgtgtgaaaatggatcgaacgataaatgtatgtatatgtattttagttgcttaggcgttttcatttctaccttataaacacgttagcggctaattgtagcaattaatactataaaacacaaaaaaaaaaacaaaaacaaaaaacaacaaccataaggaaacctagcgcggctatgtccgtgaaaatgtttattctaatttcgtttttactatctactgcgtatgtttcaccgcaaagctagaatccagtttaattcgttaaaacttgaaaagaaatacaacagaaatgtgaagattaactaaggaccgcaaaaatacagaattatatattcttaaaaatgacacatggagcgccagaagtgatatgctgggaccaccatcgccagatggtggaatctggccaacatgtgtgtcg

SEQ ID NO: 40733 - DNA, 5042 bp, DROSOPHILA
caaaagcgtagcagagcagtctaagcgatgaaaaaaataaatgaggaaaaaagattagcataaagagacgccttaggagtcgaacgaaccaaatgccgcagcagccggccaacgtattagcatcagaacgatggccccagcgctcacagccgagccactaagtccaaaggagaagctaaccagcaccgcctcgccctcggcccgcagctcctcggaaagcggaggagttggatgtgcagttggcttggtcaagaagccggcaacacccacgccggccacggccaccacgcggattacccgctcatcagcggcagcggcctcagttaccgcttccccgcatctacaacagcagcgatcctcgctagcaatcaataacaagcgaaagtcgggcaacgctaaagccagcaatgaaccaatggggctgagcacagccccgactccacacagcaccacttcaccaaatccctcgacggatactgcggcagcctccacctctgccgtggagcacaacaataacgacagcaacagtacctccgccggcaacagcacctccgccgacaacagctccacgcccaaggacaactccaccgctcagctactggcggatctaaccatcaactttgaggagaccatatccgcggagatttgcctgaggaaaaccctacccgatgtgagtctggggaaagagccggttccgcctgcctcggtgctggcagtggccacaagttcaacgagtgctggcagcgctctatccttatctgcagtggatgaggtgaccaagatagaaatagataatatagaagagcgtctcagccagctagatgggaatgccactggaaggcccgaggagcatgtggcaccaccttctgttccggtacccgtgcaggaggcgccaaacacgcccaccaggccacaggcgccaccaagtgcccatcttgagtctccgcagccggcgcgaacacagcagcagtccattcaacagatgacgccgcaaagcaccaccagttccaacaattttctcaaagacggagcagctggtgctgttctagaggatcaggatatcgaggaggtgcttaaagcgctcaaaacatttgacggtggccatgttaatccagataccatttgcgagtttttcgacgaagtttgggaagaggcagcaccggcagcgccattgccgcccgcgccacccgaaaatgtggtggatgtgccgggcgcgaagcccagctgcagtggcatcctcgttagcggcagcaacatttcccagccgaatgtgattattaagcaggagcagcggccctggcaggagagtcatgctgagttggagcagcagcagcacgttatctcgcgcaggatcgagtttttgctacgcaggatgcgcaagctccaggcgcgagcgatgtgccgtcacgcgagcgaggaggtggttggtatcatggagtggtctgcccgcagttcccataaggctccagttccagcgagaagttccacgctgactgagcaggaggccactgtcctatcgattgtctcagggcgtccgagctcaaccttctgggaggagcagaacaagcatccgctgcctgctagccagatgagtaatgtgatccggcatattgcgacggcggcaaagcatcagcaaatctgccactcagccagcggaagctctgctactctggcgccatcctccagctggtacaacagctgcaacagctctgcgctgccgatgaagcgtccacgaaagaatcaacttgatgcttcggttgcaacgggtgccacacccactgcacctgcgccaggagcggtaacatctagacaggcagctggcacgacgggatccgcaacgggttcgaatacaccgcgggcggatgatatcgtgcccggctacgacacctatgtgactaatgaactcacccatgtgtctggcctgctgcacacggagcttcgagaagtacagaatgccatcgactcggacgccacggagtcaagttctggtggagaatccgctgacgagatggtaacctacaacaacaaccagcagctctcgctaccaatcactcgacgcgctgtctggcgatattcgagagatcgtgcagccattgccctgcgctggtcctggctctgctcccagctgaccgatttggagatgaagatccgtcagcacagcgacctttacatggatctaactcagtccaagggcgagatccagctggagtccacagctaagacctcaccgtcgctagcacagccggcaaatggcattaaggaggagcccggatccgactacctctgcagtcgggcacgtccattggtgctgtccgagttccgcaaacgcaagctcttccagaccacgaacatgcacacgatttccaagaaagccgcacgccccagcaacattaagtgtggctgccagtggccgcaggtgccatgcacactgtgcacgggtcggacagaccctacggcgcccagggatctggtcgagacgatgatgccgcaaaaccgggtggcattgctcgatgctggctaccatccagtgctcagcttcgccagcgatgtcagtcagtcggttcacttggaggccgttgcccgccagccggactggcagtaccgcgtcatgcgcagccagcccaaggccattgtcaaggccatgtggaaggcggagcgcgagacgatagcctcaggcggtgtcggcggacaaggtggcagccggcggtcgggcgatgcggcgaagcggcgttatatacgacgcaaggagcgcaacaacaactcaaataaggaggctgggagcggagctaaagctgctgctgtcgccgcaggaggagcaggcggaaacggaagcagtagcgtcgggggaggggatagcggaaacggtactggtactgctactacttcttcttctactacgcctactacaacgccacttgtggccaacacagcggccaggggcaagcggcaaccacaacacccaactggagcgaacagttccagctcgctgtggccagactctcgccaacgccaacgacaacgccaccacagtccctcctcaacctcgatctcggcactgagcggcgctaagaaggcacgcaaatccgcaaccaacagcagcagcagcaattccacacagcagcagcagaatcaccacggcaccaaaatcaacaatcatcatctcaatggctacggcgatcagtggggggagcaaagcaggagtcgtcgcaactcttcgccctccaacagtcataaaaatgagagaacctctgagcgtcgcgttcgtcccatctacgacatcaataacatcgttataccctacagtatgctagcccagtcgaaaatggagataattccctacaaggaaatacccatacccaagtggcgcattgtagacagtgataacgataagggaaaacattcgtcagatgagtcaatggagcgcaaactgagcaatggctgtgtcgcatcaaagtcagaggagctagccaaacaacagctaccaccaccaccagatcaagatcaagagcagccggccctgcagcctccgaaggttaatggtttaaaggaaaatcaagcagtcaagcacaataacaataataatacaaacaataataataataaaaatggactggtaaatggtaacgccaaaaaggatgaacttaaggctgcagaggatcacgatacgcaatcaaaagaagacgacgatccaaaggaaaaggtggtcaaacccaagctcaacggaaacttgataaagaatccgattgacaaaactgccgaaacgcaagacaaaattgctcagccagcaccagaaccaccactgccaaagcgacccaagctggaaactccaacctccaacgaggtcaccaaggctaatgggcagttggtgcagcaacagctggaatcccgtgagagcgaggaggagccacagcatgtcgacgaagatctttcggatgaagcgtttattatgcgacatcagcgagctcttctcgaggagcgacgccgcttcgagactttccttaagttcccctggagcacccgatcgcgtgcaaataggcgcgtcgatagtcgtgccgaatctagtggcgccaacacaccggatcccgcctcaccagctcctcatctaggcggccctggtcacgacaacgaaagcattccctcgccgctggcgtacccactggacgcttttaacgaaagcggtgagctgctgactggcggacaggcacgccaagctcgtcgtcggactacgtctagcaagcttaaggatcagctggaacggcgcagcaccacgcccgatctgcgggagtcttacactgtgatgccatctccctttgagcccttgaactttccgctctccgacgaggtctaccagcgattgctagccgagacatatgcgccgcccaggtcaatgaccgtctcaaagcgggccaaaagcaagtcgatatcctcgaactgtgatggtgggaacaccttcacaggaggcagcggcagtcggcgcagcagcaagtgcaagattaagccaaatggtcagctaaatggccagctcaatggccaccctgcggcggcgaagttgaacggaatagatgcggcaaatgaaggtggaatttctgagccggaagaggaagagatgctgctagaagacgaggatgacgactatcccaagcatcatctggcgccgctggatgacgaggagccgtcgacaccagatgtcgagcatgagctttacgactcggcgatcgatgcctatctcgctgatccggaggcgctagaggaggatatgggcgaggatcccttcgaggacgacgatcccaacgatccggagtggaagacacggaccgagggtgttcgcagcagacgcatctaagaccaaaatccaaagttttcgttatttaagacttttaaacgatttgtcaatttttaaagccacaacacacacacacccacaaatcagccggagcagaccaacaaattttaatttgtttcaaacggtttggtttgcactcacaacagcattgcgtactctaagcaatcgtctaagttatttagttctacgagcccacaac

SEQ ID NO: 40734 - protein, 1570 aa, DROSOPHILA
MAPALTAEPLSPKEKLTSTASPSARSSSESGGVGCAVGLVKKPATPTPATATTRITRSSAAAASVTASPHLQQQRSSLAINNKRKSGNAKASNEPMGLSTAPTPHSTTSPNPSTDTAAASTSAVEHNNNDSNSTSAGNSTSADNSSTPKDNSTAQLLADLTINFEETISAEICLRKTLPDVSLGKEPVPPASVLAVATSSTSAGSALSLSAVDEVTKIEIDNIEERLSQLDGNATGRPEEHVAPPSVPVPVQEAPNTPTRPQAPPSAHLESPQPARTQQQSIQQMTPQSTTSSNNFLKDGAAGAVLEDQDIEEVLKALKTFDGGHVNPDTICEFFDEVWEEAAPAAPLPPAPPENVVDVPGAKPSCSGILVSGSNISQPNVIIKQEQRPWQESHAELEQQQHVISRRIEFLLRRMRKLQARAMCRHASEEVVGIMEWSARSSHKAPVPARSSTLTEQEATVLSIVSGRPSSTFWEEQNKHPLPASQMSNVIRHIATAAKHQQICHSASGSSATLAPSSSWYNSCNSSALPMKRPRKNQLDASVATGATPTAPAPGAVTSRQAAGTTGSATGSNTPRADDIVPGYDTYVTNELTHVSGLLHTELREVQNAIDSDATESSSGGESADEMVTYNNNQQLSLPITRRAVWRYSRDRAAIALRWSWLCSQLTDLEMKIRQHSDLYMDLTQSKGEIQLESTAKTSPSLAQPANGIKEEPGSDYLCSRARPLVLSEFRKRKLFQTTNMHTISKKAARPSNIKCGCQWPQVPCTLCTGRTDPTAPRDLVETMMPQNRVALLDAGYHPVLSFASDVSQSVHLEAVARQPDWQYRVMRSQPKAIVKAMWKAERETIASGGVGGQGGSRRSGDAAKRRYIRRKERNNNSNKEAGSGAKAAAVAAGGAGGNGSSSVGGGDSGNGTGTATTSSSTTPTTTPLVANTAARGKRQPQHPTGANSSSSLWPDSRQRQRQRHHSPSSTSISALSGAKKARKSATNSSSSNSTQQQQNHHGTKINNHHLNGYGDQWGEQSRSRRNSSPSNSHKNERTSERRVRPIYDINNIVIPYSMLAQSKMEIIPYKEIPIPKWRIVDSDNDKGKHSSDESMERKLSNGCVASKSEELAKQQLPPPPDQDQEQPALQPPKVNGLKENQAVKHNNNNNTNNNNNKNGLVNGNAKKDELKAAEDHDTQSKEDDDPKEKVVKPKLNGNLIKNPIDKTAETQDKIAQPAPEPPLPKRPKLETPTSNEVTKANGQLVQQQLESRESEEEPQHVDEDLSDEAFIMRHQRALLEERRRFETFLKFPWSTRSRANRRVDSRAESSGANTPDPASPAPHLGGPGHDNESIPSPLAYPLDAFNESGELLTGGQARQARRRTTSSKLKDQLERRSTTPDLRESYTVMPSPFEPLNFPLSDEVYQRLLAETYAPPRSMTVSKRAKSKSISSNCDGGNTFTGGSGSRRSSKCKIKPNGQLNGQLNGHPAAAKLNGIDAANEGGISEPEEEEMLLEDEDDDYPKHHLAPLDDEEPSTPDVEHELYDSAIDAYLADPEALEEDMGEDPFEDDDPNDPEWKTRTEGVRSRRI

SEQ ID NO: 40735 - DNA, 8590 bp, DROSOPHILA
tcaaaatagcaaaaactttgagagcggctgcagctgcgcagtggcacgagacaagacaagttccctgcctttggcatcataagtttgcctgtttgttttcccgaaattgcctcccggaaactttgcagtcagggctgtcaacttgggacccttatcctttcttggaagacattacaatgcacctaacaaaacatgtcccttctagggaaacccgtatatatttatatatatatattggttctataaattatataatagtcttcattataaattctaaaaaactttataacaatcaagaaaactgaactatttttataacgtaattcacacaacaacagcttgcagtaacaaaaacaatactttcttttcagtctcacgatttgctcacgtgactatcccttgcgacattgcctggaactttaaagctgctgctgaatgttgataagcaataagaaccgagacagcgactgctgttgcatcaaaccaactcggaaagggccgaacttttttgacagacgactaacaatgcaaagaagaaggttattcagacgttcgattgctggtggactgctagcacttactttccaaaaaaatgaaaataatacgagttctttaattaaaaactgaagaaaatttgatttaagcccaaatctatatgactatgatatttttttgaagaaagccactacttcgtatacgcaataattattcgtatagttatgcaagcagtgaaccataactgcttgattgaatacgctttttcgacttccggtttgcctgcttggacttatacgcaagcagtttgtacatttcttagcattcagcttatgacagccgcacgtatcagttactatctgaatggcgtgaaagcttttaggtacgagctttttaaggtactcaaaactcaacatatatcatttcattaattagtgtataattaaaaaattaagaaataaaaaaaccaggtaaatgttaactttgataagtaaaagacggttttgtcatttaatgcatgtatttttaacgcttttctttgtcaacttagaagccagtcgcattttacggcgaccataagtacagattttttaaataaataatataaatagctaacatctagggaagtcataaattaatttaaattattttagggagagtccagtcggtggccactgggaagtctagacctcgttgcactccagatagatctggcgacagtcgaatccggagcgacctctacgtccggcgtcgtacagctcctcgaagttgctgccactggtgcggcctaggacatagctggtggcataactacgaaaggacaaacaaaatatttattagtatttttttaaagttttagataagttctttaaatattttcaaaaactaaaagaagcgggtcactaattaaatatatatactatatattaaaattacttcttgttttgcatagacttgattaagtactgaaaataagtatatatctttaatagataattctttttgatgagaccctagggcaacatactgctggtgtaactgtggcaaatacgcttcgaatgttccgaatgggaatatatcagtttgtacttacgatcccagctggcagaagatgctgctgccgccgatctcacggacgcactccgtattggcgtcgcacatgtaccgctgcgtgcacttgtcctccgaggtgcgataggttcggacgtagcccttcatcagcgagattccggcgacgacggcgtcgctcaccgagtcccgcttgcccatggagcgggcggtcagggagcggtgcgagaaggaggtcttcagggcgtccagcaggttcatcacgatctgaatgaactgtggatgcggaagggggagcgttttgttcagtggagtggagtgtgtgtgtgtgtgtgtgtgcaggtgttgattgggggacggggaaacatggggtagaggaagcattagtcaattagttttgcatttgctgtgccaatactaaagtggtgtcagtgttgtgtgtgtgctttagagcgtgtataaggtgtgtttgttgctgtgcatagaaacaatgtacattctgggcacggggcaacaagattcaggtgtaaattattcaattaattagactagactaaaaacatattgaactcaaataaaattacttagctaattactgcctagaaattgtatctcgtggaatattatgttatgtaatatcaatataaccaaaaccttattatatcaaccagcaattaattgtaaatgaattattttacccccttaatagatgtttaacaattccctcatctatttagccccaaaattcacacccaaatcttgttgcttggtgttgttctgtgtgttgtgaaagcaataaagatgttttacctcgccagcttgcttggccatcgagttgacttggtcggggtctctggagcctaaaacggcagacatcacagccaccaatatgccctgtgcgattattagcgaggtagaggtagaggaggtaggcgggaagcaatcataatcaagagaataagaagagccaggcacccagaatcagtatcagtatcagtataagatataggatatacataaaacaaaacgaaacgaaacgaaacggtaacaattgaacagcaaaaattacgataaagcaaaacaaaagtggcacaaaagcaatcagtgagtgtataccatgttatgggctaatggatcgatagattacctgcatgggagatccaccgttgtcgaccttatcgatgccatcgctaggggctccgccgcccagcaaggtgttgatgatgcgaagacctgcagagaaacggatagagatcagttatgggaacttttttgtttacctaagacactactaaatcaaaataatatgaatcttacccatggagataacattcgcccagggactgccgcccaagccaatggaactatccacatcatcggacttggttggtgagttgacggctccgttgaagaacatggtcatcacggtggatagcatgttagaccaggtgaaaccgccgggtcctcccacactctcttggatctgattggtctccaaatcatcctcgatatcgtccagagccaccttcttcgaggcattcggcttcaccgcaaactttctggccacactctcatcccggtagacaggtgactgggtcacctggtgctgcctctgatagacctcctgctgtggaaatgcgtaggtcatcagcagacaattgctggctactatggagagcagcaggtaggcgtgtactttccgttgattccacatgactactggaagagaccgagacgagaatgggttaaacctatttgaaattcattgggggacggacaacaagccatccgcataacaacactttcacattgcccaactgagtgccatggagtttcctgaacttaggcacgggttgagcattggaatcagcggtggcccatttggatggcacatgcttggcccgattgagatttggcattacattatattaatgaaaatacgttgttggacctgacatttgcagatatttacaataatcataatgtatttctctatttaattcttaataaagaaaacggtttttttattggtattactataagctcgtaactgtttttctaacgttgcaaatgtcaagtggcttcccccccccccccccccaccacgaagtcgaaaattttcccatcgaccaggccttgaatatgttacaatttccatgaaaactagataagaaagttgtagcggcgtgtaattaaaggcgaaacgtcttcacttgcttccgaaacatctagaaacgagtcaaactgctcccaattaaggtgtcggtcaaatgtaacctgttccccagtggaaatccacggaatgaagaggagcattcgaggcaggtatatcaaccgagtggcaggttgggcaacatagaaagccgccacagttgaggtggcaagtaccggcaattagcagcgacttcctcaccacaatcggttggctagatgtgtattagcaatattagcatcgagaaccattcagaattgattagtacgtacttgctgcaaatcgtaatgggatcgccaatgttagtggctgggtattcttctcctctggttcttctgtattgctacacaaccagtttcaactagcggttcttttcgctcagatgtcatgcaacaggttcccgttacaattaataaagccaacgaggctgaggaatgccaatggctgggagattgcattgatttccatttaattgctggccgagaacaggctctccagaatgggtcagcgtggaaatgtaaattgtgcggccattgattaatcgggcaactccatctcacggctccgaagagtcgagttttgatggcttgtgacacaatgcgacccagttccgtggaaattatggtggccatgtaaatttagaaagctgtttgagcgggagactgtggctttgaacgtgaatcagcgattagtggctaagataatggtaattaatagctggaatgtgtggcagagaaattttattgattgtgggaaattagccgtggaaattgtgatgatcaaattagtcacatcgatatcgccactctggccgtttatgacataattctactggcaagctggctagttccctcgttatcttcggccgccttctttctctcttgttaaaaagaaaacacgcaactctaattggaatctttgcacgcaactcttactttcatggcctggcttaaaacggcaattaaacatcttcacaaacaacgggcaatataactatttcaataacaaaataaaacgagagcagcaattacacttgccgttggtcaaaagtcgcaaattagaaagtgtggaaaccgcaaacggccacaaagagaaacaatttttcgagtcacggaggcgggggtgtaacaataaccgagttctttgcccagaaatatcattgtaatttatgtgctcgtctctcagatatttattttcattttcgtttgcggtctcgtgccaaagcacgctccactggctccttggtcaaagtcaaagatgatgatgatgataatgatgatgagaaagcggcaaaacgttcgtgatttgcggtaagtgagcaagctcttcgtcgtcgtcttgggtttctgggagtggatcggctggataggagggccctgagtcattctgcggggctcagccgggtttctggacggtcacggacaggtttccggctgagagaaactcaggcagcctcgaaaaattcacatttcactttcttttcgcccagaatcaagccaaggtttattgaccaagaaaaataacacaaaataaaaacttaattaagtgcttaagctcggcaattgcctgccgtcgagtgcttaaccttaattggaatgcccagcggctttctagcgagtttgtgccttaagtctttcgtttccactgacgcggtggtcagcaacccctgacagaaaaccgctaaccagctgtcaattggccaaaatgcgcagtaactgtgctgcattttaatgtgagcggtgtcgattgattattgagtaagaccctaagccgtgatgcaatcccagggcgggatgagctatacaacggttcactttttgcagagaaaacttcttctggaaagttttactgaccccgaaacccagtcggcagtgggcaaaatgacaaacaacttaaggctgcacgaaagcagaaccaattgcacttgcaatttccacagccattatggttatcagtcagctgcatttgatggacaaattgcaactgccattgttgagcttcgctttgtttaatccacaaatagtagtgcagttttcttaagcaaaacacattatctagcctgcttggaattgaaaaccgattcagtttggctcgtatccgaacggaccaaacataaactgtattaaacacgacttaacagctccaaagaaaaactttcacctcgctcagcctgacaacgacaaccgcaaaatgccaaaagcaacaaacggcggtcaatgaatgaaagttaaaaaaaaaaaaaaaaaaaaaaaaccgaaaaatacttgcttcaaggcagaaaaaggcaaagagtctagaagtgcacacaaggcgaatggttaaacaaaaagcagacaattttatcctttttacaggcaattaaataaatatattttctatgggagttggccaaagtcttggccaaaaggcaggcgttaattgggctatccacagcggagagagatattccgattccgagacagagacagagacggaacgaagtcggatacccacatcgaatcaaggccacagacaaaacggccgcaagacttctccacctgaaagtggggtgtgtggctgccttctcctgagcactcaaaaccaaaattctttggagcggcagtcaacaggcgcccatttgggtcagtgggcggccatcatcggtgcacgatgtgttggttgtttgacttgaaaagaacttggctgaatgcacatctccgtgtgcgtgtgcatgggcgtgtgtgttttttttttgtgcccgacgcacctcatcgcacctcgtcaacgaaatggaaggcccctcccggctcgaaagagaaccccctggtttcgaacgctttgacatgtgcatgcccctccgtccagtcgatgggtttctgtttgctttttcatgcaaagttgttaactcgtttaacagaaaatctcctctctttccgctactgcccggctgttgcctttttcattgctggatttatgccccgagttctgttatttctttttggcctgacccaaatatttggctcttgccatatagccccaatttgttcgacaaacaaacgcacgacacgactcgaggccaaatagtggcagtcgatcaattgtcaataactttctactacgaaattctagttgaacgcactgcagtatttgcgttgcgaattagccgttgttgttttcggtgtttaaattgatttatagtttttttttttttttataatttctatcgatgttgaaaataatctttttaacatacactaagtggtgcacattttagaagaatgccgttttttttaccctacaacaataaatatgcatgatttgggttatgacttgaaatatataccaaataaaacttgaatgaaaacaatctttgtcaacaaaaataagtgttttctgtgcatatatctatcttaataaacgtttgattttatcaatttgcccagaaaaaacatttatttcggtcattgaattaatgccacttcaatggcactaaaatgacttcaatatcctgtttccattgaaacattcctcttacctgtctatttatctgcagtctgttaatttgtcgagctcgaagcaatttaaattttaattacagctgcagctgagttagtttggctggtcgcactagaaaaagtgcagatttcagcacgcgattgtcaagcacacaattcacttaaaaattcacccaaaaactttgcacacgaaaattgctctctctttctgagacagtcggatcgatggcaactttctttcgttaatttcgattcgagagtgttcggctttaactgggcactacagctggtggttactggctttaaatggaggtgttgctgtgacggctgctaaagttgtctgaaacggcgatcgccttgaacttcagcttttatagcctgacccattttaccgtcttcgcgatgggcctggaatcgaaccgaagaaatgcagccgccgaggctcgaagtcgaacatgttggaagacggcgatagtttcacacttgtgagttgtctctagaaagaaggttattttagcatacaaagttgttaccattttaagatcagctacaactatataaaacaataaatatgagacaggtatatataaaatataataataatatttgtaataataaaggcattacttaacttttaaataaaataaatgttaatttctctattcagtagtgctggccaacttacaagccctgtgtatttttgaacggaaattggccagataagcatcactgatcgcatgcgtgtggtggcgcctgcgcagatgacaaacgaggctcgaacttcaaagtgcggtttgagctcgaacatgttgtggctagtcagatcgcaggtgtgacttcgtggacgcgatccatcttttgcctgttgtgttaactccgttttgtttgccattaccttaatgcgtttatggcccattgttgtctgctgcctgaaaaatgggcgttaacggttggtgttaatctacctggttgaactgccgtcaaggttttccatctcatttacatgtcgctggacagtcgatcatgttccttgatgtgggtgcagagttattgttctactgggaccttgactaggacagctcatcttgaaattgttttaaaagattcagaaacagagtgattcattaggcttaagccgattgcttggtccaatctcgagtcaatggtaaattaggaaacttctgggcaaagaaaacatttcaggggattgccaagaataaaagatgtgttctctttttttttttttttgcaaatttaactaaaagtgggttctcgtccccgtacagcgaccaccacttctaagagctcctgctggccaact

SEQ ID NO: 40736 - DNA, 1424 bp, DROSOPHILA
cagcaacacctccatttaaagccagtaaccaccagctgtagtgcccagttaaagccgaacactctcgaatcgaaattaacgaaagaaagttgccatcgatccgactgtctcagaaagagagagcaattttcgtgtgcaaagtttttgggtgaatttttaagtgaattgtgtgcttgacaatcgcgtgctgaaatctgcactttttctagtgcgaccagccaaactaactcagctgcagctgtaattaaaatttaaattgcttcgagctcgacaaattaacagactgcagataaatagacagatgtggaatcaacggaaagtacacgcctacctgctgctctccatagtagccagcaattgtctgctgatgacctacgcatttccacagcaggaggtctatcagaggcagcaccaggtgacccagtcacctgtctaccgggatgagagtgtggccagaaagtttgcggtgaagccgaatgcctcgaagaaggtggctctggacgatatcgaggatgatttggagaccaatcagatccaagagagtgtgggaggacccggcggtttcacctggtctaacatgctatccaccgtgatgaccatgttcttcaacggagccgtcaactcaccaaccaagtccgatgatgtggatagttccattggcttgggcggcagtccctgggcgaatgttatctccatgggtcttcgcatcatcaacaccttgctgggcggcggagcccctagcgatggcatcgataaggtcgacaacggtggatctcccatgcagggcatattggtggctgtgatgtctgccgttttaggctccagagaccccgaccaagtcaactcgatggccaagcaagctggcgagttcattcagatcgtgatgaacctgctggacgccctgaagacctccttctcgcaccgctccctgaccgcccgctccatgggcaagcgggactcggtgagcgacgccgtcgtcgccggaatctcgctgatgaagggctacgtccgaacctatcgcacctcggaggacaagtgcacgcagcggtacatgtgcgacgccaatacggagtgcgtccgtgagatcggcggcagcagcatcttctgccagctgggatcttatgccaccagctatgtcctaggccgcaccagtggcagcaacttcgaggagctgtacgacgccggacgtagaggtcgctccggattcgactgtcgccagatctatctggagtgcaacgaggtctagacttcccagtggccaccgactggactctccctaaaataatttaaattaatttatgacttccctagatgttagctatttatattatttatttaaaaaatctgtacttatggtcgccgtaaaatgcgactggcttctaagttgacaaagaaaagcgttaaaaatacatgcattaaatgac

SEQ ID NO: 40737 - protein, 314 aa, DROSOPHILA
MWNQRKVHAYLLLSIVASNCLLMTYAFPQQEVYQRQHQVTQSPVYRDESVARKFAVKPNASKKVALDDIEDDLETNQIQESVGGPGGFTWSNMLSTVMTMFFNGAVNSPTKSDDVDSSIGLGGSPWANVISMGLRIINTLLGGGAPSDGIDKVDNGGSPMQGILVAVMSAVLGSRDPDQVNSMAKQAGEFIQIVMNLLDALKTSFSHRSLTARSMGKRDSVSDAVVAGISLMKGYVRTYRTSEDKCTQRYMCDANTECVREIGGSSIFCQLGSYATSYVLGRTSGSNFEELYDAGRRGRSGFDCRQIYLECNEV

SEQ ID NO: 40738 - DNA, 9387 bp, DROSOPHILA
aatggcgggatctggagttgccaagcagatatttgccctcgatttcgagatctttggacgagtgcaaggtatgcaatgcatttttctgattcggcttgttaaacagcgtattaaattttgcaggtgtgttcttccgcaaagtaagtactgggaggcctatatatatatctggaaatcaacatttaacttatgtacatttttggcttagcacacgtcgcatgaggctaaaagattgggagttaggggctggtgcatgaatacccgggatgggaccgtcaagggacaactggaggctcctatgatgaatttaatggaaatgtaggtaccgctgcactccactaattcaatcatttaaccatcgcccactaatttgaaggaaacattggctggagaacaaccgaattcccaacgctaaggtctcaaaggctgaattttcgcaaatccaggaaatcgaggactatacgttcacttcctttgacataaaacattaaaaacgaattattagctctttcgttgtccatccaattccgaaacaaagtctaaataaattaccagggctgcaacttgcgtaagcaggcatatctgcattgctatcgactgagtcgataacattcgatagtatgaacataagaaatattacgtttcgcaaaactgaacccagtactgaagtacaacaataaataaataataaattatttaaaacaaggcggaaaattattccgagaatcgatagtcgctagtcgaaagtgcgcaccactccagtatctactcgatatattgctatcacagccgatagtttgcagctccctgccatagacactggtcatctcgctcgcacacacaacagtgggccgcgccaccgccataggcggcgcacgtgcaagagcgagacaaccagctgggcgacagcgcactttggtctggcacagaaacgagtacagcttcgatacacgtcgttttgccaaaagcgtagcagagcagtctaagcgatgaaaaaaataaatgaggaaaaaagtccgtgaagcgaaaaccgtaattcctacagtgcgagtcacgccattgtgtttgcaaaaaatatttgccaattgtgctacgggcaatttttcggaacggccgaattgtgcgtataatgaaaaaaaatactacttaatttttaagcaatttacaaattcttgcgtgctgcctgcctgctgtcggtgtgttcttgcttgcatgtgttagtgagtacgattactttcgcgctgaaaacctttttccactgccctttcgctggaatctgggcgaatatagataggacacaaagcacatataactgatttttactgcagaattgatcgagacatgtggaatacaataaatgagattgtgtaaataactgaatatagtggcgcatacagttgcacgtgtgtgtgtgctagcatgtgcgtgtgtgtgtgtaaaggcgcgagtttccgtttgcctaggctaattgtagtggaaaaactcaataaacggaattacataaaaacatggtggcatgatcggcagtttcccgccggcagaagatgcccaatcttggaaaattgtaattttcgaaagtaaccgcaatgatttcgtcagtatgtaaagtagtctgtcagtccctgcatatgtttgtgtgtgtgtgttctatacagttttttttattgcgcatcatggtgtgcaatagcgcgctttctgacctctctctcgctctcatgggttctcttgttggccaaagcgacgctgtgtgtgtgttgtgtacgcatatgtagcatatgtacataacacgccggaaaagacaaaaaaaaaaaaccattccaaattttgaaatcttacggaggcgggcggtttaaacgagataaaaaataaatacaccaatattgttcttttatatgataacgcagtagtctcggaccgaatagtatgcctttattttgtcgtcctaacgctgaattgccgaaaaataatagcccgtttttggaaaattctcgacaggattagcataaagagacgccttaggagtcgaacgaaccaaatgccgcagcagccggccaacgtattagcatcagaacgatggccccagcgctcacagccgagccactaagtccaaaggagaagctaaccagcaccgcctcgccctcggcccgcagctcctcggaaagcggaggagttggatgtgcagttggcttggtcaagaagccggcaacacccacgccggccacggccaccacgcggattacccgctcatcagcggcagcggcctcagttaccgcttccccgcatctacaacagcagcgatcctcgctagcaatcaataacaagcgaaagtcgggcaacgctaaagccagcaatgaaccaatggggctgagcacagccccgactccacacagcaccacttcaccaaatccctcgacggatactgcggcagcctccacctctgccgtggagcacaacaataacgacagcaacagtacctccgccggcaacagcacctccgccgacaacagctccacgcccaaggacaactccaccgctcagctactggcggatctaaccatcaactttgaggagaccatatccgcggagatttgcctgaggaaaaccctacccgatgtgagtctggggaaagagccggttccgcctgcctcggtgctggcagtggccacaagttcaacgagtgctggcagcgctctatccttatctgcagtggatgaggtgaccaagatagaaatagataatatagaaggtgggtctaaggaatcactccaaataaatagtcttgactcaaaatttctctcgcccactgtttcagagcgtctcagccagctagatgggaatgccactggaaggcccgaggagcatgtggcaccaccttctgttccggtacccgtgcaggaggcgccaaacacgcccaccaggccacaggcgccaccaagtgcccatcttgagtctccgcagccggcgcgaacacagcagcagtccattcaacagatgacgccgcaaagcaccaccagttccaacaattttctcaaagacggagcagctggtgctgttctagaggatcaggatatcgaggaggtgcttaaagcgctcaaaacatttgacggtggccatgttaatccagataccatttgcgagtttttcgacgaagtttgggaagaggcagcaccggcagcgccattgccgcccgcgccacccgaaaatgtggtggatgtgccgggcgcgaagcccagctgcagtggcatcctcgttagcggcagcaacatttcccagccgaatgtgattattaagcaggagcagcggccctggcaggagagtcatgctgagttggagcagcagcagcacgttatctcgcgcaggatcgagtttttgctacgcaggatgcgcaagctccaggcgcgagcgatgtgccgtcacgcgagcgaggaggtggttggtatcatggagtggtctgcccgcagttcccataaggctccagttccagcgagaagttccacgctgactgagcaggaggccactgtcctatcgattgtctcagggcgtccgagctcaaccttctgggaggagcagaacaagcatccgctgcctgctagccagatgagtaatgtgatccggcatattgcgacggcggcaaagcatcagcaaatctgccactcagccagcggaagctctgctactctggcgccatcctccagctggtacaacagctgcaacagctctgcgctgccgatgaagcgtccacgaaagaatcaacttgatgcttcggttgcaacgggtgccacacccactgcacctgcgccaggagcggtaacatctagacaggcagctggcacgacgggatccgcaacgggttcgaatacaccgcgggcggatgatatcgtgcccggctacgacacctatgtgactaatgaactcacccatgtgtctggcctgctgcacacggagcttcgagaagtacagaatgccatcgactcggacgccacggagtcaagttctggtggagaatccgctgacgagatggtaacctacaacaacaaccagcagctctcgctaccaatgtgagtacttcgtattatttatgtacatacttaggttatcgggaatattttacaagtaaactttcttccatctttttttgaggggggttttcagcttctgtcatctttttaagatcattcttttgctatagaatttgtccgattaatgttggctcggtagttttctttcaaaattgttttgctttgacaggcattttaaacatgatttaacgtcgtccttagcaattgaaaagttgtaataggctttgattagagttgttgtacctaattatcgcatttacaatgcgatatttcaactatttcaacagtttttattaaaattgttaattagcgattatatatttcttttagctttttttttgtggtattctctttcctaatgctcttgaaatttgattctttgcagcactcgacgcgctgtctggcgatattcgagagatcgtgcagccattgccctgcgctggtcctggctctgctcccagctgaccgatttggagatgaagatccgtcagcacagcgacctttacatggatctaactcagtccaagggcgagatccagctggagtccacagctaagacctcaccgtcgctagcacagccggcaaatggcattaaggaggagcccggatccgactacctctgcagtcgggcacgtccattggtgctgtccgagttccgcaaacgcaagctcttccagaccacgaacatgcacacgatttccaagaaagccgcacgccccagcaacattaagtgtggctgccagtggccgcaggtgccatgcacactgtgcacgggtcggacagaccctacggcgcccagggatctggtcgagacgatgatgccgcaaaaccgggtggcattgctcgatgctggctaccatccagtgctcagcttcgccagcggtgagtgggaggttacactgagtggacccatttggttttcgtccatgattatttcttatcatctgtgatggtttaacattatttattctacacttgagatttgaactgaattgattaaaaagtaaaactttaaaatgcaatacttgcaaataatttttattcgaaactaaaacattaaaatcctcgtattctttacattggattccaaaatgaaaagaaatagtcggatgatgacagctaaagtggaattatgtttgaatatattcttatccctatcattcttgtttcccagatgtcagtcagtcggttcacttggaggccgttgcccgccagccggactggcagtaccgcgtcatgcgcagccagcccaaggccattgtcaaggccatgtggaaggcggagcgcgagacgatagcctcaggcggtgtcggcggacaaggtggcagccggcggtcgggcgatgcggcgaagcggcgttatatacgacgcaaggagcgcaacaacaactcaaataaggaggctgggagcggagctaaagctgctgctgtcgccgcaggaggagcaggcggaaacggaagcagtagcgtcgggggaggggatagcggaaacggtactggtactgctactacttcttcttctactacgcctactacaacgccacttgtggccaacagtaaattattgtaaacatgacgaaattcgataattgttattaacataaaacaacaacaatcttttgcatctcttcttcttctttttctttgcatcgatcaaccaaaacacgaaattccaccaacaccatcaacaaacaccaccaccaacaacaacaacgaaaaaccccaccaattgttttattttgccattccgttcttgtctccgtttcgtccccgttccgcatccaaatcacggacttgacgcaacatcagcagcggccaggggcaagcggcaaccacaacacccaactggagcgaacagttccagctcgctgtggccagactctcgccaacgccaacgacaacgccaccacagtccctcctcaacctcgatctcggcactgagcggcgctaagaaggcacgcaaatccgcaaccaacagcagcagcagcaattccacacagcagcagcagaatcaccacggcaccaaaatcaacaatcatcatctcaatggctacggcgatcagtggggggagcaaagcaggagtcgtcgcaactcttcgccctccaacagtcataaaaatgagaggtatgtttcggattcaataactgatcccagggattcgcgataagtagtcctgctttttttttataagatagattgttatatataatttatatgtatgtttcccttgcagaacctctgagcgtcgcgttcgtcccatctacgacatcaataacatcgttataccctacagtatgctagcccagtcgaaaatggagataattccctacaaggaaatacccatacccaagtaagtattcaattttgcgctaagtccttattttatatatatatgtcgcataatgtaaaataccaagatttgtgtatatctattaaaatcacccattccatctttgctttcaggtggcgcattgtagacagtgataacgataagggaaaacattcgtcagatgagtcaatggagcgcaaactgagcaatggctgtgtcgcatcaaagtcagaggagctagccaaacaacagctaccaccaccaccagatcaagatcaagagcagccggccctgcagcctccgaaggttaatggtttaaaggaaaatcaagcagtcaagcacaataacaataataatacaaacaataataataataaaaatggactggtaaatggtaacgccaaaaaggatgaacttaaggctgcagaggatcacgatacgcaatcaaaagaagacgacgatccaaaggaaaaggtggtcaaacccaagctcaacggaaacttgataaagaatccgattgacaaaactgccgaaacgcaagacaaaattgctcagccagcaccagaaccaccactgccaaagcgacccaagctggaaactccaacctccaacgaggtcaccaaggctaatgggcagttggtgcagcaacagctggaatcccgtgagagcgaggaggagccacagcatgtcgacgaagatctttcggatgaagcgtttattatgcgacatcagcgagctcttctcgaggagcgacgccgcttcgagactttccttaagttcccctggagcacccgatcgcgtgcaaataggcgcgtcgatagtcgtgccgaatctagtggcgccaacacaccggatcccgcctcaccagctcctcatctaggcggccctggtcacgacaacgaaagcattccctcgccgctggcgtacccactggacgcttttaacgaaagcggtgagctgctgactggcggacaggcacgccaagctcgtcgtcggactacgtctagcaagcttaaggatcagctggaacggcgcagcaccacgcccgatctgcgggaggtaagtcgatgtccaagtttcacatttgttgaactcatatataaaataaattctggttgtgcctattacttttgccgaattttgttttcaaactgctttgaatgttcaaatactgattgtatagaatagttttctaattgaaacccttttcctttttgtatagtcttacactgtgatgccatctccctttgagcccttgaactttccgctctccgacgaggtctaccagcgattgctagccgagacatatgcgccgcccaggtcaatgaccgtctcaaagcgggccaaaagcaagtcgatatcctcgaactgtgatggtgggaacaccttcacaggaggcagcggcagtcggcgcagcagcaagtgcaagattaagccaaatggtcagctaaatggccagctcaatggccaccctgcggcggcgaagttgaacggaatagatgcggcaaatgaaggtggaatttctgagccggaagaggaagagatgctgctagaagacgaggatgacgactatcccaagcatcatctggcgccgctggatgacgaggagccgtcgacaccagatgtcgagcatgagctttacgactcggcgatcgatgcctatctcgctgatccggaggcgctagaggaggatatgggcgaggatcccttcgaggacgacgatcccaacgatccggagtggaagacacggaccgagggtgttcgcagcagacgcatctaagaccaaaatccaaagttttcgttatttaagacttttaaacgatttgtcaatttttaaagccacaacacacacacacccacaaatcagccggagcagaccaacaaattttaatttgtttcaaacggtttggtttgcactcacaacagcattgcgtactctaagcaatcgtctaagttatttagttctacgagcccacaacaaaaaaaaaaaacacagatacgctacacacaagtacacaacaaaacaaacacgaagcagaagcgaaaatcttgaaacaatgtaaatacaagctaaacgcatagagctaagcagttactgataattgtacactaaccaacgatcaagaaatcatcgaacgcacccaccacgtcgcgtggacgtggtggatgcggtcggttggagcactggtcagcggttaagtaggcaccacaacaaacccacttgggcttcaagccgaagtgcgctaatgataaaaatattaagctaatctaaatatatatatatatacgaaaacatttaaatatataccatatgcatacattaacgtgtaaatgccgaagagagcagttagctgaagatttgaaatgtattcgcacctgcacacaaacgatataacaactaagctatagaaggcaattatctgtaaattgatcaagcttaaccattagctaaccaaccattagcctttagcccagcaagtaatcagtcggcgttggggccgtgtttttcttatattttaaaaagtttatcagctgtaaatgtatagagcggaattcgaaaggcggtgtgtgaaaatggatcgaacgataaatgtatgtatatgtattttagttgcttaggcgttttcatttctaccttataaacacgttagcggctaattgtagcaattaatactataaaacacaaaaaaaaaaacaaaaacaaaaaacaacaaccataaggaaacctagcgcggctatgtccgtgaaaatgtttattctaatttcgtttttactatctactgcgtatgtttcaccgcaaagctagaatccagtttaattcgttaaaacttgaaaagaaatacaacagaaatgtgaagattaactaaggaccgcaaaaatacagaattatatattcttaaaaatgacacatggagcgccagaagtgatatgctgggaccaccatcgccagatggtggaatctggccaacatgtgtgtcg

SEQ ID NO: 40739 - DNA, 5110 bp, DROSOPHILA
aaatgaggaaaaaagtccgtgaagcgaaaaccgtaattcctacagtgcgagtcacgccattgtgtttgcaaaaaatatttgccaattgtgctacgggcaatttttcggaacggccgaattgattagcataaagagacgccttaggagtcgaacgaaccaaatgccgcagcagccggccaacgtattagcatcagaacgatggccccagcgctcacagccgagccactaagtccaaaggagaagctaaccagcaccgcctcgccctcggcccgcagctcctcggaaagcggaggagttggatgtgcagttggcttggtcaagaagccggcaacacccacgccggccacggccaccacgcggattacccgctcatcagcggcagcggcctcagttaccgcttccccgcatctacaacagcagcgatcctcgctagcaatcaataacaagcgaaagtcgggcaacgctaaagccagcaatgaaccaatggggctgagcacagccccgactccacacagcaccacttcaccaaatccctcgacggatactgcggcagcctccacctctgccgtggagcacaacaataacgacagcaacagtacctccgccggcaacagcacctccgccgacaacagctccacgcccaaggacaactccaccgctcagctactggcggatctaaccatcaactttgaggagaccatatccgcggagatttgcctgaggaaaaccctacccgatgtgagtctggggaaagagccggttccgcctgcctcggtgctggcagtggccacaagttcaacgagtgctggcagcgctctatccttatctgcagtggatgaggtgaccaagatagaaatagataatatagaagagcgtctcagccagctagatgggaatgccactggaaggcccgaggagcatgtggcaccaccttctgttccggtacccgtgcaggaggcgccaaacacgcccaccaggccacaggcgccaccaagtgcccatcttgagtctccgcagccggcgcgaacacagcagcagtccattcaacagatgacgccgcaaagcaccaccagttccaacaattttctcaaagacggagcagctggtgctgttctagaggatcaggatatcgaggaggtgcttaaagcgctcaaaacatttgacggtggccatgttaatccagataccatttgcgagtttttcgacgaagtttgggaagaggcagcaccggcagcgccattgccgcccgcgccacccgaaaatgtggtggatgtgccgggcgcgaagcccagctgcagtggcatcctcgttagcggcagcaacatttcccagccgaatgtgattattaagcaggagcagcggccctggcaggagagtcatgctgagttggagcagcagcagcacgttatctcgcgcaggatcgagtttttgctacgcaggatgcgcaagctccaggcgcgagcgatgtgccgtcacgcgagcgaggaggtggttggtatcatggagtggtctgcccgcagttcccataaggctccagttccagcgagaagttccacgctgactgagcaggaggccactgtcctatcgattgtctcagggcgtccgagctcaaccttctgggaggagcagaacaagcatccgctgcctgctagccagatgagtaatgtgatccggcatattgcgacggcggcaaagcatcagcaaatctgccactcagccagcggaagctctgctactctggcgccatcctccagctggtacaacagctgcaacagctctgcgctgccgatgaagcgtccacgaaagaatcaacttgatgcttcggttgcaacgggtgccacacccactgcacctgcgccaggagcggtaacatctagacaggcagctggcacgacgggatccgcaacgggttcgaatacaccgcgggcggatgatatcgtgcccggctacgacacctatgtgactaatgaactcacccatgtgtctggcctgctgcacacggagcttcgagaagtacagaatgccatcgactcggacgccacggagtcaagttctggtggagaatccgctgacgagatggtaacctacaacaacaaccagcagctctcgctaccaatcactcgacgcgctgtctggcgatattcgagagatcgtgcagccattgccctgcgctggtcctggctctgctcccagctgaccgatttggagatgaagatccgtcagcacagcgacctttacatggatctaactcagtccaagggcgagatccagctggagtccacagctaagacctcaccgtcgctagcacagccggcaaatggcattaaggaggagcccggatccgactacctctgcagtcgggcacgtccattggtgctgtccgagttccgcaaacgcaagctcttccagaccacgaacatgcacacgatttccaagaaagccgcacgccccagcaacattaagtgtggctgccagtggccgcaggtgccatgcacactgtgcacgggtcggacagaccctacggcgcccagggatctggtcgagacgatgatgccgcaaaaccgggtggcattgctcgatgctggctaccatccagtgctcagcttcgccagcgatgtcagtcagtcggttcacttggaggccgttgcccgccagccggactggcagtaccgcgtcatgcgcagccagcccaaggccattgtcaaggccatgtggaaggcggagcgcgagacgatagcctcaggcggtgtcggcggacaaggtggcagccggcggtcgggcgatgcggcgaagcggcgttatatacgacgcaaggagcgcaacaacaactcaaataaggaggctgggagcggagctaaagctgctgctgtcgccgcaggaggagcaggcggaaacggaagcagtagcgtcgggggaggggatagcggaaacggtactggtactgctactacttcttcttctactacgcctactacaacgccacttgtggccaacacagcggccaggggcaagcggcaaccacaacacccaactggagcgaacagttccagctcgctgtggccagactctcgccaacgccaacgacaacgccaccacagtccctcctcaacctcgatctcggcactgagcggcgctaagaaggcacgcaaatccgcaaccaacagcagcagcagcaattccacacagcagcagcagaatcaccacggcaccaaaatcaacaatcatcatctcaatggctacggcgatcagtggggggagcaaagcaggagtcgtcgcaactcttcgccctccaacagtcataaaaatgagagaacctctgagcgtcgcgttcgtcccatctacgacatcaataacatcgttataccctacagtatgctagcccagtcgaaaatggagataattccctacaaggaaatacccatacccaagtggcgcattgtagacagtgataacgataagggaaaacattcgtcagatgagtcaatggagcgcaaactgagcaatggctgtgtcgcatcaaagtcagaggagctagccaaacaacagctaccaccaccaccagatcaagatcaagagcagccggccctgcagcctccgaaggttaatggtttaaaggaaaatcaagcagtcaagcacaataacaataataatacaaacaataataataataaaaatggactggtaaatggtaacgccaaaaaggatgaacttaaggctgcagaggatcacgatacgcaatcaaaagaagacgacgatccaaaggaaaaggtggtcaaacccaagctcaacggaaacttgataaagaatccgattgacaaaactgccgaaacgcaagacaaaattgctcagccagcaccagaaccaccactgccaaagcgacccaagctggaaactccaacctccaacgaggtcaccaaggctaatgggcagttggtgcagcaacagctggaatcccgtgagagcgaggaggagccacagcatgtcgacgaagatctttcggatgaagcgtttattatgcgacatcagcgagctcttctcgaggagcgacgccgcttcgagactttccttaagttcccctggagcacccgatcgcgtgcaaataggcgcgtcgatagtcgtgccgaatctagtggcgccaacacaccggatcccgcctcaccagctcctcatctaggcggccctggtcacgacaacgaaagcattccctcgccgctggcgtacccactggacgcttttaacgaaagcggtgagctgctgactggcggacaggcacgccaagctcgtcgtcggactacgtctagcaagcttaaggatcagctggaacggcgcagcaccacgcccgatctgcgggagtcttacactgtgatgccatctccctttgagcccttgaactttccgctctccgacgaggtctaccagcgattgctagccgagacatatgcgccgcccaggtcaatgaccgtctcaaagcgggccaaaagcaagtcgatatcctcgaactgtgatggtgggaacaccttcacaggaggcagcggcagtcggcgcagcagcaagtgcaagattaagccaaatggtcagctaaatggccagctcaatggccaccctgcggcggcgaagttgaacggaatagatgcggcaaatgaaggtggaatttctgagccggaagaggaagagatgctgctagaagacgaggatgacgactatcccaagcatcatctggcgccgctggatgacgaggagccgtcgacaccagatgtcgagcatgagctttacgactcggcgatcgatgcctatctcgctgatccggaggcgctagaggaggatatgggcgaggatcccttcgaggacgacgatcccaacgatccggagtggaagacacggaccgagggtgttcgcagcagacgcatctaagaccaaaatccaaagttttcgttatttaagacttttaaacgatttgtcaatttttaaagccacaacacacacacacccacaaatcagccggagcagaccaacaaattttaatttgtttcaaacggtttggtttgcactcacaacagcattgcgtactctaagcaatcgtctaagttatttagttctacgagcccacaac

SEQ ID NO: 40740 - protein, 1570 aa, DROSOPHILA; identical to SEQ ID NO: 40734

SEQ ID NO: 40741 - DNA, 4082 bp, DROSOPHILA
aatataattcgttggccgtcggtgggttaacaatcctccggcccaccgacgggcacataataatattaaaatgttaattagcgtattaattcagttcggtgatgaaagtgtgagcggtacaaaacgtgatacatacatatatatgttggtatgctgtgctgggactcacatttctgaaaataatttataagataatctagaaaaaggtgtctttggtatatggttaaaaaaaatccttaaaatatagagtaattaaaaaataaaactatataggcatattctttacagttcgcgaattaataacatttcacatatttatgttatattacttaagtacagaattttgtattaaattaattacaaacaaacatttaaaaaaagtgttgaaatacttctactttaacctatagtttctcgtttacatttatagctctcatttatcgccagcgcaatttttaattatttaaatgaataagtccaacgaaaaaagctgccagcttcgtctcaatatttatagctttttaaacaaataaacggaattcgcagtcgacaaaaaggccacccacaatccagcgacccagggaaaaagccatgaaaatgcactcagcctcaaggaaacagttggccagaaaaggacagatggtggtgcaagcgagacaaagcacaccaagagtgccaggataagttcccgtttcagtcccaggctccaatccgaatccgaaatagttgattttaatgatgtacataataaaattcccattcgttttgtgccaatgccactgcgttccagtctgcatttcatgtttacactgattgtggaacactcttgtgggcgagaaagagacacatcgatatgggggagcaagacaaccatatacgactctctccctcgcgcgctctagagatgatgctgcgagtggaagtggaatcggaatgcggagggttgaaagccgtacccccaaccaaaaaccgaaactgaaattgaaactgagattgtgcgactgagggccagtcgagtcaatttcgaaatcattcgttagtcgtaggcctaaacaagcggacacgcgcgggtcttcattcactacgatattttccggccacggagttacccatatagcctgatctcgttcaaatcgattatgccaagtgtagtttcttaaaatctaagaacgatttgaacaataaacgttttcgtgctcaaccgtttgacaaaatcggtttcgtgcttgtgctaaaaaggattcaagatcatttgatcatttgatcttgaatatatagatttacgtgttttaatcgtatcgtgatcggaaaatattaaaaaccctatataaatataaatactgcgtacatcggaaactgaagtgctgacattataattgaaaacaattcaagcaaaatacgtagttaaacaaaatttccaaaaaattattaaggaactcaataagttttataagcataaagcaggatatccccttaaataatttttttggtcttaattacatagaagtaattaatcaaaaatatttgaacaaaaagctgctattgcttaaatactatttataaccaaactgaaaagcctaaatcgttaagattcgatcttctccgcgtgaatacctatccgtagaccgatcccaagctgggtagtccattcctgagcattacgccggcgggtggcagcagcaatccctcgcccacgcctccaccgccagacgccaaggtggcggccaagcagctggcccagagcttccagctgtccgccaattccgcctttaacttggcccttccgccggcattttaccgagcaccaccgcagcagcacccggagtgcctggactacggccacgaagcgcccgagatggatctgataaatccgtatatgcgccatcatagttttgcggccgccgcccagggaagtcccccgtcggcggctcaacgtcatcatttggcggcggccatgagcaatggcttcgcggatgtccatgcccatgcgatggcggcggcggactatcaacaacagttggccgattaccacagtgcagcggcggcagcggccgtttatgccaacaacaataataataataacaataatagcagtaacaacaacaacagcagtccgctaatgttgctaaaggcggcacatggcggaggtctcaaggattcggactcgccatcgacgacaccgccacccgcctcttctagactccattctgactcctcgccatctccgcgatacgaacacaattccagtcccggtgtggacagtgccaagtcgtatgccttgagccagaggagcagcggagcggaggatccatgccagaccagcgaatccgccagtccaccgccgcagggccagaacgactacagtcccgagaatctcagcagccagagggcaaagttccagcaccatcatggagtgaacccactggctttgcacaatgccaaccatgccggaaaccccggatgtcacaacaacaataaccacatggaccacaagctcccactgagttttctcggtcccccgctggccgctcttcactcgatgaccacggaaatgaagggtcaaggagtcggtggatcgtcggcgtcggcaaatggcttgtcctatagccacagcccgaattcgcatttgatcagtgatcgcggatccggtggcagctcatcgtcgtcctccaccacgactacgaacaccaacagccagggtgcacccaatccgcacggcatcgataccatcctctccaaaccaccgccggtgacatcggcgggtctaagtgctttaacaggagtcaatccggtaagagaagtcagtcaaacgacaatccgtcaaacggacaaagtcaaaaggattaactcgaaagtatttctggccaacaaggtgcagacaaatgaatttccgaaacgaaaggagagggcgaaaccgtcacccaagaataagggaatgtgtgaaaagaatccaactaaaaccgaaagattgattaactgtcaatcaagtgtgcatatgagtagaaaacattggacaggccatgaatggaatcgaagcaggttgaggtcggagcgtgaggaagtcgggggagttggccaataacaataaatatcattaaattatgtatgccctccaaggtgttatgaatgaatagggtaaaagtctgaatgcaacaagtaagaaatggaaactggaaatggaagcgtgagtaacgagggaatattgcatatgaacaactatgcgcaagataccaaatttaaaaatgttgggatacattgttggactgtttttccagtggaatacaatttaaaaagtgtttatttgaataaaagtgaatatttgaacttccattgagtaaataactctattacaatggacggtctctccccaaatagctattaaacgaaagagaggcttcactcctccaccaaccagtcacacgaatggaaaacaatccaaactatacattatacgcagactcactgaatcgagactggctaatgactccgggcactgactgttgcaactaccgaactgccattgttgactcgcttctaatggggcacccacattaatcatgctttagcagcgagtgcaatgacaaacaatcggtatcggtaactcttttttgggggggcgggcccgtttaaaacgccattagcataccgtcgataattaccaagacgagccattagcggcagctcagaaaacagccgccgtattacgtgatattcatggatgagtcttaggatcgtagatcaaatagcagaagaatggacggcatatacactctgcgaattttgcaaactaattgaaaaccattgaacctggcacgttttccgtcgaataaaaggcaatcggatgaacttccgcacagttccggataggttttccccggtattttcacctttgtcttagtacgcgcccaaagtcaacttccagcaattgacgaacgagtgtgaattgcctttgaatttgccatttcgaatgaggtttactttttcgccagctgcgcaggcgttcgtacagagaatatcgaacgtgctcgtttttaggttcgttctcagtttcaaatcgaaaccgatcggtttcaggtaaatcc

SEQ ID NO: 40742 - DNA, 2688 bp, DROSOPHILA
actgagggccagtcgagtcaatttcgaaatcattcgttagtcgtaggcctaaacaagcggacacgcgcgggtcttcattcactacgatattttccggccacggagttacccatatagcctgatctcgttcaaatcgattatgccaagtgtagtttcttaaaatctaagaacgatttgaacaataaacgttttcgtgctcaaccgtttgacaaaatcggtttcgtgcttgtgctaaaaaggattcaagatcatttgatcatttgatcttgaatatatagatttacgtgttttaatcgtatcgtgatcggaaaatattaaaaaccctatataaatataaatactgcgtacatcggaaactgaagtgctgacattataattgaaaacaattcaagcaaaatacgtagttaaacaaaatttccaaaaaattattaaggaactcaataagttttataagcataaagcaggatatccccttaaataatttttttggtcttaattacatagaagtaattaatcaaaaatatttgaacaaaaagctgctattgcttaaatactatttataaccaaactgaaaagcctaaatcgttaagattcgatcttctccgcgtgaatacctatccgtagaccgatcccaagctgggtagtccattcctgagcattacgccggcgggtggcagcagcaatccctcgcccacgcctccaccgccagacgccaaggtggcggccaagcagctggcccagagcttccagctgtccgccaattccgcctttaacttggcccttccgccggcattttaccgagcaccaccgcagcagcacccggagtgcctggactacggccacgaagcgcccgagatggatctgataaatccgtatatgcgccatcatagttttgcggccgccgcccagggaagtcccccgtcggcggctcaacgtcatcatttggcggcggccatgagcaatggcttcgcggatgtccatgcccatgcgatggcggcggcggactatcaacaacagttggccgattaccacagtgcagcggcggcagcggccgtttatgccaacaacaataataataataacaataatagcagtaacaacaacaacagcagtccgctaatgttgctaaaggcggcacatggcggaggtctcaaggattcggactcgccatcgacgacaccgccacccgcctcttctagactccattctgactcctcgccatctccgcgatacgaacacaattccagtcccggtgtggacagtgccaagtcgtatgccttgagccagaggagcagcggagcggaggatccatgccagaccagcgaatccgccagtccaccgccgcagggccagaacgactacagtcccgagaatctcagcagccagagggcaaagttccagcaccatcatggagtgaacccactggctttgcacaatgccaaccatgccggaaaccccggatgtcacaacaacaataaccacatggaccacaagctcccactgagttttctcggtcccccgctggccgctcttcactcgatgaccacggaaatgaagggtcaaggagtcggtggatcgtcggcgtcggcaaatggcttgtcctatagccacagcccgaattcgcatttgatcagtgatcgcggatccggtggcagctcatcgtcgtcctccaccacgactacgaacaccaacagccagggtgcacccaatccgcacggcatcgataccatcctctccaaaccaccgccggtgacatcggcgggtctaagtgctttaacaggagctggcattccccgcttctcgatcgccgccgcagcagcgggaatggcccagtatctatcgcagagccaaggggcgccactgaagacccacgccggacacatagtggaccgcacgcacctgtactggccaggattacagggactggtggccaatcccatcgcgtggcgcgaacggctctccaacacgatgtccgccaatctgtctcaatcgcatcagcatcatccatcgaacgacaaggatggcaaaaagaaacacacccgcccaacattcagtggtcagcagatcttcgccctggagaagacattcgagcaaaccaagtatctggccggaccagagcgtgccaagctcgcttacgccttaggaatgtccgagtcgcaggttaaggtctggttccagaatcgtcgcaccaaatggcgcaaacggcatgcggcggaaatggccacggccaaaaggaaacaggacgatatgggcggcgataacgatggcgattgcagcgagaccatggatagcgataacgaaagtctcgatatgggcgagtccccggctcagaacaagagatgtcgcagcaacagttctgggtcctcgcagcagcagcaggataattatctcaatccggtaagagaagtcagtcaaacgacaatccgtcaaacggacaaagtcaaaaggattaactcgaaagtatttctggccaacaaggtgcagacaaatgaatttccgaaacgaaaggagagggcgaaaccgtcacccaagaataagggaatgtgtgaaaagaatccaactaaaaccgaaagattgattaactgtcaatcaagtgtgcatatgagtagaaaacattggacaggccatgaatggaatcgaagcaggttgaggtcggagcgtgaggaagtcgggggagttggccaataa

SEQ ID NO: 40743 - protein, 610 aa, DROSOPHILA
MDLINPYMRHHSFAAAAQGSPPSAAQRHHLAAAMSNGFADVHAHAMAAADYQQQLADYHSAAAAAAVYANNNNNNNNNSSNNNNSSPLMLLKAAHGGGLKDSDSPSTTPPPASSRLHSDSSPSPRYEHNSSPGVDSAKSYALSQRSSGAEDPCQTSESASPPPQGQNDYSPENLSSQRAKFQHHHGVNPLALHNANHAGNPGCHNNNNHMDHKLPLSFLGPPLAALHSMTTEMKGQGVGGSSASANGLSYSHSPNSHLISDRGSGGSSSSSSTTTTNTNSQGAPNPHGIDTILSKPPPVTSAGLSALTGAGIPRFSIAAAAAGMAQYLSQSQGAPLKTHAGHIVDRTHLYWPGLQGLVANPIAWRERLSNTMSANLSQSHQHHPSNDKDGKKKHTRPTFSGQQIFALEKTFEQTKYLAGPERAKLAYALGMSESQVKVWFQNRRTKWRKRHAAEMATAKRKQDDMGGDNDGDCSETMDSDNESLDMGESPAQNKRCRSNSSGSSQQQQDNYLNPVREVSQTTIRQTDKVKRINSKVFLANKVQTNEFPKRKERAKPSPKNKGMCEKNPTKTERLINCQSSVHMSRKHWTGHEWNRSRLRSEREEVGGVGQ

SEQ ID NO: 40744 - DNA, 4528 bp, DROSOPHILA
cgccgatcagatatatgtatatggatatatgctcgcatgtttgaacagaactgattttgaaacaagagcggtagctgaatacgtaaataatttattggctttgatcctataggaatgtgcggtagccgacaaacttcgttgatacatccagcagatacatccgaaagatagtttgcaccagacatatagtccataataatgtgcttaaacaaatcagaagagttcgttaactttaaggtacaacgaatacgttgtatgagtatttttaaataattttcttaaagtgtttgttttgtaattaaatacacttttctatgatgtcacaactaaaattaaatcaataaaagcaacaccgaagtaaacgtgccgtggaattaatgagcttcaagacgacattgtaaataagttagttcaattatccataagcaaaaacttcaaatatgaatttgtgtattctgaaatacaccgaaaagcattggaaacgacaaaagtttaatttttaatagtttttatttttctttgtataaaactaaatgccaatctttagacataccataactaggactataatagaataaaatacttagagacaataaagatcattcttagacttaacaatttgtatgtacaatagcatttgagggtgggaatgattactacttctacggctcttccgccggctaactttaaaatacaattgcaaacaagctcaaagatatatttacaattttaacgttttcataaaaaataatttttggatccgagctcaataggtgagtgtgagtgtgtgtgtggtggtatataggtgtatgtgtgcgagtgcaatgcaactacctggtcaggctgtctctttccagcaaaacctgtctgtccctatctctttccacttccctaagtgtgagcgagcacacgaataaatttacattttctttaagtaacaaaaaataaacaacgagggtttttggggcgactcctcccacttggttttttcgccgtgtacttagacacacacgaatattcccctcatggcactagccgcattgtgggccaccgcgaagccaccgaagtgggtggcctctgcaccacctagcttctgccgcttgacttccgcatgggcggtggtggtgttcggtgagtgggcggcggagtgggaggaactgctgctgctggtggtcaggcactcggcctccagttggtagaacttccggcgcggagccacctccacttcttgatcctcggagccgctgtcgttgaagctgtgcacggagctccgcgaggtcttcatgctcagatccatgggtccttcttgagcggaaacggtgggaggatgcactggtacaacgctggtggtttcgccgccaatggagcaaaccgaaacgggcgacaagctctgcatcttggccgcaaaactcagcgggctgctgctagtcggagtggttggcgtggctcggatggcaatgggatgcaggaggcttgcggacgactgatggctgtgcacggagtgaacatcctcctccaggcagacatcgatgggcgactggcgggccgaggaggtgggctgcaccactggtggctggctggcgggactaaagcggttctgcgactcaacggaatccacgctctggcggtgcttgtacatctcctgccggtaagcggcatcggcagcagaagccgctgcagcggcagcacttgcatggtagcctgggaagaggaggtgtgggggcagctggaagggcgactggtgcggtacaccgcccatcatgctgaagaagggcagggcggcggatgggtcggacagatagctgggatagcccagcagaggcatatgtggatgacgcggcacctgctgctgctgctgctgctgatgatggtggtgcaaatgggcggccatgtccccaaatccgggagtgtgtggcgagcccaccggggaagaggccgacggggcaccacccaccgatacgccacccgctaatggaggcgccttgcccgccgctgcggcggcctgttcgtgctcctgcagcagacaatggatcttgaaccagttggagcgacgtccgtagcgggatccccccttcgacatgcccacgttgtagcacttcctcaagcggcacgccttgcaggtggtgcggttcttcttgtcgatgatgcacttgccctcgttcttgcactcgctgatggtgctgatgttgttgtaagagcggccaaagaaggactgcaatggcgaagggaaggacgaatgtggcttagttatgtggtatgcaactcattagcaaaagaagagcagaaattcattcaagaacttaaggccaatggtacaacgatttgaatcgccgatggcctgttcctcgaacatttctaaaactaaccccttggggggttacgttctgctaatttatttgtcaatggatttcttgagacacaacttaccttgcagccctcgcaggtgaaggcgccaaaatggaagcccgccgccggctcaccgcacactttgcatgtctggttcatctggaagattgtaaagaaatcccgcgttagtaagggtttaatccactggtcgagaggtatatgtgtaatccacaagtaggcgaacggctctggacactaaccaagttgaacaccattttggaatgatatttgttggaattttgaatgcttttctcacgatcgctgtgaggatctgctgtatgatctgttcgcttggaatgctgctgagcaactgatgctgagctctaggcgggccaggatatatataggaaactgggaaaaactagacaggatgggcgttttttatgatcacaacaggccaaaaaacttaagctgccggattatgcaaccctatgcgttcattttcatttttttcgcgctgtccagtcataaaactcaggtagattttcttttttattcgaagtcattacgagtgctgcgaaaatagtgttccctaaaaaaatgcagcagcagtccagaccttgacgttcggccataaaaactcacgccgatttttcccgagtcaaacaaaaaatagaaaattcggcttatgaaaattgtgatttttttcccgctgcctcgggacgcaaaaaaataaggaaaagatggaaatgtggccgttagtttttcgcgtgaaacagtaaaaaataaaagtagtgcacaagggatcgtaaaatttgccgacggccgcgacccaaaaacaagaaccgtgaattgactttgatctcatgttgtctccctcgctcagaacttacctttttgcttttttttgttggatgggcactaggtttatgacgactttttaattgcagcgattcgcgatcgttgctgcacgttttctcactttggcagtttgtgtctgttattttttttttttttgttttgttttcggtttgcaagcacttttcgatcagtctgagtgattcaggttttcaacactttgattataattttggatacgatttgatgtgatgtatggtttttgatcgccgaaacaacgcggtttgggaatcctcgatgtgtgtaactgacacttcggctactagctgacgactgatttctggctgagaggttcgactggcaagaagcgtttctgtgtttcgcctactggccgaactctttggcttatgtactcgcactcacaccaaagcaaacttaccagttttcagccccagctctctgataaatcacggctgaaaccaccacctttaagactcggatcgagtgagagagcgatcgagcacgcacacatgcgcattgagttcgaaccccactcgagcgaaatgttagcagaatgttaacgctctgttgttgaatgaatagaaaacactcactcactcattcagatctcacgctcagtctctctctctctctcgattttgagttccctgtaatcaggctatttgcatggccctgatattattcgttattcgtttatttattaaagatactcgcgtgctaagggcggctggatttctcactcactcgaacaccacacacacacacacacaccacattgactaagctattgacttcatttttaacagctgctcatttttttggcatgggcggagccgttttggctgctcgaaatcgaaatggttggaggccaattcgcttggggttttcttttcaaagtccgccggtttttgggtacatttagagttgcctgtatgcctaacacctagtttgattttcaaaacctttttccgcgggaaatattcccactttctgtgtgattcacaaactgattctcaagatttcatgaaatgtgttaaaatttgcataaccgcgacttggcaataaattgaaacgctttaattagaagttaatcaataagagatctgcattgattcatagcaaaaaaacgatagttgagtattattgagtatgtaattgcgtccgaaaagttataaaaaatactatttagacgggctattacccggattcagaatgattcatattaaagtagttgatttgcaagctggttctaaaatagcatacaaaaataggtttaaaccatacaagttcaatatgaatagaa

SEQ ID NO: 40745 - DNA, 1579 bp, DROSOPHILA
agtagccgaagtgtcagttacacacatcgaggattcccaaaccgcgttgtttcggcgatcaaaaaccatacatcacatcaaatcgtatccaaaattataatcaaagtgttgaaaacctgaatcactcagactgatcgaaaagtgcttgcaaaccgaaaacaaaacaaaaaaaaaaaaaataacagacacaaactgccaaagtgagaaaacgtgcagcaacgatcgcgaatcgctgcaattaaaaagtcgtcataaacctagtgcccatccaacaaaaaaaagcaaaaagatgaaccagacatgcaaagtgtgcggtgagccggcggcgggcttccattttggcgccttcacctgcgagggctgcaagtccttctttggccgctcttacaacaacatcagcaccatcagcgagtgcaagaacgagggcaagtgcatcatcgacaagaagaaccgcaccacctgcaaggcgtgccgcttgaggaagtgctacaacgtgggcatgtcgaaggggggatcccgctacggacgtcgctccaactggttcaagatccattgtctgctgcaggagcacgaacaggccgccgcagcggcgggcaaggcgcctccattagcgggtggcgtatcggtgggtggtgccccgtcggcctcttccccggtgggctcgccacacactcccggatttggggacatggccgcccatttgcaccaccatcatcagcagcagcagcagcagcaggtgccgcgtcatccacatatgcctctgctgggctatcccagctatctgtccgacccatccgccgccctgcccttcttcagcatgatgggcggtgtaccgcaccagtcgcccttccagctgcccccacacctcctcttcccaggctaccatgcaagtgctgccgctgcagcggcttctgctgccgatgccgcttaccggcaggagatgtacaagcaccgccagagcgtggattccgttgagtcgcagaaccgctttagtcccgccagccagccaccagtggtgcagcccacctcctcggcccgccagtcgcccatcgatgtctgcctggaggaggatgttcactccgtgcacagccatcagtcgtccgcaagcctcctgcatcccattgccatccgagccacgccaaccactccgactagcagcagcccgctgagttttgcggccaagatgcagagcttgtcgcccgtttcggtttgctccattggcggcgaaaccaccagcgttgtaccagtgcatcctcccaccgtttccgctcaagaaggacccatggatctgagcatgaagacctcgcggagctccgtgcacagcttcaacgacagcggctccgaggatcaagaagtggaggtggctccgcgccggaagttctaccaactggaggccgagtgcctgaccaccagcagcagcagttcctcccactccgccgcccactcaccgaacaccaccaccgcccatgcggaagtcaagcggcagaagctaggtggtgcagaggccacccacttcggtggcttcgcggtggcccacaatgcggctagtgccatgaggggaatattcgtgtgtgtctaa

SEQ ID NO: 40746 - protein, 429 aa, DROSOPHILA
MNQTCKVCGEPAAGFHFGAFTCEGCKSFFGRSYNNISTISECKNEGKCIIDKKNRTTCKACRLRKCYNVGMSKGGSRYGRRSNWFKIHCLLQEHEQAAAAAGKAPPLAGGVSVGGAPSASSPVGSPHTPGFGDMAAHLHHHHQQQQQQQVPRHPHMPLLGYPSYLSDPSAALPFFSMMGGVPHQSPFQLPPHLLFPGYHASAAAAAASAADAAYRQEMYKHRQSVDSVESQNRFSPASQPPVVQPTSSARQSPIDVCLEEDVHSVHSHQSSASLLHPIAIRATPTTPTSSSPLSFAAKMQSLSPVSVCSIGGETTSVVPVHPPTVSAQEGPMDLSMKTSRSSVHSFNDSGSEDQEVEVAPRRKFYQLEAECLTTSSSSSSHSAAHSPNTTTAHAEVKRQKLGGAEATHFGGFAVAHNAASAMRGIFVCV

SEQ ID NO: 40747 - DNA, 5302 bp, DROSOPHILA
ggaagtctaaaaaagaaaattcgttttttcccagtttcgggtagctgtagctgtggctgttgttttggtcctgtgccacggcatcctcggcatgacaacttcactctgttgctccatttgcaacatttatgcgatttcgtatgttgctgcctgtcggttgtatctggtgtatctgtgtgcgggaggtcattttattgtttccagacaaaatggtcaaatgggaatttagcttttttggtgctgtgtgtgtgggtagccgatagatttagattgaactgtcgaacatgtaactgggttctgtcgaattctgcccatatacaagcccaacaaaaaaaggaaaactttgggagatagccgaccagcttaaacaatgcaaatgattagaataatcgccgaaggtgtttgactcaaccggacttacttgccccataaacacaaatttcagtttgccgcaataaaagttttcattttggcccctttcgaccgtttttacgactctcgattgacttttgcgtcaggacagatcaaaataaattccatgggctcatttttaaatgaaatcaataagggatagtctttatatttaagcttttgaggaagcgtaagcaggagctttaaattaaattattcattgataaatttccaattatcagaagtcgccagctttctcgatacaaaagcagagaggtaactctaatttatgtcgttttttcgctgacaaagtgtgggaaatattcattcattttccccgtttacaatcgtctgtatttatgtcccactcccttttggaatgctaatttccacgggaaaattttcgacgcgcttgcaaattaggttctgtggctgtggctttggaaccagctatgctgatatgtccaaaaagtggaaatggtagatttgttttggttgcattaattttgcacggaacaatttgtgacaacctagccataccttggctcttttaaccctattatgaaaaggaaattagtaataaatttgtatatactttaaaattggtgaaataacgctttattagtagctttactttacatgatccaggctttaaacttgagctaattggatttgggaggaccaagaattttctcgatttcgcagagtctgtccattacctgctgatttctggccttttgatcctttagcttttctccaatggcatccagggtggctgcaatagccaatagcgaaacatcggtggtctgaagatctcttagcaaaggagttatctttgctacgggaacggaatctgagggtgacgatgattgttcggggatttccgaagtgggaacctcttcaactgctttctctgcaatggtgggaacaacttcagatattcccacactagtattgtctgggttgtccccggccgtaattggtacttcggcagctggagcttcagaaatcactggttctgcgtattttgaaacctccgggactggtgcctctattgggatggtgctctgttcaacaatgacctctgccggctttgtctctgtctctggaatttcagctactgcgatctcttgaggaaccggagggtcaatgagcggtatggcagtatcagatacttctgcagcagcagtaacgatttcaacagcgggtgtggtgatttcggtagctggagcaccgtcattaatgtttgcaacatctggttcctgagtagtgacaggagcttcagttatggcaggatccaggactttttcggctacaggatactcaaccgtagtttctggaatcgatgttgaagtttctgtcaccggcacctctacagcatccactgcttcctggattacgacaggtgcctccacaggtatgggttctgtaggggtcgctaggcttggttccggttcaggtatgggctctggagctgtaattggagcgacagccacttctggagaggcaactgcttcatttggcggcggtaatgaggtctctggtattggtgaagatgttgattctgcagcttcaacagctggcacggatgtagtttgttctaataaatccggaataggagctggtggttccacaggctcgattattaaatccgcagctgcctcaggtggagcaacgtctgcaactgcaacttctgttgtaacttcgacaggcggtgcaactggcgtttcaatggcagcttctgatagtacagaaacatcgataggttccgtaggcactgccgcaggtggtgccgtggtctcgggaacagaagccgtagttggtggagtagaaacgatgggagcagcggcagacggagcttcagcaggtgcatcagagggtgcggcgatcacaggagcaacttctggtatatctaaagctgctatggtcactggtgctgatgctggtgctggtgtctcaggagtttcttcagccactacagctggtacaggttcggcagccacaggagggagaacaggtggcgctaagtcgacaggagtttcagcaacagcactaggaacgggtgatggagcgatcaccggaggtaattcgggaacagcagatgcagtgacatccggatccgttactgctagtgttgcaggaactggtgtcgtggcaacgactggcgctggtattgattctgcggccacaggaggtacaacgggtggtgttgtctcagcaacagcaactgaagcaacttctggggtttctgcaacaacaggtggtgcaatggtttctggctctggggctggagtaggaggtgtagctacaacagtattcgcagcaacttgggactcggcaacgactggagcaagggctggcgtttctggtgcagttgttagagtcgcagcagctaccgggggctcagtcgaagcacttacaggagcgaccactgcggtctccacagctggtgcaaccgacacatggggggaagctgcagccggagcaacgactggggtttcagtagccggtggagcaacgaccactggctcagctgcagctagtggtttcgttgccacgacggaaacctcggggatgagaggtgcaacgcactccggtatggttgcaaccggaatctcagcaacaggtggtggagctggagtctcggcgacgacgggggcaactgcaggagcaacggcaggcgcaagaactggggcaacaacaggaacagcagctggtacagcagctacaggtgctgcaacgggaaccgtggtgttagcgggaaccacaggtggtgtggcgatcacaggcgaaacaacgggagtcacggcagccggagtgggggcagaggcagcaacaggtggtgtcgctatcacaggcgcagctacaggaattggggcaacaggagtgggtgttgcagcaacgggaggtgccactggtgctgaaacagcgaccggaatctgagcaacagcaacgggtggtgttgaaactggacttgctgccggcggagttggagctgcaacaactggaggcgccacagatgcgacaggagcgacggatgcggcagcaattggagctggagctggaatagtaactgttgccggttgcacacttgcaagggtgggcggtggagcaactggagtgactgcaatcggtgccgctggtgcgggagccactgccgcaggacttactacttggacaggggcagccactgctgatggcgtcacaggcgcagcaactggtgctgaaacaggcgatggaatggttcctggttccatgtctatcctttgcccactttcacataaaagttaatccgttttttccttttgggcggattgtgccttgtccaatgcttagttgcaaaaatgtttcatggccagcttttcatggtcagaagacaactgaaaacagaggaatgaaaacgagaaaaacatgagacatggcaaggctggatctgaccatgatttaggccattgtcttaaataaaattaaatcgatgagaaaccacgtaagaatgagaaaaataagaataaaagttctccggaaaatactgattcaaatatctatacaataaaattacattgattaaatgagattagaattgtcttcactacatgagaagtaaaagtaagagcaattgagttaactagtctcttgcttctgacgtctattcgaaatatatttttcttttacaaaactgtagttgctaaattatgtaagagaaaacaaggcacttgcacaatttcgttcaaaaattcgaaaataagcggtcagcaatgaaatggtcaactattaggaactgcctcttaggtaagtcaatccttttgaatattttcaatattattaaccaatttaatttgttgaatagttttaaacagcgaccgacttgccgatgagaaaaacggtgtttaactggcccgttgactcagttttcttggacatttttacctcttttcattggtttaccttcggtcagaagtccgacaactgcccattgagcgcagaaagtatacgcatagtttcaagtgctttttgcgtttttccaattcccagacactaaggtgcttatcagctgaccttagccacatattaaatttgttccggctcgcacgaggaaacatttggcgctgaaaagtgtgctacatgcgttggcgcccaccactgcgtatgagtgatattcgcatattattcgattatcgattccgttcgcatcttgccaaatgcatcgggtagataaatcggggaaacgctttcaagaatttattcgcgatccagtgcatatcgcttaccactcgctttgtcagctgcactcgcagacacataactggttatttacacaatactgattactttgccgtatttgcaatgtagttgtcaacaaaatgcgacaggttcccgcgctgccccgcactgccccgccctcacccgaccctccacaatccatttgctatcgtggcccattcaatgtctgatgcaatgacagttgacaaactgccactacgtagccgttggatcggaacacattagctcggtggaaatgtaatcgcaaagaactaagaaataaatctttcaatttttcgagtgaatgccgggtaggaagtgcagccaaatgtaaagcaatccacagaggcagccggcagttgcacatgccgtccgttggagcaagtgtaatgtgatctgcgtacaatttgcaggcgtcgttttaaaaagtccaacaccaacacgtccacctacaccttcgcctcacttgcccctctgctggccgggaaccgagcacacttgagacttttgcaaatagtttttccacatatgaacagaaagaatttttctcgcaggatggaaaataaaaagagttgcgaacgaaaagaaaagaaatacatacatatatataaatagacgagatgggaaaacg

SEQ ID NO: 40748 - DNA, 2855 bp, DROSOPHILA
ttaaacaccgtttttctcatcggcaagtcggtcgctgtttaaaactattcaacaaattaaattgttgtcttctgaccatgaaaagctggccatgaaacatttttgcaactaagcattggacaaggcacaatccgcccaaaaggaaaaaacggattaacttttatgtgaaagtgggcaaaggatagacatggaaccaggaaccattccatcgcctgtttcagcaccagttgctgcgcctgtgacgccatcagcagtggctgcccctgtccaagtagtaagtcctgcggcagtggctcccgcaccagcggcaccgattgcagtcactccagttgctccaccgcccacccttgcaagtgtgcaaccggcaacagttactattccagctccagctccaattgctgccgcatccgtcgctcctgtcgcatctgtggcgcctccagttgttgcagctccaactccgccggcagcaagtccagtttcaacaccacccgttgctgttgctcagattccggtcgctgtttcagcaccagtggcacctcccgttgctgcaacacccactcctgttgccccaattcctgtagctgcgcctgtgatagcgacaccacctgttgctgcctctgcccccactccggctgccgtgactcccgttgtttcgcctgtgatcgccacaccacctgtggttcccgctaacaccacggttcccgttgcagcacctgtagctgctgtaccagctgctgttcctgttgttgccccagttcttgcgcctgccgttgctcctgcagttgcccccgtcgtcgccgagactccagctccaccacctgttgctgagattccggttgcaaccataccggagtgcgttgcacctctcatccccgaggtttccgtcgtggcaacgaaaccactagctgcagctgagccagtggtcgttgctccaccggctactgaaaccccagtcgttgctccggctgcagcttccccccatgtgtcggttgcaccagctgtggagaccgcagtggtcgctcctgtaagtgcttcgactgagcccccggtagctgctgcgactctaacaactgcaccagaaacgccagcccttgctccagtcgttgccgagtcccaagttgctgcgaatactgttgtagctacacctcctactccagccccagagccagaaaccattgcaccacctgttgttgcagaaaccccagaagttgcttcagttgctgttgctgagacaacaccacccgttgtacctcctgtggccgcagaatcaataccagcgccagtcgttgccacgacaccagttcctgcaacactagcagtaacggatccggatgtcactgcatctgctgttcccgaattacctccggtgatcgctccatcacccgttcctagtgctgttgctgaaactcctgtcgacttagcgccacctgttctccctcctgtggctgccgaacctgtaccagctgtagtggctgaagaaactcctgagacaccagcaccagcatcagcaccagtgaccatagcagctttagatataccagaagttgctcctgtgatcgccgcaccctctgatgcacctgctgaagctccgtctgccgctgctcccatcgtttctactccaccaactacggcttctgttcccgagaccacggcaccacctgcggcagtgcctacggaacctatcgatgtttctgtactatcagaagctgccattgaaacgccagttgcaccgcctgtcgaagttacaacagaagttgcagttgcagacgttgctccacctgaggcagctgcggatttaataatcgagcctgtggaaccaccagctcctattccggatttattagaacaaactacatccgtgccagctgttgaagctgcagaatcaacatcttcaccaataccagagacctcattaccgccgccaaatgaagcagttgcctctccagaagtggctgtcgctccaattacagctccagagcccatacctgaaccggaaccaagcctagcgacccctacagaacccatacctgtggaggcacctgtcgtaatccaggaagcagtggatgctgtagaggtgccggtgacagaaacttcaacatcgattccagaaactacggttgagtatcctgtagccgaaaaagtcctggatcctgccataactgaagctcctgtcactactcaggaaccagatgttgcaaacattaatgacggtgctccagctaccgaaatcaccacacccgctgttgaaatcgttactgctgctgcagaagtatctgatactgccataccgctcattgaccctccggttcctcaagagatcgcagtagctgaaattccagagacagagacaaagccggcagaggtcattgttgaacagagcaccatcccaatagaggcaccagtcccggaggtttcaaaatacgcagaaccagtgatttctgaagctccagctgccgaagtaccaattacggccggggacaacccagacaatactagtgtgggaatatctgaagttgttcccaccattgcagagaaagcagttgaagaggttcccacttcggaaatccccgaacaatcatcgtcaccctcagattccgttcccgtagcaaagataactcctttgctaagagatcttcagaccaccgatgtttcgctattggctattgcagccaccctggatgccattggagaaaagctaaaggatcaaaaggccagaaatcagcaggtaatggacagactctgcgaaatcgagaaaattcttggtcctcccaaatccaattagctcaagtttaaagcctggatcatgtaaagtaaagctactaataaagcgttatttcaccaattttaaagtatat

SEQ ID NO: 40749 - protein, 864 aa, DROSOPHILA
MEPGTIPSPVSAPVAAPVTPSAVAAPVQVVSPAAVAPAPAAPIAVTPVAPPPTLASVQPATVTIPAPAPIAAASVAPVASVAPPVVAAPTPPAASPVSTPPVAVAQIPVAVSAPVAPPVAATPTPVAPIPVAAPVIATPPVAASAPTPAAVTPVVSPVIATPPVVPANTTVPVAAPVAAVPAAVPVVAPVLAPAVAPAVAPVVAETPAPPPVAEIPVATIPECVAPLIPEVSVVATKPLAAAEPVVVAPPATETPVVAPAAASPHVSVAPAVETAVVAPVSASTEPPVAAATLTTAPETPALAPVVAESQVAANTVVATPPTPAPEPETIAPPVVAETPEVASVAVAETTPPVVPPVAAESIPAPVVATTPVPATLAVTDPDVTASAVPELPPVIAPSPVPSAVAETPVDLAPPVLPPVAAEPVPAVVAEETPETPAPASAPVTIAALDIPEVAPVIAAPSDAPAEAPSAAAPIVSTPPTTASVPETTAPPAAVPTEPIDVSVLSEAAIETPVAPPVEVTTEVAVADVAPPEAAADLIIEPVEPPAPIPDLLEQTTSVPAVEAAESTSSPIPETSLPPPNEAVASPEVAVAPITAPEPIPEPEPSLATPTEPIPVEAPVVIQEAVDAVEVPVTETSTSIPETTVEYPVAEKVLDPAITEAPVTTQEPDVANINDGAPATEITTPAVEIVTAAAEVSDTAIPLIDPPVPQEIAVAEIPETETKPAEVIVEQSTIPIEAPVPEVSKYAEPVISEAPAAEVPITAGDNPDNTSVGISEVVPTIAEKAVEEVPTSEIPEQSSSPSDSVPVAKITPLLRDLQTTDVSLLAIAATLDAIGEKLKDQKARNQQVMDRLCEIEKILGPPKSN

SEQ ID NO: 40750 - DNA, 24389 bp, DROSOPHILA
tctagatatttatttgtatttatttgtatttatttgtggtgacatcaataataattttctcggccatcatttcgcctgatctgcataccaaatcatcgcacgaaaatgaaaaatacttatgcaacattaagattaataatttatgctatttgctatacaacttggtgcgctttgctttacatgtacattaacatccatggattttcgtacctttaaaatttgctaattgtgactaataactcgggcgaacctcaaaacgagtacaatttgtctaccagcgctgattattctatagaacaatgattgttttttaaactaacaaatactcttgggggatttgaaacgtctaagtaatagctagtcatataacattatactttatatatggtttatagcttagaagaaaacgaaacctatagattacaaattccactacgatattatgcattcgcgatacagataagctgccttctttgcatattttgtttcagtttcttttcttttaccatttgtttagcttttcatttatgttttttttttatttttttattttattattattttttttttggttttctgatcttgtattcttgccgctttgtgggtaaccgaaaaatttgtttataattcactgcataaattatggaaagataacatttgtgttatacttttcggtccccatatgcaaaacgctcgtcgggggccgctcgacttttgcatattttggcaatttggttagttgttttaaacgatgtgataacatctaaccaaaacggcacgaactcgtatttagcgcttgttaatcagagtcaaacttttctgcccgaaaacatatatttatataactcgcatgcgtttattgttttctatattttgtatttatttggtggtgtcttagcggggggctaattttctattgcctcgatcgatcttcagtagctgataactgtcattttgcattcttagttttttattttctttttcagatttttagatgttttcagaccttagtggttagatccaaggcattcgaggtggccactttgacgggggcttccaacctcagacgttttccattctcactgctggcctctatgagttcgtccagtttcctcttgatcgtttcactggcctcgctatcgcttaggatactattattattattattattattgttattgttgttgctgatactgttgttgttattgtgggtattttcaatgctggtctttgctgtctctgtggtgctggagtgatcttcctctatctccggatcagccgtttctcgaactgatatctcctcttcaggcgttactttcagatcctcatcgtcatcatctgtatcgttcttttctacatcgctagagatctcggtttctggttcgatttctgggctactacttttactgctcagggaactgccggtggtcttcatgctcagatcaatgggattatcttgaccgggactgggtctgggatcctcgccggctggggttcgctcttcttgttgagcgggtgagtggggtggcgtcatggacaccaccagatcctcctcctcatcgtcgtgctcggcgccatcaataattccatccgctctcgcctcgtcgtcctcttcgttctggcgacttttcactctctccctgccactttccgagtttggtgtgaccagagctgaaattgagtaatcctgcttggagtgtggcggtagtttggtggtcggcggaggactttgttgctgggacttgagcacagcgtctaaatagaagcgtttggttagctcatcggcagcaccaccattcgttagcaggtggttgttgttcgcatgggtacttggacttctggctggtgctggctgatcctcttccttgtggtgctgctggtggttggcaaatggtgaagtgcccggtgcgaaacgctggcctgcaccactggagttgaatagatgttgcacggccgccgcagccaccgctgcctgttgttgctctggcgttggcttcagcaagccctggtggtgcgagtacagggcggggtggtagccggggaagagtaggtgcgagggaggcaggaacgcgggtggtggcatcacgggcattgatgctaggcctgggaagggcagcggcaggaatggcgacaaatccttgcgcatctgtggcggtctgccgggcgtcactcctcctcctcctcctcctcctcctcccgaatgactgccatcggcaccacttgaagatcctcccgaattggattttccgcccaagtgtaggagtgggttgcctcgcaccgaactcacctccacagagctgtcggagttgtgggaatccggggaacttacggagggtgatgccaccaccggatgtttatgggagccgtactccacgctgccatccaatcccaacatcattagctcctctttactccgtgacgagccgccagcattggcaacggcatacagacccggataaccaccaggatgcccgagcattcccagagcagctgctgcagccgccggtgggggtacacccgacatgcccttgaccccgttgggcattccttgaccaccgcccgatccaccggaacttccaccacccgcctgctggctattgtggtgcgccgccatcgcagccaccgcctgctgctgctgctcctgcagcagacagtggatcttgaaccagttggagcgacgaccatatcgggatccactcttcgacatgcccaccatgaggcacttcttcagacggcacgccttgcaggcggttcggttcttcttgttgatgatgcactcgccgttgttcttgcagtcggatatcgacgacagattgttgtacgatcggccgaagaaggactgtaatgcgaagtgaaagtaggaaaatgttagatgtaatataaatactagcaattataacagattgttagtttttatttgatactctttgccaggatgccgtgtaagaagtgcatgttacttgaggtaagtagtagactcctcaaaatgtaagccgtatattctactccaaactccttaagtattccattgtacccacttcaagtgtctgttaagtccacctacaaccgagcagagcttcttcagcaacttctttcatcgcattcaatgatgtcattcaataaaacgctttcgatgcccggcaataatatctcattatatatttttctggtgattcatcgctgacggacggggctgctgagacccagacctctttaaatgctctgccaaaaaaagcggctaaaagagaagaaataaggcaaatcgacatgcacaagcggcaaccacctacacctccggcattaaccgttggctggggcaccacacaaccacaatcaattgcaacaaagcaaacaaacaatttaattcaatgcggaggagccatgaaaacctgagagccaaaaagctgagacgaaacaaaaagccccggacagacaacaggcaacatgttgctgctgttgctgcagttgctgttgctgctgctgctgcatgttgcaaaggttatggctgtgcaacacttatgccaagttgcaatgttggcagtaaatcaccaacgcttcacggcctgcccgcccgcccgactttgcaatcaaccaaaagggacagactacctaaatgactgactgaatggatacactgggaaaaacttgttccttttttaaatctttaataattatgaattgataaatggactcctttataccaaagttttgtttagtatcacaagcactcatatttaaactaaattatcttatttcgtgaatttgtttattgtgataggaacaatttttccagtgcatctgacttactctccgtctgtttgtcagttttcaagttggttactgtcgttttctgatcgtaggtggagctcttgaatggaagacacaccggtgctgagatgctgacgacgaagcgcaaaattgaacagagacagaacaaaaaacagaaaacaaaaaaaaaaatcaaacagaaaaagaagcagaaacaatgcgaaaatccacttttaaggttaattgggcatcaagattactgggtcggaaatggaaatggaaacggaggatttcaggccggtaccccttcggttttcagaccatagttttgccgttttcagtttcgtttcaagaagcagatggacggacggacgactatttacaagcaattttgtgcatcaaggcagattcacttttgtttgtttgttttttcttgggtctttaacttgttgttgttttttttttctcaacttcttgtgggcgttaaattagccaagcgaggcccacgccattgcgaacggggcccaagcacaaatcaaataacgttgacccacaaattgtacgttagttgaccttttctccttggcgtgggcaaaaaaaaaaaaaataaataaaagatacgacgaaacatcacagcaaaactaaataaataaataacaaaagcaaatccctcgactgaactcaaatcgagtcggcgaagaaacgaaacggaacgaacaaaaaattatcatcccaccattaaaggagcattcgtatttaaatcaattatttgtggggcgctttgtttaactttgaccttagcctggggcatccatttgttgctacaactccccctcctttatgatgaactcggctccacattccagtttctcgaggagaatggcctcataactttttctgcttagcgtttgcatcacgaaggcggcgaattcgatttattgaaatcgattgaatcgattgatacgaaagactttggccgcagaggaatgcttgcacaaaagtgtttgttgccaagaaaactttggggccaaaatacaaggagattataattggctcatttatgaagcaacaacgcggttcgaaactgcttataataatataaatatatggtatagtgcatattgttaaaggtataattagctatgtttatagaaacctaaattaaactgtcctcaagcgtactttcttctatcatcaaagagttttagtgttttaaactaggcagataaaaccgttgcatcccagtcaaatcaaattcaaattaattcgaacatcgaactcaccttgcagccctcgcatgtaaaggctccgaaatggaatccagccgccggctctccacacaccttgcacgtctgattcatctggaatggcagcgagtaaagcagaacatgagaatggtattcgtacatagtattttggggggaggtgggcctccaacccactgggcaccctgatccccacccactcagcaacaccaccagcaccaccagctcgtcgaaactgaggcaataaattcataaaatttcaattaaaagcaacagcaaatcatgacacgagcatctggagctctccatctcgtttcgattcccccaaagagaattggaaaaccagccgccagctaaattcacacgcattaaaaattaaaatgcaaacatagtttgtcatatcgcggaattggtatcaacgaaagaaaaagagcacggcttaaaacgcaaagcgagaaacgaacgacgacaaatggaaatgggaaacgggcccaaagaagcccccaacaaatggccaaccagacccgaccatgaaccccatccatgcacaggaagaagccttgcggactttgctaaatgttctaatattaaaataggttcgataataaaacatttatggtgttcaattttattgaagtatatcaaatttaacaaatagcgttgattgttatattaatgtgttggtccttatattatattattattatccaaaccttcgttacttttttcccagtgttaatggctaagcggctcttctggggcccataataaaatatgaagatggaatcaaatgaaaaattgcctcagagcacacacacactctttgggcaaacaagctgcatttgcatttatatggcaatctctgtacctttcccaattcccattgctcccctcgcaaataggcgcaacttgtagctgagggaatatttgtttatttattgcgagcgaaatgtttatcaacaaattgccatcaattgttgtgtttgggtgcctggccaggagttggctcttcgggctccctccagttgtccatagttttctatagtcaggttgaaaattgggctggaggatcggttggaattgcgttttcttagtgccacttgtagttggaactggagcaaaagctttgatgacaagtgcacatgcaaagagggggaaattaggcaagggaagcctggagatcgtgggagactttcgagtgtttttttttttgttttgaagtcccagcaatggtaatccaaattattgttaaaaattaaaataaatggattttttgcgagagaattctttctttgaatttgtatatacgtatccaatcggtacaatcgaattagaagtaggcccagtaagaatataactgtaaatttcgaataaggttaacacacatttcctttctgtagttcatgtgagtgatggctacacctgttaatttcattttagttcagtctgaaagtctttctattagaagcactgcttcgagcgcagtccaattgaaatgctttcgaatatatcaaaactagccgaaaatagtcggcccaactggtagccaatgggcacagccgcagtctaaatcagactcatcctcgagccaagtgtttttccaccttttccgaaagcctttgttatgttttatagcaccaattggcccacgggcgattctcggccataattcttgccggccacaaacaatttggcacattacaaagtaggagaaagcactcaacacattcacttttttcattcgcttcccccctggaagcgagcgtccgtccaataagcaaatccccgaggtgggggtcttataagaataccatgccaattggcttagttcgttcaggttcaggtctgggttccttattttccaggtggtgattgttgctattgtaggtgccttgtttgactgtaaaacatgctaatctgatttcgtgttatgtgttgagttggaggtgagttttggcccgactttggagtcggggtcgcccctcgacttgggttggaaataaattttctacgtttaggtttcataaagcgtcttcaggtctggtgcttgctggccgccagcctgcctgggattaatcgacaaataaaaatcacataaaataaattaaaaattatgagtttcaagtttcaacaacctgcggattggcagcagatttagtttgattttaaatcacagcccagccgtccagaaagagagagagggcccaaaacacgttgcagatgagcctcgccgtgaaatttatgcagacaatgtgcaatattaaaaagccataaacatttattttacaacacacaagcgacatattctctccaactctctggaataaggtagtgaatgtatgtattcctcacctatttattagctgtcacatttgaaattaaggcaagtttcgtatcttgagtaattagtttatccctatttggtaatgaaaaatacctcagcgccatatcttacagatttctaggggagattgatagatttttagttaaaggttagtataaaatataaccctgaaatattcgtcttgtttgtgaaaaaagttgtattgcaactaaattgcaagagcttccgcattagacatacaattatacagttttgtatcattacataaatcaagttttattttaaaaaaaaatacataattgacttgggagaattgccaaagaataattgcaatcagtgatttatggacccttaaaatttaatagtcttagcttcttaatcgacctccttgattcagacctgtttttaaatcattgctcacaacgaaaatacgacttttgtatcaaattgcataatttgcgtgagcagccgccgttggcccaaaaaatacatttaaactcacaattagcctggccattaagtgaaagtgttataaattaaatacgagagcgacaaatgggccagcaaaacaaaccgcatcgtctgcaagattttaattaaacacacatattataaataaccttttttttttgaaagcgatttgtttttttaagcgactaacaaaatatttatgtctgtgctcagattattgatgggctgcgaatattgatgagctttttcgactacacaatgccaatttattttaattagttggtatattttccaaaaataaaagttcccccagttagccagaagtgcaacaagttgatccaagacaaatagacgccagcgaataaatatataaatacctgcaaaaactctaccagtcatcatccacaataatataatagtggatgctgttgattttgtgtgtgattaattatggcgattgctgttctgtttgttgtttgatgttgtttggttgttaaccttaacgcgcagcaaaaatagcaagtagaatttataatttttcatgccccgatgatgcaatgaaaaaaagctgaatatacatatacaataataagatgctttgttatatggcttattaagctgggcaaataaaagacacggccgagaaaataaattaaataaaattattaaaattcatttaaggcacgtttactccagttttgagctcggcttgcctcgcctgaagctgttaagagctaagtgccattaagaccaagtccaagctcggttttagtttcagcttattttcagttttgcttccctcgcttctttttggctggctagcaaaaaattatgataattgcctgaccttggctgtcatgtactaatgctaaacctcaaatttgcacatccagtgcgcagattggatcccctccccctcatcgcggccaacatggttcgcatgcaattataaaaaagcgcaggctagagcaaaaaagcaaaaaacataatttaattaaaatgaaatcatgcacaaagcaattgccacgctttgttcattgtgcgcagcggcaaattgttctagtttttaattttttgttcgccttttcgcttttcagttgttgcagatttttcgttataaacattcatgactcgtcggcactgaagacggtcgcttgtgttggtattgcttgttgtcggcgatgagcagattaacgtgtataaataaatgcaattagctatagactgcacctattctgtgagtccagtagtgggaaagtacggagtgcaggtggcttttcaattaatattctgatttctaaagcatcagaataaaattttatagatctcggtataaccactcattagaagctattaaaagaacaccttatgttagctcgatatttaatgcctttaggttcacaggttgccttgtatgatatcaaagtaccgtagcaagcggaagcaaaaagtatggttcgttcatcataaaatttacacaaggcgttgttgtatggtaaaaattccagatatttttaaaagcttataccatgcaaaattagtttatttctaaagatgctttttagaaacctcgccttaattgcacccgttttatattcaattcaattaaatacctgtagagtaaatgcattcactcccccagagctttaaacaatgactttaattcgcattaatctaaatcgattatactctccccttcgcaactggtccgatccagttctaagctgagacagctgcaaagtatgtagaagattccacctcctattccaccccagccaatcagatgagtcatgttggcaatgcaaactcgtttattccccggtggatctgcagaagaggagcggaatttgtcaaaatggatatatcgcatgtttctggctttcatttcgtttctctccttttttctgccgcattaaaaatacttgaggcggtggagaatcagctgcacacacgcatttctttcgcttttcccgactcaccactcctctttgcttagtcacgcggcctctatgcttaagcaatttgtcaaaaaaataacgcacaacaaattttacaaacattttcagggggccagcccttcaaggcccctcaggggagtgatcaatcatagggaatcattcagttcgtttcctcgtttgtcttttgcgagcggaaattattcgcagttgttatagtttggccagtgagatttttttgtattgcatgcgttcgctatgagatttcattggttgcattcttgatagaattatttaataagcgttgtaatctgtcttgcacagttacggaattttaatcgaaattagtttcacatcattggcttgttcttaccaaatacaaaatacaaaacatttgtttgtcctaagcgttttttcaattacctccttaaccgaattggatttgatgattgatttatgcattgtttgacaattgctgaatggccaatgaaaacgcccttattttgtttcacttttattccctttgctgttcacacagcaactcctcttgattttctttactttcttcgtgttttcggatctcaacaccccttgaaagtcaatccatcatcatttatcgtccgcttagccgggcgagttcgttgcctaagtctttcgttttgattttagtacttagctaattgttgtcgttgtcgccgtcgttgttgctgtcttaagctacataaaagccaaagccaaacactataattatgaaccacgatgatcatggcgctgatgatgattatggcgatgatgaaaagtgcttagtagagtttgcaacttgaagcatcatcgctgctgtctgtttctgtttctgttgcagctctgaatctctgaagctcttcaagctgtcaagcaggaaacgtttggatttataatgctcaaccgacacaccccctctgcccctcgctcctggtctcggtctcgtctctgtttgtcattataattaatttgtaactatttttatgagctcatgtgaaatttaaattgtattctccgggcgtccctgtttactctttctctgcgaccgacgagagcggctttcagcgcccatatgccaagtgtttgtgcaatttccgtttaaaatttgaaatcttccgacaaaaatagtacaaattatgctgcaaaaattgacaggaaaacgtcaagtgggagaagtgggttgggaaaggggcacacattttcctgagaactttaagtgcaatttgcaatgctgaaattggaaatggaaatatttgcccggcaaatttggtgtattggtaaagaaattctgtcagttcataagcttacaaagggtgctttcctttcaagtgtaattccttaaatgtaaataatgatgtaaagtttaattatatttagaatattatgcatttggaattctactacattttgggtactttttgagtacattctttgtttttcatgtatttgcattatttatcttgaatagatatttatttttttttatattttatattttatctaacgaagaaagcttgccactagttaaatttctttataaacagatacggtccttgttagagtattcacaattcccgcatcgttctagcatctcttagtcagttttcttgttatgcaaatgcgtgcaaaatgtgcgaggttttcttctgtttccgagactcaaatgcaatgctcaatgttgctgcagttcccctatattgttgcctttggtgttgttgtgttagctgttgttgttgttgtggctgttgtggcagttgctgttgcctagttgttggctgccagccacacgttcactgatcgctgtggcatttgttacaattttaaatgttagctcaggcaaaagcgaggcaacgtcgaactaacaaacttgtgccaattgtagcttacaagtgtttgacttgacatttcggcgtgcgcgtctttactgaattggcttcatacatatattagccatatctgtgtgttgcgcttgctcctagaaacttgtattagcttgggcttttctccgagtgtattcatatcgttcggggcagctgacaggcgcagccgcaggtgaaatgctcaacgaaattaatcacagccaaccaaatcccacaaaggccacaaaagttggctaacaaattagtgagcgcttggaaaattgcattttagttgctttttgtgatttttactatccatgatttggcataaaaagctgcctgctcgattcaatgagcattggaagtgcaccagatgccaatgactcgacgtgatgtatgcgaatcaaacattggcgctcacaaaaaacagaactccagataaaactttggaaataaatcttatgctcagcatggcaggcagacaatttcgacaaatagaggatgcgacaaaatgaatggattgcaccacgaatgactgaacggatgaatggttggaccgatagattgctgactgggttgtctgaaaattgtcagctatctgtagccttgaactgtcaagctagaattagacactggattacgaatatacaattgtgtaaaatttgaaactaaaaatgtatttctttgggataaaatttaattacatataaaacatgttttaaattgtacaagtaaattgcaaaatcttatattattttatttgtttttttttcagttataaaactcaaaaatatattggatacactactgaaattgaattaaacattgattggctttctgcacactattttattacgctacttaatttcaaatcacatctaatttttgttacggtttttacatgcaatcaatgaaagactctctcctctctaaatcgaatcattatgtcttgtcgctaaaattcttcccacgctttttgaccgctgcaggagccaagaaattctcaaaatcaaatttccttttaattagtagacattttcacattacgtatacgccaggtctgacgtcggaaaaccttctccgtatacccactgccatccttttagccatctctccatctcggcctgtgtgtggtggggccataaaagctgaacaaaattataacagccaacttgcaaaacatttacaccagcccaccaaccagcaaatgcagcgggtggaggtgaattttaggcggtggcaggcatccgctttctttgcctgcaagaaaaatgattcatggaagaggcccgagactcctgctggtttggtggctcagcttcggcttcgggctggttttggtatgtagccatggtgtggttggctttttggccatagcgtctcgacgccgggcagactattaactttgaaagttgtttaaacaggcgaagagccaagaggcaaacctccaccttctctatttcttattttttcctgctctctggcttttgcattggaagctcctctttgtcgtcgtggttggttgtctgcaccagctgcctgctgctcctttaccttgcagccagtgtcatcggcgtcgcggctcgtgggaattggatcattagaagccggcaaaaggcgaaggcgaaggcgaaggcgaaggcgaaggcgcaggcaggggccgaagtgagtagaagttggtcaaaggaggcactgggagaaatgtttagatcaatcttttttcaacctatccccattgaaatgtggctctatgtattacgtttagaatctagtaaagtatgttgttttgtgatgatgattatcaaaaaatatgtgtcactatctaacagatctaacagatgtagtgttaaatattaagatctcatgttatacaatctatcgagtatcacagtgcaaatcttgcagtgcagcattcagatgttttgtaagttttcggttcgattcgcctgccttggcaacccaccgggcaattttgcatgtgttttgttactgttgtggaggttgtgccagagttgccaccgtttcttgttgaaaagaggcgcgataagtaaatgtgtccgcaagtctcggcctttttcttattttctttcgttttatttgcacttgaacagccaacaattctctctttttatttttccccgccgttttttgtttgtttatttgtttttccctgcttttttgttggtttaagcttctatttctttgtatgcgatttatttgtttgttgtctccttgttatctgagttagctttgactcggtggattttttttaccccttttgattatccccacaccaatgtggttgtatccgtggatttcgggggagtcaaaagtcaattaaataagagcagtgcacggtgaaaagcttgtacttgttgtggcctcaactgcttgttgttgctatttttgtagctgctgctgttgtgtttttgcgaaacgagcaatttgtgactgtgctatgcggttgactgttttttttttttgtttttttgcttgggttggggccagaagtgcactatgggaaccttttcaccaaaaagttagccaagttgaaaagtgtttggtagaaaaattacttcggtgatttatgaaaaaggtttgtggtttgagtcttttgttttgtatgccatcgcctgagcgaaaatttgggaagtgtttgagttggaaggaatattcggaagaaattttggtgcaggcttgttgcttaaatcatttgtttgccatttacccatataattacgaagaaggctttcatttacaaatgaagtttgttgtctaagtctttcaatattatgaaccaaaatgtatcgttttttcgcttgaatagttaaacacatattattcccaagattattattcaattattattaaatgatgttcgttgcttaagccattcgattttcttatgtaaaaaatatacgcgattttagttattggatagcaagaaagtctcactaagcgcatgtaatacgggtgtaaatatctttctttatctcttcacttatttccgccaaaatgaaatcgacaacgagaatgaatttcgctttctgttaaaacgagatattcccagcgacaagcccattgaaaaatttgggtttcactttccataaaactatcaaaaagacggtgaattaaaattgaattaacttgcggtttgcgttgactggtgggaatcaaaaataagagaagagccagggattttggcaaaaaatggtcattgaaatggcattgttgatatttatttttcgacttctgcccaatctcgtctcaatgccagcttcccccgctaattccgcagatgagaggggaatctccgtcacgtgtgtgcaaaaaggtatagaaataacaataacaaaggcatttgttattagtagccgagtgcgctttaaaaataaacagctaatacaacaatgggcacaatttgttcactgcgccactgaaatcgaaactaaagctcagcccggagattcaagctccgatctaatataagcggacatgcgggcatgcaatgatcttcgatatatgtgtatctatttgcctatagtatatgcaatttatataaatttaattcaatttgccaagctaaattgtttagtttttgttttgctcacaatcgtgcagaggtcgttggcgggggcgatggcaaggcgggtgcgggtgcggggcttctgttaatttcatgattgggtcttggcttaatgtgtaatgccttgactcgaaaacaattctaacaatttggcagctcattatgtggtgcgctcgctcgcttaaccacgccaacttgactccaataaacgatgcacaaccttgaccttaagtcaaatgaaagataaaccaaagcaggagaaaaaacctctgcttctgccattattttttattacggattacaaaccgaaaattataacaattttgttacgcttctttagggaaagggccccgcaccgcattgttgccagcccctgctgccccagaaggccctcgatccactatcgttattaggcgccaacttatcagcgtaataaagtggcggggcagccagttggaacagtttctgtacgatggcaacgtgttgaacttgaaaaggaaagcaaaagcaaaacgggaaagaagtcaagtacgcaatggtcgattgagaaatactctttgaaattatatagactaaataaattaaatttataaacgctggatgtgtggtaaagtgaagtaatgtttatgtcacataaaaaatgcgttgatatatgaatgcgctgattagatacttccgatcgaaagaagagcatttcagatgcgcacttaatttttaatttccttgggaaaccacgaggcataaagcactagcaattggttgagtgtcttgtggcggccggcgggcgggcggaaaaggggaaggcaaccctgccccaactttatctctaagccacgcgctaatttgaaaataatgcttcccaatcattttcacattttttcacattttcaggcactctttagacttctgcgcgatcggcgtggagtgagcaataaagtaggcaacccctttggtttaccttgtggaacatagttgctggctagtcggccctcccacttgttgattgtctgtataattacataatattgcataattttgcaaacagtactcggtcgctttgggatttctgctctgttagctacgtagagtctcggaaactcggagtctttggggtctcattatcgtcggctgaccgacgatcttcttcgttttcgctttcagtatcagtgcacaatgtagtacttaaataatagaagtttaatagcgttttgtttggtaccggccgtatttgcaagtctttattttctgccgttgctgcttctacttgctgtttcttgctgcttttggactactaatgcattcagctgtatgatttttgtcaaggttatccagttggctgtgttagcggatataatgacatgatgcatatggtggaagccaaagtcagcatcaatttcggttctctcgcgttttttaccctgtttgatttttttcttttcgctgttcgggaggaagttcatttttaagagcgttgtaattgtgtgtagttcgttcaagttcgctgccttagtcatttggcaagagcctaacgaactttgcagaacttttcagccatccagcgaattgcaatatgtgtgcagcaatgttccctcacatggctttggggcttcggactggctaatttcgctcattaatcatcgagcggcggctgcgggagaaaatcgctccgaaagctgattacacatgcacggcccaccaaatcaaagttgtgccaaaaggctccaccacatgaagacatctgttccaaagccagtgaaatgtatctgcaaacaaatgaagttgtctgccaggcaactcattccgattctaaggctcctcactgcacgtctagtagagtcatcaagtccaggattgatcattgatcttttggcactcaatcctccgcctccttctcgtcgtctgctcacgaattataaatagtgcaaatgcgtgcagtgcatcatcatcattagttttcagccaaaaaccgtggcaaaagacttgtctaaattctaggtctagcgtcttttcgcctcccttatgttaccctaaaacttactttggcaattatacgagtctatgtgtctgactttagtttcgcctgctgaattattttaatttgttttgtggctggtatatttactgaagctagaaaatgtaatatttatatataatacatgaaaagtttaacaaaatccctaattgtatttaaataatagaaaaatgtttcaaaaaagacacagtcattctgaatattaaataaggcagcgattaaagttactatcccctcaaaatatattccaagtgatataagtttacttgtctcaacaacccgtttgttcgtaagagtattggcaattcccctggcaacccatcgactcctgcctgccaagttcgtgtcctaagtctttcgtttcgttacgttttgtgcttcaagtcaggcattttctaattgcaagttaatttcttgttgcgaacataaatttaacattctaattgagttatcaaccgcaacatgtacatacacactcaaaaaaaaaaaaaaaaaaaacgaaaacaaccgcgacaggagtggatgcggcggtaaaacaagtaggagaaggagatgccgacgccggacaacttttacagcttctcatctcatcgtcctcaaaccgtgttcactgtgggttttcgcttccaaactggctacgcatgtgaaaaatggcctacacatgaagccactgagcttgtattccgctcctctgcttcttgatgctgcttagctggctgcttttccgaccacaaaagttgcaacaaagccacaagcgtccgggtaagtgcagtaattacatttcggtgtgtgtaagtttttgggcctctgctaatttgcctgctgcttctgtttttcttatttagttttaggcatttataactaattttgctgccggcttttgcgcttctccgttgaaagaattttccaacgtgcaaatatgcactttggcatggctcgtaattaatttactttgtgtgtttgcccaatggcagccgcaaaggagaacgacacacacgaaaatatgaaaaaaatccattacgcaaatgtttatgaccaaaatggtcagcgggcgaagaagcagcggtggcaagagcctcttcatctgctgccaatgcaaatagaaacgatttgccaaagcccccagatgcgtgtgccccaaaactcaagctgcagatggaaaatcgaggatggaggatgggaaccgagtttcaagtgagcttctctcacatacatcataacattgtattgcattttcgcccggaccgccttccaatgtttccccgttcgaaattagttttctttttccgcagcatcttgtcatcaacgggattttggaggcgtgattgtatcgaaggtcgtggcgaaatggagatgttgcaagaacattaaagcgttcgcagaagatatttttggcggatcgtttatgggtgtttcatgcttggaaactaatggcactaatataatcgtaatcataagtggaagatatggcttggtagatgaactacaaataccaaaatatccaaattgttctaataaaatacgaaattaattactcaaagctgctttagatgttatccatatcgcgtacagtaacttgatccgtcgttatctaaggtgtattaaatatttgagtttattttcattagtttctcatatgcataaataattgttgctattcaaaaagtggatttttaagcattcgttttttttttttttagtttttgctttgaaaaatacatgggcttaaatttatttttatggttttctaatattcactcgatttttcttaaaggcagaaattcgatatgcatttaaattatattctccaataaaacaaaaactgtgatcaagagaatatttttagatctactcttagactaatccagtggaattccttacccgttaccagttcgtttcatattcataaatttattagctaacgctaccaacttgccgctcgaagacatcattttcaaaagtggcccaaattcgagccgctgttgttgccttcattttaatcaaacatttggtttatcgtctcacatttcaactaattaacactacgacgggaccgcctctttaagctgtgagatctccagcctggctcttgaatattttttgactggctttagcttagccagcattctgcggtgccggcatcgacaaaatcgactgatcgacaaaacgaaaatcagcttaaaatcataaaaaacgcacttaaataaaatttaatattcaaatattgacatttagtgccatgttagcagcaacttaggtgttttctccaccttctctctttatcccatatttttcgagctgccctcctagacaatgagccttaaattatgcatgtggattgaacgagagacgacgacgcaattcgcttagcattaactaattgatctgcattaattttaagccgagactaaagacaaagaccaagcaggtgaatcgcgtatgctgggtatacttaacgtagttcgtatttgtattatgattattatgagttttttctcctattaaaattatgacatcatttaaattttttcgccgttgttggcgagatttttgtgtaaactggtttaggctactcacaattttcgtcgctctttctgtcgcttttattgctgttgggcaattatgcatgcccccaaactccaaaccccataattcataaattcattttgcgcccaaattcgaaaatgcggaagcgctttgatttgctgatgctattggggccatatcatacatatcttatcaataattccagattttcaacgcgcaaatggtcttgccttcttgtcgcatatgaaattattagagccataaactttttatgcctgctcaatatttagctcgtaaaatatttattcttttcttctgtatatacatattttatttgtgtatgtagttcgagttatttgattgacttgaaataataatataaatatcatattgcttaccgcatatggattatcctgattcatcattatggtaatcgtgaatcaccgagcccgtgttgctcaaccgaaagaactgaaaggaaagcgacaaaacagttgtaaaaagattttttattcgccacatataaagattgtaatgagttcatcgtaaattgtagtcacactagatttagagacaacaaaccattaaagataacctataacaaaagtgaactgtttgctggctctaatgacctctaaatggcttggtactacttattatatgatcaggttattccaaaggtgggtcaatatccctgatatttgatctgcacttgtttaatcgagcttttgccttaaactgattgaagaatagctcctaatccgtttggtactctgacatttaaccaagctgccagctaataataataataaccatagtaatatcattatatatcgcgatgcaaatgctggcggaactgggctgcatagctgcacctaaaaacgaacgacgaagacaatcagctgcctcacatcagcggctctcaagaagaaccccgagaacagctccgtgagtcacctcgcatggggacccacttctgggcagaagactcggccaggtcggatccccaccacccgcccctcgcagcgaggaggcatgttaactgacaacaggtgtttgctgcttgccgtttgtcttgaaaccttgcggcctgcttgccacatttgcatttgatattttgtatgcttgttttcctgccactgttaacgcgtccgcactaaatactttcacacattgcgccccctttctgctctcctttggcttttccggcctgggactcgggccccttaaggatgtggactgttaaagtcagcacacgaccttgatgtgttaatttcccagccacttctgtcagtcatccgtccgagatacacttttacaattgtgttacaataaagggaactatctgaaactctatacaattgcacaattgcagataatttaaacatagaaattatctttataccgtgtaaaaaattgaaaggatagtttaagtatatggataatattctaagtttccttaatttgtactaaatcgttgggacttcagtgtaatataataatatccaaatatccaattttgcattaggtgcatacctttttttagagtgttggtctaaggaacagcctcaggaaagagctgtgatcttaaaaggtgccagctaaatcaaccagtgaagaagattgccccagctaactagaataagtgcgcactctgcgatttgtagaacatggcaaacttacaaggcactcgccataagtgcgagtatataggttctgccaatatttgcgacacatgcaaaagcaatccaagttagattcttcatttgcctgcaagcgagtcagggcaaaatgcactttaaaaaattatcagttttttagatacaaatcttctgaatttccaaaaatgaatgatcactttatttctaattgaaaagtcacttctttgtaaatatagttagatgataggcatttctcattgatcaatagaatattatataaattattatttaagctgcagcatcaagcaaactaaaatgttcacaaatttccagcttgaatattctaagaattattttatcaaaataattatttttgatccttgatggattaggcagcaccactttccatttagttccttcgctattgagcgcaataatttctttcagtgccgcagttaatgccattcccatggatttcgcctgcgttttcgaatttttgtaacaaatattctggcaaataaagctatacacgctatttgcattataaagcaaacatgtgcggcgactatatctgtgcaggccatctcgctcgcacttgacttacattgattctgttatatagtcgtaaagtttatttgccttgcccttgcatggttgttgttgttgatctagccatgttttatggccacactaaaaagtgcactggtcaacaaagatcggccagagaaaactttctcacaaaaccgtagctgggggctatagctcctactgggctgtcgtataagtgtcatataggggagtgtgtatatggtttgtataattaaatcatacaaaccccgccgacagtcgtagacagttcgtcagttagtcggattgtcaagcgttatctggcgtcgccatcttcatcttgattttttttgttttatgaattctattcgttaatgaaattcacatgttccccatctacaactccgaagccccatctctatccccatttttatgtccgcatgatggatgtgtctcaaaaaagcccgttcgttccgtttcttctatatttttttttgagggcgccattgaacctttgaacttacctgcttttactgaccgatcagcctatcaagttaatccaatttatttgcttagtgtttctatttcgttgcgcacttaaggtctgcgtctcctaacattgtgaactttccgtttaaggttttgtgtattttcgtgtatttgcttgctattattttttgttcaccttgcgccaataaaacgtcacttgagcgtatagagttgttgctgtttttgctcaaattgcacttgacttttagaactttaggcgagcgtgaagcatgtttaatatatatcttttgggttgtttgagtatgtgtgtttttgcatatagcagggtgtacatatatcacaaggaggcaatattttgtataatttttattgtaatacaaagttttaaagttttgcagtatggttaaattttaatttagctagagatatttccgtgggactttatttggtgctgtttttacgccttctgtgttttgaatgcgagtttttatggagtgaccacacctttgtgtgagggcactcctggctgcgcacgcgcacttgccgtaaatttctttatttccgctttcgtttgccgcttttgagtttttttgcagtgacgtgttacagactgaactctactatttcagttggcactacatatacatattcgtagtattgttacaattcattttatttaactgagtaattttttgatcttaatttgcatgtgttgatttttagcggcggccaaaacaacgtaacgcctgggacgtaagacgaagacgacgcaacgacgacggcgacgtgcgatcgagcgtgcgagcaagaagcgcgagctatcactaaagactgatgttaagcagttctgcaaagtgctcacaccgctgcgactcggcgactcagatgctttgcaatatcatccgacgaacgctcggtagcacactgagctgagacttcggctaccagagaagtagcaacaacaatatctctggccggggagatgatactactataaacaaaaactacaaactggtcgaagaagcagtaacagaaaccgaaacaaaaacaaaagactgcaaaagcgacaaactcgagcccagctggggtgcgattgtgtgtgtgaggaagaagacgattccgattctctctaacggtgatacacccgaactctcaacccccaaccgaaagacaaccagggagagagagagcgagagtgagacttaaaagagcgactttgactcaaattgcctgtctgtgtgagccgctgtttgagtgatgttaactcaaatccgagtcgattcggctattgagttgtattcacagatcaagctgaaactgagtaaatgcatatgaacatatattaaaaacgtataattactaacataaatacgaactataactatagaaaaggcaccaacaaatttagaaaaaaatgcatgtcgtgtttgcaatatatatataaattgcacagtttatttctcggttaagatataataataaattcctagtaactgcgaacaaatataagtcgtttaagatgtaatctaagtctatttagcgtgttgtttaatttgaccaatcttaagtatttcctttttcttttttctactttatttataatcaattttattcgttagataaatataatataatttaataaatttaacgattgttaaggaacatagttttgttgatttagtgtccaatgttatataactggggaatatttatggcaagctgatcaaatgtggtatatagtaaattaacaatataacatacttgattagttcaaaaaaataagatacaatacaatatacaata

SEQ ID NO: 40751 - DNA, 2648 bp, DROSOPHILA
cgcacgctcgatcgcacgtcgccgtcgtcgttgcgtcgtcttcgtcttacgtcccaggcgttacgttgttttggccgccgctaaaaatcaacacatgcaaattaagatcaaaaaattactcagttaaataaaatgaattgtaacaatactacgaatatgtatatgtagtgccaactgaaatagtagagttcagtctgtaacacgtcactgcaaaaaaactcaaaagcggcaaacgaaagcggaaataaagaaatttacggcaagtgcgcgtgcgcagccaggagtgccctcacacaaaggtgtggtcactccataaaaactcgcattcaaaacacagaaggcgtaaaaacagcaccaaataaagtcccacggaaatatctctagctaaattaaaatttaaccatactgcaaaactttaaaactttgtattacaataaaaattatacaaaatattgcctccttgtgatatatgtacaccctgctatatgcaaaaacacacatactcaaacaacccaaaagatatatattaaacatgcttcacgctcgcctaaagttctaaaagtcaagtgcaatttgagcaaaaacagcaacaactctatacgctcaagtgacgttttattggcgcaaggtgaacaaaaaataatagcaagcaaatacacgaaaatacacaaaaccttaaacggaaagttcacaatgttaggagacgcagaccttaagtgcgcccattccagatgaatcagacgtgcaaggtgtgtggagagccggcggctggattccatttcggagcctttacatgcgagggctgcaagtccttcttcggccgatcgtacaacaatctgtcgtcgatatccgactgcaagaacaacggcgagtgcatcatcaacaagaagaaccgaaccgcctgcaaggcgtgccgtctgaagaagtgcctcatggtgggcatgtcgaagagtggatcccgatatggtcgtcgctccaactggttcaagatccactgtctgctgcaggagcagcagcagcaggcggtggctgcgatggcggcgcaccacaatagccagcaggcgggtggtggaagttccggtggatcgggcggtggtcaaggaatgcccaacggggtcaagggcatgtcgggtgtacccccaccggcggctgcagcagctgctctgggaatgctcgggcatcctggtggttatccgggtctgtatgccgttgccaatgctggcggctcgtcacggagtaaagaggagctaatgatgttgggattggatggcagcgtggagtacggctcccataaacatccggtggtggcatcaccctccgtaagttccccggattcccacaactccgacagctctgtggaggtgagttcggtgcgaggcaacccactcctacacttgggcggaaaatccaattcgggaggatcttcaagtggtgccgatggcagtcattcgggaggaggaggaggaggaggaggaggagtgacgcccggcagaccgccacagatgcgcaaggatttgtcgccattcctgccgctgcccttcccaggcctagcatcaatgcccgtgatgccaccacccgcgttcctgcctccctcgcacctactcttccccggctaccaccccgccctgtactcgcaccaccagggcttgctgaagccaacgccagagcaacaacaggcagcggtggctgcggcggccgtgcaacatctattcaactccagtggtgcaggccagcgtttcgcaccgggcacttcaccatttgccaaccaccagcagcaccacaaggaagaggatcagccagcaccagccagaagtccaagtacccatgcgaacaacaaccacctgctaacgaatggtggtgctgccgatgagctaaccaaacgcttctatttagacgctgtgctcaagtcccagcaacaaagtcctccgccgaccaccaaactaccgccacactccaagcaggattactcaatttcagctctggtcacaccaaactcggaaagtggcagggagagagtgaaaagtcgccagaacgaagaggacgacgaggcgagagcggatggaattattgatggcgccgagcacgacgatgaggaggaggatctggtggtgtccatgacgccaccccactcacccgctcaacaagaagagcgaaccccagccggcgaggatcccagacccagtcccggtcaagataatcccattgatctgagcatgaagaccaccggcagttccctgagcagtaaaagtagtagcccagaaatcgaaccagaaaccgagatctctagcgatgtagaaaagaacgatacagatgatgacgatgaggatctgaaagtaacgcctgaagaggagatatcagttcgagaaacggctgatccggagatagaggaagatcactccagcaccacagagacagcaaagaccagcattgaaaatacccacaataacaacaacagtatcagcaacaacaataacaataataataataataataatagtatcctaagcgatagcgaggccagtgaaacgatcaagaggaaactggacgaactcatagaggccagcagtgagaatggaaaacgtctgaggttggaagcccccgtcaaagtggccacctcgaatgccttggatctaaccactaaggtctga

SEQ ID NO: 40752 - protein, 638 aa, DROSOPHILA
MNQTCKVCGEPAAGFHFGAFTCEGCKSFFGRSYNNLSSISDCKNNGECIINKKNRTACKACRLKKCLMVGMSKSGSRYGRRSNWFKIHCLLQEQQQQAVAAMAAHHNSQQAGGGSSGGSGGGQGMPNGVKGMSGVPPPAAAAAALGMLGHPGGYPGLYAVANAGGSSRSKEELMMLGLDGSVEYGSHKHPVVASPSVSSPDSHNSDSSVEVSSVRGNPLLHLGGKSNSGGSSSGADGSHSGGGGGGGGGVTPGRPPQMRKDLSPFLPLPFPGLASMPVMPPPAFLPPSHLLFPGYHPALYSHHQGLLKPTPEQQQAAVAAAAVQHLFNSSGAGQRFAPGTSPFANHQQHHKEEDQPAPARSPSTHANNNHLLTNGGAADELTKRFYLDAVLKSQQQSPPPTTKLPPHSKQDYSISALVTPNSESGRERVKSRQNEEDDEARADGIIDGAEHDDEEEDLVVSMTPPHSPAQQEERTPAGEDPRPSPGQDNPIDLSMKTTGSSLSSKSSSPEIEPETEISSDVEKNDTDDDDEDLKVTPEEEISVRETADPEIEEDHSSTTETAKTSIENTHNNNNSISNNNNNNNNNNNSILSDSEASETIKRKLDELIEASSENGKRLRLEAPVKVATSNALDLTTKV

SEQ ID NO: 40753 - DNA, 5022 bp, DROSOPHILA
tattctatgccctttctattcgaactattctataaatcaaacgcaaaacacgaatatcaaattgtccattctctagttaagtccagcaaaatttagttagaatcatgggagatcgcaacaagcagccggttattctgctgaaggttccgtcctccgatgatttctatggttcggcgttgcgcagccataacctggatcccatcttcattactccctcgcattttgtgttcaagaatctgaagcaattgcaagccaagttgcatgagccgcacaaatatgccgggattatatttgcatccccgcgctgtgtccaagctgtaaacgaggcactaggaaagacaccacttcctagttgctggcgtgcgttacacaattattccctaggcaagaacacgcacagcgccgcctggataacattccagaatcttccgactctgggcgatcatgccgtgaatgcaaacaatctgtgcgatctgatcgtggagacgtttggacccaagagggatctgccactgctcatgccctgcggcaatggcgtgggtcagacactgcgcctccgtttggtcgcccagggattccgggtggatgcctgcgaagtgtacgagagtcggtcgcatccggatttcgtcaatcagatgcggcacgccctcaaattcaagcgaatggaaacgattgtgttcttcggaccctccagtgtccgcagctccttggagttctttgggaactacaacgtttcgcttaaggatcgcaagctgatagccgtgggcagtggcaccaggaaggcaatggaggaatctggaattaaggcggacggagtcgtgaatgctgctgacgtcgaccgcctgataaatatcatcaaaacatagtttagtatcgatcattttacgttttgtttttaccagtttttacttttggtatgatttcaaaatctgtttggtgtcctttaaagaaatgaggacaaaagtgtgttattaattaaagtgtttcaacaaagtacatgtaatgtttttattacaaaaactataatcaaatagattggatctatttgaacaagatacttcaagatatgagttttaatttaacaattagatacaaaatgggattaaataacataaagtaatcatgttcttaaaaatagcttgccagtttcagacaagttttcaaagaagtacagatgtttaaatgatgatggatctgaatgaatttctaagctcaatattcttccattttactaaaaacaaagtgtaagaattgataatgttgtctgtatgttcgttgtactgcttagttatttagaattcttcaacatgtcgaacatatcaatattattttgtggcttgatgggcgcacataatttggcacgtttgccgcttaaagagttgcccacgatctgtaataaaagttcaataatttaatttcgattataggtgcaattaacaaatactcactggtatatcatcgccgctatcaaagtcggaggaatatgtggtaattttttgacgacgagcattacgctttctggcagtgcttgaaaattcgtctgtattttccggttgcaccttagtaggaatgctctcagttctggttggccctttggaatcttttagctgtttaattgtggtcactggttggtcgatcaggcagttaattcgattcattttaaattgtagcacagccatttcattctgttgggcaattttaaatatataacatgaaatataatgagtccgatagacttacgttcttttcacgctcaagttcaatcaattcggtttcttttcttttaatttcaagctccaattcggatacctttttctatataaaaataataaatcattttgtagaaaaaaggttaatgaaaaagaatttataagtcttaccattaggttatctttctgagactgtaattcctcgctaaatttaactttggccgtggataattcactctcgatttccttcttttcagcctgaagattgataatagcgctctttagcgtatcatgatcactaatcaaatattccaatttatcctgttgagccttaaaagctttattcctttcttcgagttcagatttaagtttttgtatttcaacagcgtttcgcttattttcgctctcaacttcagtggccttcatctgcatttgattagcaagctgctcctgttgccttttgagttcttcttcaaaattatgagttttttcttgaatttcattaccaagacgctttattagctcttcctgattgctgcgatgggacaccatttctataagtttttcctgcagttcggagacctgcagaagggtttctttgtgtagcttctcactgttgctttttagctgagtaaaatcaactgaagccttgttcaagctctcttttaactcttgaacaacaatctgtcaaggagaataaataatcaagatacaataaaatatgaatttagtatttttcagaccaacctcgtaggcatctgcttgatcttttatttcctgggagtgcttcaattttgtttcagtcaactcattgatataactttcgttgatatcagcgagctcgctcaatctctccgtcatttgagttagttcatcacttagggaaacatgtcttctttccttttcctcaataagagtcttaaacgtatttatctcattgcgaacaagttcgagttccctcgttgcctgatcagtcaatcgttgctgatccacgaactgcaattcactggcttctaaatcacgttgcagtttcgacaaagctttgttggcctctattggcagctgctcaatgcgatcttcaagctgggcgcagtcaagcatctttgcatttaagtcgctgcttaattgtaaaatgtttgcctgtggagaacataatgttataatctaatacaaggaaagccagtgtaacccacctcaaacttttccttttgtgcagacacatcttcaaattgaagctgtaggtcttcgtggagctctttgagatcggtaagttcatgtagaatcatagatttggccacttctgcttcttccaaatcctttttataattctcgcaggctccagctaactcacgattcgtttgctgcatattattcagctgcaaagtgagatacacatgtagatatatataaatttatatctatatattttaaaatatagtaaactcacctcttgcgcctgcagggccatccgggattgagcatctcggagctctgaatttttcttctcaacacatactttaatgatttccagctccttgtcgtaatgttgctcgcagtgggtgtactttttgttgatttccgtgtacttctggatgttctctgcgttcttctcctgctgctcgataagatcagttttcagttgggtcagctccagttccatatttgtcaacctgaaagaataagctcactgcaggcaggaactgtattgaagaaggaaggtcttacttttccttcaagctgatattttccgattttttcttcagcgagtccatggcgatggctctcattttcttgctgaccaccaagtctttcttcttgagattatttagcgattcgttgtactgctttatgaagctatgaattattattcccgtgtggggcgacagcttctgaatatctgcccataattctccctcgtttttgggagacttttttagactttttgttgaactgtctatggtggctgcaaaagtttggtcttcctgtgttttttccacagcctgagaagtttgcgcttcaatttttgattgctgaactctaggagccactagcggagttctttttttggatggcttttcgtttgatctttcgaaaagttgagtttttacatgatcctttttccaaacagttggaatttggctgtttttttcttgggcaactgtacctggttttggggctttcgagtgagctgcatccactaacggtgctcccgatcttttcttggcgcccgtcattttgccagctaagcagttgtattagcgcaactaatttataaaagaaataaatatatattgtacattacaaacgttttgtttagtttacctaaacttttaccaagtgcgtcctgcgttgaaaagcaacggtaaacattagctagagatgagcttgatgacctacagtatattgttgttcacaagaggtgtgtgtactgtctaaatactgacctcacggtattttctactgaacgcccctggttttgcgttgtcgccctggctacgataactatgttacaatttaataataattctattttggttgtcaacattcagtttttgctagctctatttagaaatttgagtgctgcaaggaatctaagtggcatcagaaatctgatcacgactacataatggcgggatctggagttgccaagcagatatttgccctcgatttcgagatctttggacgagtgcaaggtatgcaatgcatttttctgattcggcttgttaaacagcgtattaaattttgcaggtgtgttcttccgcaaagtaagtactgggaggcctatatatatatctggaaatcaacatttaacttatgtacatttttggcttagcacacgtcgcatgaggctaaaagattgggagttaggggctggtgcatgaatacccgggatgggaccgtcaagggacaactggaggctcctatgatgaatttaatggaaatgtaggtaccgctgcactccactaattcaatcatttaaccatcgcccactaatttgaaggaaacattggctggagaacaaccgaattcccaacgctaaggtctcaaaggctgaattttcgcaaatccaggaaatcgaggactatacgttcacttcctttgacataaaacattaaaaacgaattattagctctttcgttgtccatccaattccgaaacaaagtctaaataaattaccagggctgcaacttgcgtaagcaggcatatctgcattgctatcgactgagtcgataacattcgatagtatgaacataagaaatattacgtttcgcaaaactgaacccagtactgaagtacaacaataaataaataa

SEQ ID NO: 40754 - DNA, 2602 bp, DROSOPHILA
acaaaacgtttgtaatgtacaatatatatttatttcttttataaattagttgcgctaatacaactgcttagctggcaaaatgacgggcgccaagaaaagatcgggagcaccgttagtggatgcagctcactcgaaagccccaaaaccaggtacagttgcccaagaaaaaaacagccaaattccaactgtttggaaaaaggatcatgtaaaaactcaacttttcgaaagatcaaacgaaaagccatccaaaaaaagaactccgctagtggctcctagagttcagcaatcaaaaattgaagcgcaaacttctcaggctgtggaaaaaacacaggaagaccaaacttttgcagccaccatagacagttcaacaaaaagtctaaaaaagtctcccaaaaacgagggagaattatgggcagatattcagaagctgtcgccccacacgggaataataattcatagcttcataaagcagtacaacgaatcgctaaataatctcaagaagaaagacttggtggtcagcaagaaaatgagagccatcgccatggactcgctgaagaaaaaatcggaaaatatcagcttgaaggaaaagttgacaaatatggaactggagctgacccaactgaaaactgatcttatcgagcagcaggagaagaacgcagagaacatccagaagtacacggaaatcaacaaaaagtacacccactgcgagcaacattacgacaaggagctggaaatcattaaagtatgtgttgagaagaaaaattcagagctccgagatgctcaatcccggatggccctgcaggcgcaagagctgaataatatgcagcaaacgaatcgtgagttagctggagcctgcgagaattataaaaaggatttggaagaagcagaagtggccaaatctatgattctacatgaacttaccgatctcaaagagctccacgaagacctacagcttcaatttgaagatgtgtctgcacaaaaggaaaagtttgaggcaaacattttacaattaagcagcgacttaaatgcaaagatgcttgactgcgcccagcttgaagatcgcattgagcagctgccaatagaggccaacaaagctttgtcgaaactgcaacgtgatttagaagccagtgaattgcagttcgtggatcagcaacgattgactgatcaggcaacgagggaactcgaacttgttcgcaatgagataaatacgtttaagactcttattgaggaaaaggaaagaagacatgtttccctaagtgatgaactaactcaaatgacggagagattgagcgagctcgctgatatcaacgaaagttatatcaatgagttgactgaaacaaaattgaagcactcccaggaaataaaagatcaagcagatgcctacgagattgttgttcaagagttaaaagagagcttgaacaaggcttcagttgattttactcagctaaaaagcaacagtgagaagctacacaaagaaacccttctgcaggtctccgaactgcaggaaaaacttatagaaatggtgtcccatcgcagcaatcaggaagagctaataaagcgtcttggtaatgaaattcaagaaaaaactcataattttgaagaagaactcaaaaggcaacaggagcagcttgctaatcaaatgcagatgaaggccactgaagttgagagcgaaaataagcgaaacgctgttgaaatacaaaaacttaaatctgaactcgaagaaaggaataaagcttttaaggctcaacaggataaattggaatatttgattagtgatcatgatacgctaaagagcgctattatcaatcttcaggctgaaaagaaggaaatcgagagtgaattatccacggccaaagttaaatttagcgaggaattacagtctcagaaagataacctaatgaaaaaggtatccgaattggagcttgaaattaaaagaaaagaaaccgaattgattgaacttgagcgtgaaaagaacaatgaaatggctgtgctacaatttaaaatgaatcgaattaactgcctgatcgaccaaccagtgaccacaattaaacagctaaaagattccaaagggccaaccagaactgagagcattcctactaaggtgcaaccggaaaatacagacgaattttcaagcactgccagaaagcgtaatgctcgtcgtcaaaaaattaccacatattcctccgactttgatagcggcgatgatataccaatcgtgggcaactctttaagcggcaaacgtgccaaattatgtgcgcccatcaagccacaaaataatattgatatgttcgacatgttgaagaattctaaataactaagcagtacaacgaacatacagacaacattatcaattcttacactttgtttttagtaaaatggaagaatattgagcttagaaattcattcagatccatcatcatttaaacatctgtacttctttgaaaacttgtctgaaactggcaagctatttttaagaacatgattactttatgttatttaatcccattttgtatctaattgttaaattaaaactcatatcttgaagtatcttgttcaaatagatccaatctatttgattatagtttttgtaataaaaacatta

SEQ ID NO: 40755 - protein, 744 aa, DROSOPHILA
MTGAKKRSGAPLVDAAHSKAPKPGTVAQEKNSQIPTVWKKDHVKTQLFERSNEKPSKKRTPLVAPRVQQSKIEAQTSQAVEKTQEDQTFAATIDSSTKSLKKSPKNEGELWADIQKLSPHTGIIIHSFIKQYNESLNNLKKKDLVVSKKMRAIAMDSLKKKSENISLKEKLTNMELELTQLKTDLIEQQEKNAENIQKYTEINKKYTHCEQHYDKELEIIKVCVEKKNSELRDAQSRMALQAQELNNMQQTNRELAGACENYKKDLEEAEVAKSMILHELTDLKELHEDLQLQFEDVSAQKEKFEANILQLSSDLNAKMLDCAQLEDRIEQLPIEANKALSKLQRDLEASELQFVDQQRLTDQATRELELVRNEINTFKTLIEEKERRHVSLSDELTQMTERLSELADINESYINELTETKLKHSQEIKDQADAYEIVVQELKESLNKASVDFTQLKSNSEKLHKETLLQVSELQEKLIEMVSHRSNQEELIKRLGNEIQEKTHNFEEELKRQQEQLANQMQMKATEVESENKRNAVEIQKLKSELEERNKAFKAQQDKLEYLISDHDTLKSAIINLQAEKKEIESELSTAKVKFSEELQSQKDNLMKKVSELELEIKRKETELIELEREKNNEMAVLQFKMNRINCLIDQPVTTIKQLKDSKGPTRTESIPTKVQPENTDEFSSTARKRNARRQKITTYSSDFDSGDDIPIVGNSLSGKRAKLCAPIKPQNNIDMFDMLKNSK

SEQ ID NO: 40756 - DNA, 3305 bp, DROSOPHILA
tgactaattgaaaatgcaaatatacatagatattaattggacgcctttgcgtgtcaagtttacggcagggcgacacctgtggactttaaccaggtgataattatctcatgtttgactaaattatcttatatttgattgtcacaggttcgtgtgcccccattgcacctcgtgcaccaatatattctcgtcaaacggtggcgtctcactggccacttacgcccaagtaccacatctaggaactctgcccatagatccccgtgttggcattttggcgggcaccactacgtccgtcttggatgagcttccggattccacgacagcggaggtgctgacgcatatagttgagaagttgaaaacgatgttggtctcctaaataaataccaacataacaattttgtaaatatgatagcttgtttcattattcagtttatgaatataaccattttcttcaggaaacgatttaatttgccatggtatttaattggtaaacttaaatagggactcccattgttaaacacattttagcttttgtttagctttggtttctttttctttatttttgtatgctttggaatgaatgtagttgatgagttttgggtataataatttaaaattatatgagtgcgagcgtttgatatgtaatcactctaatgcaacaattctgcgtgtgcagtaattataatttacaatcaaactaatactttccaattataattaataacgtattccttaactgcttaactcctactgctaaacctaatcgctttatttattgatttgagcatagtttaaagatcaaattgtatgcttatctctggactgacgacaaagtatagtttcttttcctaagtagtactatcatgcagacttcatccactgttttggtataatttttaagatcaaaaatcagtctgcaggaggatggaattcacacagagaaaaaacgaactgataaactgagatggcaacctggaactataattttctctctgtgcaggaatcacaacttttgctccgtcttcgctttctccgtttcattcagctttcgaactggatttaatggtatggcatggtattttttgtttttcgaatatctcttcacgatggcataaagggatataaacactataagtataacaaagcccattataaccacgcattccaaaggccaatcggtttggatgcgctcctggggcacctctgcgtagggataccttatttgctggatctccatactgttgagatccttaatctgactggtcgattcgggcgccacgaccgccggttgattcgtgatgggattatcggtcaccacggataagaagttagttgcattgactaagatcacggtgggctcatcagttgctttcggtgttctgccatcaggattaaaatccattttggtgataccatcatctgttgcagtgggaagttccattgaagtgcttgaaactgtggaagttgctgttgcttcgaatgtggttggatttgtggtagtctccattgcagaatcagaacttgaggtttcttgttcttctgagtcggttctgagatccggcgactcggaagtggcaaattctccaagttgttcataactcgaatccgtacttgtcctctctgtggaactggataattcacttgtgttcggagtcggtgtggccagttcagatgatgtagatgagctattgggtgaaccgctggtgtctggaacggaatcagaagtatctgttggcacagtggagctccaccctgaactggaggattcgctttcgcccaaaattggtgctgaagtggtgtttctatacttgtgattaccatcgtcatagatactgttactcacacccagctcgtccggacaaaccggacagcactgtcccttgacctcaacgggattgttgcaccgataataatgattgcactgaacagcattgcgggtgacatatccaccttcgcacatgcatgtagtacaaccattgttttccatccaaatatcgccatttctgtggtactcattgttgtcagacaggcaaatgggttcgggttcttccattggacatatttccttgcactgaatggccagcggttcgcaaggatcgcacacagtgcacttgttcttatagaatctccttttggaaccatcgcagacaggttcctcatcgaggcactcgtagcgaggacaacagctaccgggcagtccattgccccgttccacctccacgatcactttgtaacagatgggaaagtcattctcacacggtggacacgcaagggattcgtctatactatctgggtcaataatgggcatagctgcaatcaataaaagattaagaatgattagtaagcatcgaaagccaccatgttcttacccagaacggaaatacgatactccaaggagatcgaaaaaaatgccgttctgatttgaatgcccttcaagttcaatatttacatatcgatcgatcttgaaaatcacattccaacaagcaaaccaaatagctatgaattattcaatcaagctagaggtaaatttataaaaatggcaatttgattaggcacacttataggaaacttcttcgaaaaagcaggaatccaatcaaaacaaacggaatgatatttatttttggtggaatacaaagtacgggagtgatactctcgtttatcatttatttattgttattgatttttgacattttatcattgaattatgtataaaagggggtagaaggcgccggagcgataaaaaacggcaatgacagagaacaataacagtgtgaagaaaaaaaagtagatatatagtgcaagtgcttcaccaaacaaacccgaaagatttgaagccccctcttattatatcgatatggatcggtcgtttcattgaacgaatattgccccaattgcgtgtattattagtttaggtggtgtggtggtaaaacttgttacacaaatgcgagccatcaaagcaagtctgttacaatctcttcccgatcgtgatcgaaggttatcaattattttcgatattgacgtcactgtcgcagactttgtaggtgaagcgcatttaattgaacgtaatttaaaatagatataagttgttgctttcgtcgttctggctttattcttcggctatcaggtcgcagcgatctatatgacagccagcagacggggcaattattcatatgctcggttctgtgtgcgtgacagtgctcgtttgtttgagaagcgcatagaagggcgctggcaacgccagggaagtgtgcgtgttggatcgataagaatcatccaaataccttgaaactgtttacttatctagatag

SEQ ID NO: 40757 - DNA, 1305 bp, DROSOPHILA
atgcccattattgacccagatagtatagacgaatcccttgcgtgtccaccgtgtgagaatgactttcccatctgttacaaagtgatcgtggaggtggaacggggcaatggactgcccggtagctgttgtcctcgctacgagtgcctcgatgaggaacctgtctgcgatggttccaaaaggagattctataagaacaagtgcactgtgtgcgatccttgcgaaccgctggccattcagtgcaaggaaatatgtccaatggaagaacccgaacccatttgcctgtctgacaacaatgagtaccacagaaatggcgatatttggatggaaaacaatggttgtactacatgcatgtgcgaaggtggatatgtcacccgcaatgctgttcagtgcaatcattattatcggtgcaacaatcccgttgaggtcaagggacagtgctgtccggtttgtccggacgagctgggtgtgagtaacagtatctatgacgatggtaatcacaagtatagaaacaccacttcagcaccaattttgggcgaaagcgaatcctccagttcagggtggagctccactgtgccaacagatacttctgattccgttccagacaccagcggttcacccaatagctcatctacatcatctgaactggccacaccgactccgaacacaagtgaattatccagttccacagagaggacaagtacggattcgagttatgaacaacttggagaatttgccacttccgagtcgccggatctcagaaccgactcagaagaacaagaaacctcaagttctgattctgcaatggagactaccacaaatccaaccacattcgaagcaacagcaacttccacagtttcaagcacttcaatggaacttcccactgcaacagatgatggtatcaccaaaatggattttaatcctgatggcagaacaccgaaagcaactgatgagcccaccgtgatcttagtcaatgcaactaacttcttatccgtggtgaccgataatcccatcacgaatcaaccggcggtcgtggcgcccgaatcgaccagtcagattaaggatctcaacagtatggagatccagcaaataaggtatccctacgcagaggtgccccaggagcgcatccaaaccgattggcctttggaatgcgtggttataatgggctttgttatacttatagtgtttatatccctttatgccatcgtgaagagatattcgaaaaacaaaaaataccatgccataccattaaatccagttcgaaagctgaatgaaacggagaaagcgaagacggagcaaaagttgtga

SEQ ID NO: 40758 - protein, 434 aa, DROSOPHILA
MPIIDPDSIDESLACPPCENDFPICYKVIVEVERGNGLPGSCCPRYECLDEEPVCDGSKRRFYKNKCTVCDPCEPLAIQCKEICPMEEPEPICLSDNNEYHRNGDIWMENNGCTTCMCEGGYVTRNAVQCNHYYRCNNPVEVKGQCCPVCPDELGVSNSIYDDGNHKYRNTTSAPILGESESSSSGWSSTVPTDTSDSVPDTSGSPNSSSTSSELATPTPNTSELSSSTERTSTDSSYEQLGEFATSESPDLRTDSEEQETSSSDSAMETTTNPTTFEATATSTVSSTSMELPTATDDGITKMDFNPDGRTPKATDEPTVILVNATNFLSVVTDNPITNQPAVVAPESTSQIKDLNSMEIQQIRYPYAEVPQERIQTDWPLECVVIMGFVILIVFISLYAIVKRYSKNKKYHAIPLNPVRKLNETEKAKTEQKL

SEQ ID NO: 40759 - DNA, 3792 bp, DROSOPHILA
tgcttactggcaagatcaagtgcctttccggccaactgtgcgtatacttgatgtgcacacatatacatatgtatgtgctgcattgtgaatctgtgcactgccacataatggaccgactttatcaatcaaatttgccgcaggcagggaattaaaattaatcggtttcaattttcatttgcgtaaattccctaaatattttcacacacttatttcacacccaggcatcatcatttgctcatcctgtctggggaagaaagggagtgcaagcctatccatgcaaattgaataggtctaaattcaatttggcgctgaacaaaaagaaattggcggacggagaaacaaaaacaaaaatgcgcaaaacattttggtaatttagttgagcgatttgcatttccgttggggaataatttctgcacttttgtgctcactgactgcccaaattgaattgccaaataacaaaaaaggcaggatgcatatgaaattcgagcacatatatgaatttaattaaatgctgttgaatacgaaaacattttgcttaaattgtcgcacgccaagcaccacagcagcatcagaatttgcattgattgatgccgtgttcggtgatttattgatcctgaggtttgtcacccaaacagcccttcacccatttcagccccagttccactcccccgcaattattgtgattgtcagtcggtaatggcgggggatgttctgcacaatgcatatttatttagccgggtttcattttgtatttcttggaaccgcagtgattgatgtggccatgttatcctcaaaataactgtgactgcacccggtcacccggtccgttgttcactgacatgtcaagtgatggctccgttcatatgttgtgtttggtcaaaaactcaatttaaattgcatttgtgttcactgcgcatctgtcagcatgtgtcggcttgtctcgtccgtcgacggatccccttgttcggagaactattagttgaataaattcgtgagggcgttagttatcgttggagttactcaagggatcgctggactcctcctcctcatcgccgtcggagtcgaaggcgttttccggaacgtcatacagacggatcatcggcttgttgggatccttcatgatcagatactttccatccggttgcctcatcacaaggtcaattaggcaacgcaatactccccaggcattgtccatgttcaggttgatttgggtggcgaactcctgcggcttgaattgctgtgtgccaaggatcacgtgacgcaggtgatcacgcggattcatcctggacacatagcctaacttcagttgatcggaaccagccagcacagcctcaacggtccatcgagctagcttacaagcattgttgcgcaactcggaggccaagactgcaccgcgctgggtgtccaacttctggcgccactccacactgttggtcaccttggagtcccattcattcagcgccttgatcgagaggaactgcacgtccccattgggtccttggataaccccattgtgcttgcagcgagcaatcagcaccacatcgttgcccagatcccactgacggtagcgatagccaatggaggcaagatccacgcctggctcctcgaacggattgggctcctcaaacatgaaacgtggctcttggtcgccaatgcgaagaaccttttaaaaataaataacataagatttaaaaacgtacaataacaaataacataaattgaaacctactgtaaacctacctgctggctaaagttgtgattaattagagtggcctccattgccaagctatgtgccgaattgatggaaccctcctcatccatcggaggttctactgaagtctcgttgacagtcagcaaatcaaattgatcattatatctcttatctaagaacaccttagtgcccaatttctcgactaccacatcccaagagtaattggagcgtgtgcagcacattatggtggacaagatttcgtcggtggcaaagacattgcccatggtcctcgaaagacgacgaataaccggatcatccgtggtcgtcacggtgtgcacaacacgatccatcttttgcaatggtttttcattgcgtaagttgactcgatcgtataacttatcataaaattccagccatccgcaggtggcaatgtccttaccatctttaatattgggaagtgccagcttgagaaggcgtggaaaatcaatctcctcgatcgaaacccaatccgattgcaccatcactgagctctcgcggattctggtgggagcattgcgaccgaatctgcgacccatattctgcgtgttgcgtgtattgcgaccctttccgtacttggtggtactggcagttgcgcctccagccgtggatcccccgagacttgctatattcggagtgccacgccccgtgcgacccctgctcctcacattgttgcgcatattgggtctatagcgtccccgctgatagggcttggtggccttcgatccagtggtgtccaccaaatggaaggtggagtcatcgtcctcgtagaagtatgcgtactgactgttgttgccaaaggtcgaggcgtatttactggggaacttcttctcgggcaccatcgcagtccagtcgcagatcttgcccaggcgatcacttttgcagaacggctggtagggcacatccaattcgggtacctcgcaaggaccccagccgtgctcgttgtactccacatagggcttgataaagggtgcgtagttggacataatcacgccgaaagatgtttaaataaccaagagcaagtatttacatttatgtgatccggttttgtcgaggtacaaattacactgagctgatttcgtatggccggcttgacagcttgggaaaattttccaagccctacgtttggataatgttataatatgaaaaaggcggttttatccattaaggaaataaccgaatatccaatctttaaataatttttgatagacaactaaaaagatttcttcaaaagcctatagtaagtagattgaagcctattgtgagaaatcaaaagataccaattcctcacaataaaagctcagtcttatttgtatttctagtcacaccgaaaccctataaactacacaaagtgagaagtaagacgtttggagaatgaatcttaggaggacgccctgcccccaattaaacaccaccgcaaccacaatgaagaaatgtgtaattgcctgttcgtctttcggttctccgtcaacgtcgtgctgctctcattggccacgattattctcatcctccgcatggtgagctgatccaggatgggcgcggggatccccttccagccgacaaattcttgtttcttattatcttttataaaaaaccctcactaagcgcacaaataaatgtttgttgagctgtggaaatggtacaggaagcggggtactgtgacgggattatcacttgacgacgcatctaagctcacatcgacatgactccattcatatgactccaactccagcaccattgttctgacccaagtatcaggaaagcaaaggaacaacagcggagtgcactacaatgggacgagtgtcctgtgtgctggatctggtcaacttggctcagtcctcactgtgttccggttcggtttccttattcttggctgggagcaccttacaacaatctcgttaagcgtaaaggccaaattatagtaaaactaacagaaggcaaaaggtaatcacataaaaagcttgttagataacaacgtgtgaggcggcgaaaaaggaagcggacatcctgcactccggctcatacccaaaaagcaacatgtcgag

SEQ ID NO: 40760 - DNA, 1715 bp, DROSOPHILA
ccggatcacataaatgtaaatacttgctcttggttatttaaacatctttcggcgtgattatgtccaactacgcaccctttatcaagccctatgtggagtacaacgagcacggctggggtccttgcgaggtacccgaattggatgtgccctaccagccgttctgcaaaagtgatcgcctgggcaagatctgcgactggactgcgatggtgcccgagaagaagttccccagtaaatacgcctcgacctttggcaacaacagtcagtacgcatacttctacgaggacgatgactccaccttccatttggtggacaccactggatcgaaggccaccaagccctatcagcggggacgctatagacccaatatgcgcaacaatgtgaggagcaggggtcgcacggggcgtggcactccgaatatagcaagtctcgggggatccacggctggaggcgcaactgccagtaccaccaagtacggaaagggtcgcaatacacgcaacacgcagaatatgggtcgcagattcggtcgcaatgctcccaccagaatccgcgagagctcagtgatggtgcaatcggattgggtttcgatcgaggagattgattttccacgccttctcaagctggcacttcccaatattaaagatggtaaggacattgccacctgcggatggctggaattttatgataagttatacgatcgagtcaacttacgcaatgaaaaaccattgcaaaagatggatcgtgttgtgcacaccgtgacgaccacggatgatccggttattcgtcgtctttcgaggaccatgggcaatgtctttgccaccgacgaaatcttgtccaccataatgtgctgcacacgctccaattactcttgggatgtggtagtcgagaaattgggcactaaggtgttcttagataagagatataatgatcaatttgatttgctgactgtcaacgagacttcagtagaacctccgatggatgaggagggttccatcaattcggcacatagcttggcaatggaggccactctaattaatcacaactttagccagcaggttcttcgcattggcgaccaagagccacgtttcatgtttgaggagcccaatccgttcgaggagccaggcgtggatcttgcctccattggctatcgctaccgtcagtgggatctgggcaacgatgtggtgctgattgctcgctgcaagcacaatggggttatccaaggacccaatggggacgtgcagttcctctcgatcaaggcgctgaatgaatgggactccaaggtgaccaacagtgtggagtggcgccagaagttggacacccagcgcggtgcagtcttggcctccgagttgcgcaacaatgcttgtaagctagctcgatggaccgttgaggctgtgctggctggttccgatcaactgaagttaggctatgtgtccaggatgaatccgcgtgatcacctgcgtcacgtgatccttggcacacagcaattcaagccgcaggagttcgccacccaaatcaacctgaacatggacaatgcctggggagtattgcgttgcctaattgaccttgtgatgaggcaaccggatggaaagtatctgatcatgaaggatcccaacaagccgatgatccgtctgtatgacgttccggaaaacgccttcgactccgacggcgatgaggaggaggagtccagcgatcccttgagtaactccaacgataactaa

SEQ ID NO: 40761 - protein, 551 aa, DROSOPHILA
MSNYAPFIKPYVEYNEHGWGPCEVPELDVPYQPFCKSDRLGKICDWTAMVPEKKFPSKYASTFGNNSQYAYFYEDDDSTFHLVDTTGSKATKPYQRGRYRPNMRNNVRSRGRTGRGTPNIASLGGSTAGGATASTTKYGKGRNTRNTQNMGRRFGRNAPTRIRESSVMVQSDWVSIEEIDFPRLLKLALPNIKDGKDIATCGWLEFYDKLYDRVNLRNEKPLQKMDRVVHTVTTTDDPVIRRLSRTMGNVFATDEILSTIMCCTRSNYSWDVVVEKLGTKVFLDKRYNDQFDLLTVNETSVEPPMDEEGSINSAHSLAMEATLINHNFSQQVLRIGDQEPRFMFEEPNPFEEPGVDLASIGYRYRQWDLGNDVVLIARCKHNGVIQGPNGDVQFLSIKALNEWDSKVTNSVEWRQKLDTQRGAVLASELRNNACKLARWTVEAVLAGSDQLKLGYVSRMNPRDHLRHVILGTQQFKPQEFATQINLNMDNAWGVLRCLIDLVMRQPDGKYLIMKDPNKPMIRLYDVPENAFDSDGDEEEESSDPLSNSNDN

SEQ ID NO: 40762 - DNA, 4644 bp, DROSOPHILA
ctttagtttatgtacataattctcttctctgttttggtttttaatttaaagaatggcccgatccactttgtttctgcagctttaaagtttatttatatcaacttcttattttagtttcttctctttttgcggcgacaatttacctagaaaagtgaaatgaaaaattgtagatcaaaagtagcagatataaaagttaacaataactggttagactattttaattttaatatcgtagtgcatgatgttgggtgcatcaatggaattactccttggcaattgtgcttttttgtggcaatgcaatccgcggagaatcggagaaggagaaagagacagagaaggggagaaacgcaaggagaatttaaattgagagcaaattgagttgataaaacattgtggttaaccataaattgagccaataataaagaaagtcagcgggcgcaaaaaagaaagttagtcgtaaggcaggcaacattaaagggactgaaatgatcgaaatttgctatgccacaattaagcacaatagttatcctattttacggagttatccaaattatccaccatagacatgaacagacgttttgaacaaccctacacaattcaaagataattgttcatattttaacccatttaatgttgcttgcagttgttaaatggctatacatacctttcgagggcgatgatgagctggcaggaatagtttcttttgtttttgcgggcgtcgatgaaacctttttcagctgtcgctgctgaaatattcaattgcacaaattagcacatctgcacaattcgagttgtattcaaattagctcttacctgccagtaaaccgcgaggtagacaaatgccaccgagattattacttggacagtcagccacaggacaatgttgatggcttgcgtgcgctcaaacaactccttgccattcttgatgcacagaatagcttcggagaccatgatggcgccgtaaacccaacactgggtgccgactctcttgcagcgtgtgtcggtgacatatacgtaatattgcctaaaatgcagagtatcaattgaaatacataagtaatatattataaatggttataagaacaacgtacctaaccgaaggcgccacaaacagaccgatgaaaatgagacgacctatcacaatgaagtgatccggtggcatctcaaagatgtgcttcaagaagaatgtgttcagctcggtgacctgccagaagatcacaagctgaatgacggcggcaaatctcatcgccgtggacttgggatccagccagcgaatggccgaccagctctcgggcgtaaattgcagcatggcacgcttgattttacccgttgtggtggatatgtccttaatactggcccacttgtactcgcgcatctccagaatctggcagatcttcagacccatccaaatgccgagaccgttgcagatgatcacatccaggatgagggcatcccaccagcactcgatgaagttgggcagcaggtgcgcaaaggttatttcggtaatctcccacatcacagaaatggcccacagaatgcccatgtgacgaatgaggatggccttaaaggcccagcccaagaagtgaccccaggcaaagacgtccaagtggcctttaacgcgatcccaactgatgtccgaacaattgacgccatactcctggaaattatgaaattgttggttacatattgggcagtttataatgatgaaggacttaccttttccatatcgatatggaagttcttcaactttggatcaatccagtagaatatgctcctgatagtcgggtagttttggaacatcaggaattgtagcgtcagcaggtacagcacagagcatccgaataatatccgccagacggcgggatggggtcgtgtgaagggtccattgggaaatgcaatcaccgagacgatcagaaagaagaacacaatgcagaggaggccggcccagagattctcatccacgttcgcctcgtttctgtaacgaaagcgcattgctaaatggatgatcttggcttccattagcgctactatttcagtcatagtattccttatcagcatagcacgtttttcgatggggtttgggggtcaatggcacgatgaagtgaacgtcgagtacattacgtatgtgccttaggcgattctacttttatatactgttcgctagactagcgcatatatatataattttttttattttttttttttggcttttttaaaccttcggctgtctgagttgacacttttggcagagtattcgtgatatttttaagtgcttaacccgtgtacatcaattgatgtgtgaactaagaaggcacatggtgcagatatatgattaaaaagtatgatttcatcgaaagttttttggcgataagggacttaacagggtagtgaaatccaatcatttttgatgaaacgtcaattataattataaaaaatttataaataattataacaaatgaaaccttttgaagatgctgatacattgaataattggttctatctcgctaccagccaatgcaaataaactattgttactaaggggatttactacagaacagttatgtaatactgataagggttaagaccagtactatagttctaaacgtgcctctcatagtaatcagtactgacagaaatggatttacaaactctttcttatctaaagattctgtcggttcaaggaatacccaatataatataatataatataataagatgaagctaacgagcgcaccaaacccgcataaacacccaatgggttaacaagcaaaactcaacgatttttcaatgctatctcagctgacaaaggcaaagttctaagatcgaaatgaatacaagtgaaccgattgcgagctcgcaatgaagttgcgttgtattaaggatcgaataaccttcattggttatcacgaaggggttcccctgcgggctcatgggctcatctactcacctgacgaacgcaaagtacatgacggcgagcaccgaaacagccagcaaggtgatggtgtgtggcttgtagaagaagtccagcgatatgtcgtccacgggacgttcgttgacgatcacaaatgtctgggcgatctcgtccttgcgcttcctgcgtgctcccgcgctgctgacactgccatcgctgccatcccgtcgcttggtgggcgtggcaggggcactggccgcgcctgatttgtaggcgggatgatcccgctcagcatcgccggcggaggagaaggaggtgtccagtagcgcgtcgcccgacgaggtcggggtgccacgtgaattagtgcgcttcttcatcgcctaactacaaattcgattatcaaatgtaggcgggtggcgtgatgtggttgttgttaggtggttggtggctcggaatcggtttggtggctaagtacatgcggggactgaaggttgcgcaacattcgattcgattccaccaagacttgccactcggctctcctcgcagcggtttctatggctcccggctcgagtgacctcgattgctatggcgtgggcacggctcctggatcctcgactcgcgttcgatcggcgcacgtttattttatcatttgccagctaccgtccgttgttgtcaattaacatgctgcgcgcggcttggaccaataaaaatcgacacttgccggcggtggtgttgccggagggttgaaatgtgtgacttgataacaggggcgttgccagatgaatagcggaacgttgggggtgatccaggtatcttatgatgacaaatattttgtatattttcagatcgtattcgaaaagcagtcatcaccctactttataacaagattatattgtcactattttagagttatatagcgttagttatataacttagttctttaccttattttttctatataataactttctaggcagcatttatggcattcccgaggataaaatgattttttgtttacaaacagtcaaataataatgaggtcacgcataacattattcagattggatatttcaacatagtggaatcctggaacacccctaatgctatgactgtagccctgaacagctgattgcacttgttgactaaaacgcaatccacgactttgcattggtttcggaataaattgcttttaaatcgctttataatgctggacaaggttaaaaatgttatcgtagtgctatcaggcaagggcggagtaggaaaatccacagtgagcacccaattatcgctggcactgcgaaaaaacggatttaaggtaagccaaaccatttcaccacaaaaacattaccgatgaattttgaatggtactcatatgaacaatctattaggttggtctgctcgatatagatctgtgtggaccgagtgtgccatatctattgggtctggaaggacgggatatcttccagtgcgacgatggatgggttcctgtctatacagatgaatcccaaaccttggcggtgatgtccattggatttttattgaagaaccgtgaggatccggtcatttggcgtggtcccaaaaagaccatgatgatccggcagttcctcaccgacgtcaggtgggatgagctggattacctaattatcgatacgccacccggcacttcggatgagcacatcaccgtaatggagtgcctgaaggaggttggttgccacggagccataattgtgacc

SEQ ID NO: 40763 - DNA, 1853 bp, DROSOPHILA
acaccaccgccggcaagtgtcgatttttattggtccaagccgcgcgcagcatgttaattgacaacaacggacggtagctggcaaatgataaaataaacgtgcgccgatcgaacgcgagtcgaggatccaggagccgtgcccacgccatagcaatcgaggtcactcgagccgggagccatagaaaccgctgcgaggagagccgagtggcaagtcttggtggaatcgaatcgaatgttgcgcaaccttcagtccccgcatgtacttagccaccaaaccgattccgagccaccaaccacctaacaacaaccacatcacgccacccgcctacatttgataatcgaatttgtagttaggcgatgaagaagcgcactaattcacgtggcaccccgacctcgtcgggcgacgcgctactggacacctccttctcctccgccggcgatgctgagcgggatcatcccgcctacaaatcaggcgcggccagtgcccctgccacgcccaccaagcgacgggatggcagcgatggcagtgtcagcagcgcgggagcacgcaggaagcgcaaggacgagatcgcccagacatttgtgatcgtcaacgaacgtcccgtggacgacatatcgctggacttcttctacaagccacacaccatcaccttgctggctgtttcggtgctcgccgtcatgtactttgcgttcgtcagaaacgaggcgaacgtggatgagaatctctgggccggcctcctctgcattgtgttcttctttctgatcgtctcggtgattgcatttcccaatggacccttcacacgaccccatcccgccgtctggcggatattattcggatgctctgtgctgtacctgctgacgctacaattcctgatgttccaaaactacccgactatcaggagcatattctactggattgatccaaagttgaagaacttccatatcgatatggaaaaggagtatggcgtcaattgttcggacatcagttgggatcgcgttaaaggccacttggacgtctttgcctggggtcacttcttgggctgggcctttaaggccatcctcattcgtcacatgggcattctgtgggccatttctgtgatgtgggagattaccgaaataacctttgcgcacctgctgcccaacttcatcgagtgctggtgggatgccctcatcctggatgtgatcatctgcaacggtctcggcatttggatgggtctgaagatctgccagattctggagatgcgcgagtacaagtgggccagtattaaggacatatccaccacaacgggtaaaatcaagcgtgccatgctgcaatttacgcccgagagctggtcggccattcgctggctggatcccaagtccacggcgatgagatttgccgccgtcattcagcttgtgatcttctggcaggtcaccgagctgaacacattcttcttgaagcacatctttgagatgccaccggatcacttcattgtgataggtcgtctcattttcatcggtctgtttgtggcgccttcggttaggcaatattacgtatatgtcaccgacacacgctgcaagagagtcggcacccagtgttgggtttacggcgccatcatggtctccgaagctattctgtgcatcaagaatggcaaggagttgtttgagcgcacgcaagccatcaacattgtcctgtggctgactgtccaagtaataatctcggtggcatttgtctacctcgcggtttactggcagcagcgacagctgaaaaaggtttcatcgacgcccgcaaaaacaaaagaaactattcctgccagctcatcatcgccctcgaaaggtaaattgtcgccgcaaaaagagaagaaactaaaataa

SEQ ID NO: 40764 - protein, 498 aa, DROSOPHILA
MKKRTNSRGTPTSSGDALLDTSFSSAGDAERDHPAYKSGAASAPATPTKRRDGSDGSVSSAGARRKRKDEIAQTFVIVNERPVDDISLDFFYKPHTITLLAVSVLAVMYFAFVRNEANVDENLWAGLLCIVFFFLIVSVIAFPNGPFTRPHPAVWRILFGCSVLYLLTLQFLMFQNYPTIRSIFYWIDPKLKNFHIDMEKEYGVNCSDISWDRVKGHLDVFAWGHFLGWAFKAILIRHMGILWAISVMWEITEITFAHLLPNFIECWWDALILDVIICNGLGIWMGLKICQILEMREYKWASIKDISTTTGKIKRAMLQFTPESWSAIRWLDPKSTAMRFAAVIQLVIFWQVTELNTFFLKHIFEMPPDHFIVIGRLIFIGLFVAPSVRQYYVYVTDTRCKRVGTQCWVYGAIMVSEAILCIKNGKELFERTQAINIVLWLTVQVIISVAFVYLAVYWQQRQLKKVSSTPAKTKETIPASSSSPSKGKLSPQKEKKLK

SEQ ID NO: 40765 - DNA, 3987 bp, DROSOPHILA
cgaggggagtggcggagtgggggggggcaggacatcactgacagcggctcagcaaatcgaaataaaaatttatgtgcacatgtttgaatttattgcccgtctttgggtgcctggcatccaaacccccgccagccaaggattccacggatccggggaccaggagcacggagcattgagcatggagatccgggcacagattgcgaatccttcgtgtggcgctcgcctgcgtgtgtaaatgttattcaatcgaatgtgaaatcatatgagcgctttgctctccactcataaacattttatttacctttaatttcgtgaaaagcttctttttgtggagccaccgtgctttggcaccccgtggtaacccctggccaattctatgcgtgcgatttttatgactaaataaaatgctttttatcggatggcgcgggaggagtcacggcccttgacacaaaatggcaattctttgtttacccaatgaaagtgtttagccataaagaaacagcgacacaattccagttgagttatggcccaaattcccgcccaaactcacacaatatttttataaccaaattgatgggatggcagcgttaatcaaatgttttcggcaattgttttttgaaatgttattggggctgtgggtatttcacagagatttgtgatgtttccttgacccaggatatagtaggtggatttgagcaaaagtaatgaaggcagcttatcaaataaaagccactttgaggaattagattacatgttacaagtacctaaaaaatgtacctaaaagcgtgtggaaaatgttcgtcctgaatatacttcagcattttgtttattaaaaatatgcacagagacattattctgagaattgaacgttgtgggcgacttttcagaagtgtttgacgggcaaattcagacgaaagaaatcgaaaagcaggattgcctaacttaataaacttaatcaaggataaattattccaaacgaaagcacggcagttctcggttttcagttcttcttggacaaggcgacgaagagatcgcgggcgtatcggcggacgaccttgccattgtggttctggggaatctcatcggcgaactggacaccagctcgcagctgcttctggatgtcgggcagtcgcttggccacgtggtcaatcacctgctgtgcggtcagagtggcattatcctcccgcacaaccagggcaccaggcacatctccctgggtctcgtcgtacaccccgatcacgcacacccgcttcacctccggcagctcgtcgatgaccgcctccacctcggcaggccacatctgcagacccttccacttgagcacctcctttttgcggtccgtcatgtagaggtagtcgtcctcgtcgaagtagcccatgtcgcccgtgtggaaccagccctcctcgtcctgcatcgccttggtggcctccggatcggcaaagtatccgttccagctaaatccattgtgcacaatgatctcgccggtctggttcacacccagttggttgccatcgtcgtccacgatcttcacctgaattccgggcaatgggttgcccgcagcggtgagtttcaagtgtccgtggttgaacactatgaatccaacctcagtcatgccgtaggacgagttcagcactccattaggagcaagcttcttgaccctctcaaccgtggcctgagtcatccgtccgcctccgaaattcagcttcgtcaggctgcccaacttctccggagtggctgtggggcaatccagcaaggaacagcagtgctccggcggaatcagtgcatatgtgatgctgtacttgctcactaagtacacaaagtagtccgcggcgaagggcttactgctgatgatcctggtgcaaccgttaaccgtgctgaagatggtggcccacagcccagtaatccagtccaaactggccgaaatgaagatggtatcgtaaccatttacaaagctgtaaaatgagttcgaaaaattatgtaattttaaaattcatttgattatatctacaataaattgaggttcaaatatactttaacttacactgtctcttgggtcagaatatcgttcgagatgcacacagccttgggcattccagtagttccggatgaggtgaggatcgcaacggtttgcgaaggtccttccttcagcggtgtgggcctaacatagatggtttacaatttagataacacctggtccctttggagctttgcaatatggcacactcactgatagaagaactctgtctttgttggagccaacagatcctgaatgctaaggacaccatccttagttccggtggttaggataatctctggcttgaacgcgctggtagccgagtacagtttgtcgtagtgatcggcatcggtgaagataatcttcggcttggaaatgttgtacaggtgcttaagagtagctgaaaatgtagaagaacatataaaatattttattaaaggatgtaccttgataacattattttttttatattatgacaaaaagacaataacgttgtaggggattttacgtacattcctcgagaattggattggccgactggaagggagtgccatggaagaaacaggccacggctgtgggcataatgtaggtggtgttcctggcagagataccaatgatatccttgtggtcgagaccgcgactcttcagttgctgggcaatgcgaatagcccaagtgagagcctgtccgaaggtgacctccacgccctcggagtcggaaatctgatgatacatagggatgacacagaacatcaggaaagtgatcagagcaggtcggactccacttcactcacctgacacacattcttgggccagttcctcatgttcttgaagatgatgcgacccagggaggtctccggcttgaaggggttgttttgcggaatacccttccagatcttgttctccgcatcgtagctgcaaggtaacttggacatttttactgcaataaaggttgaatgcacacccgaaagatcgaccactatctgtggagctattcgctcggaggggctacttataaagacacgaatccccaagagcttatctgcagatgataagcatggcctaggttaagtgcaaggtaggtatcaatgaaagataaaaggcattgaccaaagttgaccacccgactggcatgtatgcatatatttattgaaactaatcagatggcgtgcgttgggttctttaattgaagggtgtccttagtcgtgataagagctattaacttttggccacttgccggtcaatgagaacagccccatccctaattgccagagggttttatcttcgttccgggttgtgttttcccccttatcggcgatacttacgtaatgatacgacagaaaacaaatcattgtcattagatgctatttatttttaaacacaagcccttcagtctctgctttatgtagatataaatattaatggaaatcaatgctaaaaatccccgtagtttttttttttttttggggcaactgaaatttggttaataacctttggactttaatctgggaataccttacgacttttaaatgcgtgataccggagactgaatggaaagtttgatttttttcccacattttaattagtcaccaatggattatcgatatggacacgagctcttaatatgtttaccttcggattacttcgagatatatttagccggccttttgatatgaatacaacatgataccctattcaacgaagccacgataattcgggaaattccgccaaatgaaatacaatccattcagtgaaattgaatgggttttctttcagccagctctcaatggtttttcttacatttttgtcctttattttgacgtttttccgcgctgcggctgacaaaaagttggtgcagcgaaaacgttatttaaataccttggcgaaaaagttcgcttgcaagatatttgcaaacatctgtttcctgattttccagcaatggcagccggcagagaaaatcaactttccgttcccgg

SEQ ID NO: 40766 - DNA, 1646 bp, DROSOPHILA
tcgatctttcgggtgtgcattcaacctttattgcagtaaaaatgtccaagttaccttgcagctacgatgcggagaacaagatctggaagggtattccgcaaaacaaccccttcaagccggagacctccctgggtcgcatcatcttcaagaacatgaggaactggcccaagaatgtgtgtcagatttccgactccgagggcgtggaggtcaccttcggacaggctctcacttgggctattcgcattgcccagcaactgaagagtcgcggtctcgaccacaaggatatcattggtatctctgccaggaacaccacctacattatgcccacagccgtggcctgtttcttccatggcactcccttccagtcggccaatccaattctcgaggaatctactcttaagcacctgtacaacatttccaagccgaagattatcttcaccgatgccgatcactacgacaaactgtactcggctaccagcgcgttcaagccagagattatcctaaccaccggaactaaggatggtgtccttagcattcaggatctgttggctccaacaaagacagagttcttctatcagcccacaccgctgaaggaaggaccttcgcaaaccgttgcgatcctcacctcatccggaactactggaatgcccaaggctgtgtgcatctcgaacgatattctgacccaagagacagtctttgtaaatggttacgataccatcttcatttcggccagtttggactggattactgggctgtgggccaccatcttcagcacggttaacggttgcaccaggatcatcagcagtaagcccttcgccgcggactactttgtgtacttagtgagcaagtacagcatcacatatgcactgattccgccggagcactgctgttccttgctggattgccccacagccactccggagaagttgggcagcctgacgaagctgaatttcggaggcggacggatgactcaggccacggttgagagggtcaagaagcttgctcctaatggagtgctgaactcgtcctacggcatgactgaggttggattcatagtgttcaaccacggacacttgaaactcaccgctgcgggcaacccattgcccggaattcaggtgaagatcgtggacgacgatggcaaccaactgggtgtgaaccagaccggcgagatcattgtgcacaatggatttagctggaacggatactttgccgatccggaggccaccaaggcgatgcaggacgaggagggctggttccacacgggcgacatgggctacttcgacgaggacgactacctctacatgacggaccgcaaaaaggaggtgctcaagtggaagggtctgcagatgtggcctgccgaggtggaggcggtcatcgacgagctgccggaggtgaagcgggtgtgcgtgatcggggtgtacgacgagacccagggagatgtgcctggtgccctggttgtgcgggaggataatgccactctgaccgcacagcaggtgattgaccacgtggccaagcgactgcccgacatccagaagcagctgcgagctggtgtccagttcgccgatgagattccccagaaccacaatggcaaggtcgtccgccgatacgcccgcgatctcttcgtcgccttgtccaagaagaactga

SEQ ID NO: 40767 - protein, 534 aa, DROSOPHILA
MSKLPCSYDAENKIWKGIPQNNPFKPETSLGRIIFKNMRNWPKNVCQISDSEGVEVTFGQALTWAIRIAQQLKSRGLDHKDIIGISARNTTYIMPTAVACFFHGTPFQSANPILEESTLKHLYNISKPKIIFTDADHYDKLYSATSAFKPEIILTTGTKDGVLSIQDLLAPTKTEFFYQPTPLKEGPSQTVAILTSSGTTGMPKAVCISNDILTQETVFVNGYDTIFISASLDWITGLWATIFSTVNGCTRIISSKPFAADYFVYLVSKYSITYALIPPEHCCSLLDCPTATPEKLGSLTKLNFGGGRMTQATVERVKKLAPNGVLNSSYGMTEVGFIVFNHGHLKLTAAGNPLPGIQVKIVDDDGNQLGVNQTGEIIVHNGFSWNGYFADPEATKAMQDEEGWFHTGDMGYFDEDDYLYMTDRKKEVLKWKGLQMWPAEVEAVIDELPEVKRVCVIGVYDETQGDVPGALVVREDNATLTAQQVIDHVAKRLPDIQKQLRAGVQFADEIPQNHNGKVVRRYARDLFVALSKKN

SEQ ID NO: 40768 - DNA, 5899 bp, DROSOPHILA
ttttgataactctttctttattttaaggggaaagagagagcgagagacagggctaatttcaccggcgtttgttgtcgtttagtttcgattgggattcaaatcgttttgactgtgtttgttctttttgcggtaaataattttggcaaacgcaggcacccacactgaaatacgcacactaatacaccgctttgtttgccggcattattattattatgaaacttatttttgtcgtttgcgtttatcagtgcgcattttgcgttcagaagcaattgaagtgcaacatggttgtcgggtgttattaaatcgggattattaacaattaacaaatagcggcacacgcactgcacatagacgcactcgctccaacacacacgcacccgcgacgacgaaaggcgaattgaaagcaaagcgcgcaacgcaggaagaagcagcacagcgcgtgctcgcgagtcggctataaaattttgactgagaagtctctttgaatttcgactgcttaccgtcgattcttttcagcctgcgcttatcgattggtgaccgcggctatcgatgtctatcgccttacaccgtttttaggtatgtacagtgtcactaggctatgagaattccattctgggaaacgtttgttagaaagttgtgaaatttaaaaataaaataacgaaagttttacaagaaatagattggtcctgttaatacatacatacatataaattattatacatatacaattatacataccataaattttttttgtttgcaaacacacgactgtatatttattaattggttggtaagctaaatggtttttgaataatttaatcacaaaaagtaaaacttccatgtcgcgcttataggcgagatgaatgcctatttaatcacatttaaaatattttgtgtacaaaacaaatagtgtggacatctaaatttattcgaaatatgtgacatcgataaaggaaggtccacactatcgaaagccactatctagccgcattgttcatctctaaaccagctgttttggcggcaaccagttttggtctgaagcaaaacaatgtttatttaaataaaacgcaatttaaataacagcccaagtatggcgcatgaaagcgctgtgcacgaggcgctgaaaaagcattttggccactcgaaattcaaatcggatctacaggaaaaagccgtgaagtgcgctgttaaaagtgaatattggccaaattcttacccaatctcgcagataatacctctcgtaattctcttacagaaaagcaggatgtgtatgtgtcgatgcccacgggctcgggtaaatccctgtgcttccaattgcctggtttgatgtcagagaatcaaataaccattgttttttctccgcttttggctttgattaaagatcagatagatcatttaaccaaactgaaagtgccggcggattctttgaactccaagatgagcaccaaagaaagggatcgtgttataatggacttaaaggccgtgagaaccaacctgaagtttctctacataaccccggaacaggccgccaccaagttttttcaagacctgctgcaaaccctccataaacacaataagcttgcctactttgcagtcgacgaggcgcattgtgttagccaatggggacatgactttcgaccggactatctaaagctgggggagctgcgttccaaatattccgacgtcatctggttggctttgactgccacagcttcaagggaagtcaaggaggatatatataagcagttgcgcctccaccaacccgtggctcaatttagcactcctagcttcaggaaaaacctcttctatgacattgtttacaagaattctatcgaagatgactttcagcacctggcagatttcgccagacactgcttgggcaatccgaaggagtttaaggatacacccaagccacaaagaggctgcggaatcgtatattgccggactcgagaccaagtggagcgcatggcgataggggtaactaaacagggaatcggagcagtagcctatcacgctggtctgaaaacaggagaacgtactgaagtccaggaagcgtggatgcggggtgatcagcccattatatgtgcaaccaatagttttggaatgggtgtggacaaaccaagtgtgcgcttcgttatccactgggatgtaccccaaaatgtggctgcttattatcaagaatctggtcgcgctggacgcgatggcttgcagtcatattgtagattatactacggacgggaagacgtccggagtatacgtttccttcttcaaaacgatgcccacagagccaggggtcgtggtgacaaagagctgcttacggagagagctatcaaacaatttgagaagatcacggaattctgcgagcgaacaacctgcaggcataaactcttttcggatttctttggagatccaactccagattgtagtgggcaatgcgatgtctgcaagcgtcccaagaaagcggaaaaagcactggagatttttcatcgattatgtatggatgatgcctttaagtcgcacatttcgctacaggattgcgcagatctgtatgagggtgagttttaaaacttcgttatctttttagctatttctgatcttaaagccatatttttatacccgttactcgtagagtaaaaggctatactagattcgatgaaaagtatgtaacaggtagaaggaagcgtttatgtatggatattctttaccaggattactatccgagtcgatctggacatccgtttgtccgtccatatgaacgtcaaggtctaaggacctagcgggatctctggaatgattttttttatttaattatatgtcaaaaagtatcttatagtcgattaggtcgagtatagcgctctctcttgtttttatatcctactaggcggccgaccaggtataaagcgtgctgcccaggagtacgcaggcggtgaatctggctcagatgacgattctggtcagagtcactcatcaatggccaagagagccaaaaaggaatcacaggatttcattaagcagcagtttaatcttcgaaagcaaattagtgcagctaggcagttggaacaggaaacaattgctcaaatatctcgcgttcgaatggcagaagccactgaaaagaaaatcgcaggtcttcaggccactcatcgggaaaaatatttgacagctttaatcgacgcactcaaagccaatgtagacaagtgcaaagatgaaccagggcagcagccaaaaagtgtattaaaatacaatgactatgaggcaatgtcagtaaatatggaatatgacgtgtttcgccagaataaggtggccaatatgtaccgccatgccttagttaaagaggtaagaataattaactgtcacaagatatacatgatattgttaacttctttttctaatagatatccacaatcaagaaactcacagaacagactaaattattgcctcttttggtggactatattccgaagcctgaaacaagttctaaaggtgcttggacaggtggaagcgtggcgtactttgagcggaaactcaaagaactagaagaacaaaggccacaaagccttaaggaagttccaaaagccctaaaagacagaaaaggttttaaacaggaaaatagcaagcagacttcaatttcctctttttttaaaaaagaaattaaagaagaaccaatagactcgccaattcaggaagaacgtgtaaatattaaaagtgaacagatggatttagaagaaagcacacctaaagatattgcttccaatcatgttaaggaggaatccgtgaccccagaaagttcttcttctgatcgtgagcttgaactccagcccgacagcataattggagaaaggaaatttaaattgatgtcaaatggtgatggaagctatgacactcaccgcaggaaaagagtttcgcatgaaactcaacccaaagagaaggagtcaattaaaacaaagtccagtatgcagcatctttttggttcttttaaaagcgagtcagaggagtctaaccaatctttgaatggttttaaaactgctcgacaaatgctcgaagaaaataattcaaaactcgagggcgtacctgaaaaattacctattaaggatggtgaaaagagagttttagaaaacagggccgattctattggatttacttcagccagagaaatgttagagaggagcaaacaaagggaaggggacgataagtcaagcaacaaactcgaaaaactgggatttatttcagcccgggaaatgctggagaaaaacaaacttaacgaaagatgtttggacaaaaaagacgttaaggaaaagaaattagaaagtagggaaaccaaaagatcgctacaaaacaacgaattacaacataagcaagaggaagaccgtaaagacaaagcatcccacaggaaaacgtcaaaggaatcgttatcgaacttgaagaaggaaggatccgactccagagttttgcaaaaggatacaaaaccagaaaccagaaaccatcaaaaaacagatgtcagcaaaaatgtggtgcagtggctcaatccgtattataaacgaaaaatagccaccaaagagcttttcaaagctttggcaaaattgctcactcagcgcatttgtgatggaagcttaggtaagatattcatacttcctgtctgttaatacctttaaaatggaccataaatctctaggagatggcgatgctggaaagtgctatataaaggaaacttttcatggcctgcagatgataaacaacgatcaggacattgaaaaatatttcataaaatccaagtgactaaaaatctcctaatgattttatcacgacatattgtttcgcctcgttaaaagttgcatcatctttttttttcgttagttactatttttgtatataataagcgcattaattatcaataatacatttaaataagacgtttttatttggacagttttaatagaaaaactattaatttgggatattattcgctcgtacaaaatttatttgcgttgaatcttatttattaattgaattagatataacattcgtgatgctcgatgtattaagcttataaaaaaaacaaaacagggcagccgattaagaactttaaacctcctcggacgtcgattttgtacattttcgattcgatgatggcaatttgttttcttgtgggattacaattagctgggagacgggtatgtgaacggggctcttacttctaagctggagctataaatattacagtccacgctaggcgagaatcgaatgtatatctctttctcgccaaacttcacgggatcgaccatgtcattctagatcaccgtggacacctaaacgcagggtgatgagtatgtccagcaagaagaccagcgaggtaaccaaggcaatcgaggcggaagccatcacgagatccaaacgatgcatattcgggtgccagtagttgcgatccttggtggtggaccaatcccggaaaagcagggcggttacggccacgaagagcacaaaggccactagattccacaaagtagccgtacgccatggagtcctatgtgtacattaaatatatcagtactagcattttaattaaatcaaactttaagcatacaaatcaccgaagagcgccattatcagatagattgccgtgtagatggtcagtgctccaaaggtcacatagcaaagggaagccactcggggagtgatgaacacccgcagatgagaattggtggccggctcgtcgatcagacccaaacagcatataagcaggcactatgggaaacgacgaatagttttcataaattatttgtgtttttaatcattttttttaacaatttaggcattactgggaagccgtctcaaaatgctgaatctttataaaatgtaattggacaccatgaaactagtttcttatctgatttttaaaagttat

SEQ ID NO: 40769 - DNA, 3393 bp, DROSOPHILA
ctaaaccagctgttttggcggcaaccagttttggtctgaagcaaaacaatgtttatttaaataaaacgcaatttaaataacagcccaagtatggcgcatgaaagcgctgtgcacgaggcgctgaaaaagcattttggccactcgaaattcaaatcggatctacaggaaaaagccgtgaagtgcgctgttaaaaaaaagcaggatgtgtatgtgtcgatgcccacgggctcgggtaaatccctgtgcttccaattgcctggtttgatgtcagagaatcaaataaccattgttttttctccgcttttggctttgattaaagatcagatagatcatttaaccaaactgaaagtgccggcggattctttgaactccaagatgagcaccaaagaaagggatcgtgttataatggacttaaaggccgtgagaaccaacctgaagtttctctacataaccccggaacaggccgccaccaagttttttcaagacctgctgcaaaccctccataaacacaataagcttgcctactttgcagtcgacgaggcgcattgtgttagccaatggggacatgactttcgaccggactatctaaagctgggggagctgcgttccaaatattccgacgtcatctggttggctttgactgccacagcttcaagggaagtcaaggaggatatatataagcagttgcgcctccaccaacccgtggctcaatttagcactcctagcttcaggaaaaacctcttctatgacattgtttacaagaattctatcgaagatgactttcagcacctggcagatttcgccagacactgcttgggcaatccgaaggagtttaaggatacacccaagccacaaagaggctgcggaatcgtatattgccggactcgagaccaagtggagcgcatggcgataggggtaactaaacagggaatcggagcagtagcctatcacgctggtctgaaaacaggagaacgtactgaagtccaggaagcgtggatgcggggtgatcagcccattatatgtgcaaccaatagttttggaatgggtgtggacaaaccaagtgtgcgcttcgttatccactgggatgtaccccaaaatgtggctgcttattatcaagaatctggtcgcgctggacgcgatggcttgcagtcatattgtagattatactacggacgggaagacgtccggagtatacgtttccttcttcaaaacgatgcccacagagccaggggtcgtggtgacaaagagctgcttacggagagagctatcaaacaatttgagaagatcacggaattctgcgagcgaacaacctgcaggcataaactcttttcggatttctttggagatccaactccagattgtagtgggcaatgcgatgtctgcaagcgtcccaagaaagcggaaaaagcactggagatttttcatcgattatgtatggatgatgcctttaagtcgcacatttcgctacaggattgcgcagatctgtatgagggcggccgaccaggtataaagcgtgctgcccaggagtacgcaggcggtgaatctggctcagatgacgattctggtcagagtcactcatcaatggccaagagagccaaaaaggaatcacaggatttcattaagcagcagtttaatcttcgaaagcaaattagtgcagctaggcagttggaacaggaaacaattgctcaaatatctcgcgttcgaatggcagaagccactgaaaagaaaatcgcaggtcttcaggccactcatcgggaaaaatatttgacagctttaatcgacgcactcaaagccaatgtagacaagtgcaaagatgaaccagggcagcagccaaaaagtgtattaaaatacaatgactatgaggcaatgtcagtaaatatggaatatgacgtgtttcgccagaataaggtggccaatatgtaccgccatgccttagttaaagagatatccacaatcaagaaactcacagaacagactaaattattgcctcttttggtggactatattccgaagcctgaaacaagttctaaaggtgcttggacaggtggaagcgtggcgtactttgagcggaaactcaaagaactagaagaacaaaggccacaaagccttaaggaagttccaaaagccctaaaagacagaaaaggttttaaacaggaaaatagcaagcagacttcaatttcctctttttttaaaaaagaaattaaagaagaaccaatagactcgccaattcaggaagaacgtgtaaatattaaaagtgaacagatggatttagaagaaagcacacctaaagatattgcttccaatcatgttaaggaggaatccgtgaccccagaaagttcttcttctgatcgtgagcttgaactccagcccgacagcataattggagaaaggaaatttaaattgatgtcaaatggtgatggaagctatgacactcaccgcaggaaaagagtttcgcatgaaactcaacccaaagagaaggagtcaattaaaacaaagtccagtatgcagcatctttttggttcttttaaaagcgagtcagaggagtctaaccaatctttgaatggttttaaaactgctcgacaaatgctcgaagaaaataattcaaaactcgagggcgtacctgaaaaattacctattaaggatggtgaaaagagagttttagaaaacagggccgattctattggatttacttcagccagagaaatgttagagaggagcaaacaaagggaaggggacgataagtcaagcaacaaactcgaaaaactgggatttatttcagcccgggaaatgctggagaaaaacaaacttaacgaaagatgtttggacaaaaaagacgttaaggaaaagaaattagaaagtagggaaaccaaaagatcgctacaaaacaacgaattacaacataagcaagaggaagaccgtaaagacaaagcatcccacaggaaaacgtcaaaggaatcgttatcgaacttgaagaaggaaggatccgactccagagttttgcaaaaggatacaaaaccagaaaccagaaaccatcaaaaaacagatgtcagcaaaaatgtggtgcagtggctcaatccgtattataaacgaaaaatagccaccaaagagcttttcaaagctttggcaaaattgctcactcagcgcatttgtgatggaagcttaggagatggcgatgctggaaagtgctatataaaggaaacttttcatggcctgcagatgataaacaacgatcaggacattgaaaaatatttcataaaatccaagtgactaaaaatctcctaatgattttatcacgacatattgtttcgcctcgttaaaagttgcatcatctttttttttcgttagttactatttttgtatataataagcgcattaattatcaataatacattt

SEQ ID NO: 40770 - protein, 1058 aa, DROSOPHILA
MAHESAVHEALKKHFGHSKFKSDLQEKAVKCAVKKKQDVYVSMPTGSGKSLCFQLPGLMSENQITIVFSPLLALIKDQIDHLTKLKVPADSLNSKMSTKERDRVIMDLKAVRTNLKFLYITPEQAATKFFQDLLQTLHKHNKLAYFAVDEAHCVSQWGHDFRPDYLKLGELRSKYSDVIWLALTATASREVKEDIYKQLRLHQPVAQFSTPSFRKNLFYDIVYKNSIEDDFQHLADFARHCLGNPKEFKDTPKPQRGCGIVYCRTRDQVERMAIGVTKQGIGAVAYHAGLKTGERTEVQEAWMRGDQPIICATNSFGMGVDKPSVRFVIHWDVPQNVAAYYQESGRAGRDGLQSYCRLYYGREDVRSIRFLLQNDAHRARGRGDKELLTERAIKQFEKITEFCERTTCRHKLFSDFFGDPTPDCSGQCDVCKRPKKAEKALEIFHRLCMDDAFKSHISLQDCADLYEGGRPGIKRAAQEYAGGESGSDDDSGQSHSSMAKRAKKESQDFIKQQFNLRKQISAARQLEQETIAQISRVRMAEATEKKIAGLQATHREKYLTALIDALKANVDKCKDEPGQQPKSVLKYNDYEAMSVNMEYDVFRQNKVANMYRHALVKEISTIKKLTEQTKLLPLLVDYIPKPETSSKGAWTGGSVAYFERKLKELEEQRPQSLKEVPKALKDRKGFKQENSKQTSISSFFKKEIKEEPIDSPIQEERVNIKSEQMDLEESTPKDIASNHVKEESVTPESSSSDRELELQPDSIIGERKFKLMSNGDGSYDTHRRKRVSHETQPKEKESIKTKSSMQHLFGSFKSESEESNQSLNGFKTARQMLEENNSKLEGVPEKLPIKDGEKRVLENRADSIGFTSAREMLERSKQREGDDKSSNKLEKLGFISAREMLEKNKLNERCLDKKDVKEKKLESRETKRSLQNNELQHKQEEDRKDKASHRKTSKESLSNLKKEGSDSRVLQKDTKPETRNHQKTDVSKNVVQWLNPYYKRKIATKELFKALAKLLTQRICDGSLGDGDAGKCYIKETFHGLQMINNDQDIEKYFIKSK

SEQ ID NO: 40771 - DNA, 4280 bp, DROSOPHILA
ctgctgatgctgggtcaccggttcgtcagatggagcaaacagctctatgcgggcattttgggtctttttgtggtggtgccaatggtgctcacatatgccatgaactactatcccatttttgtacccacgccacagtaagtgatcggacttaaaaactttactacttgattacaatcattctacccatctaccaaacagaacccagaaggattcctttatcggagatcgtcaattcaccgaattctacacgtcgtcctttatgaacttcggtagctatttctgtggagtcctggccgctttggtttacgatcagttggcattgaagcaatacaaactacgggagttaaagagcttccagcttctttggtttacacttattccagtggggattctatggctgtttagtgctcatcccatcttccagcactactacgtgacgccgtcggccatttggggagcattatatgccggcctgcagcgaaacatctggggcttcgggctgggaatcttcatcgtgggcatggccagcaaagtgggatgtaagtatcaactgcgagatatgcttggtatatccttggcaaatcttactgttctttcacagggattttccgtaagttctgctgcttgcccattttccgcattttgggacgcctcacttatggagcctttatcgtccaccttcttgtggcgagaatcgtcttggccacagtgcgggagcccatttattttggcacgggcatgatggtgagctcacttctggcattcaataggaattggattttatgtaactcaaattgttctcatcttatctacagtttgctttcatcttttttacggtgaccgtgtcctatctctgctccttcttgctggccatctttctggagcttcccgtctcctccttcctcaagcttatgaggtagcccaatgtcctaacttaaagattacttataactagaataaaagacataacttaattaaatccgtcaccaaaaaatttcacttaccctgcgccaatctggctggaaacgtcttcatcgagattgcagcttcctttgagctcaaggaagtaacgcagaacagcattgctggcgtcctcgtttaggaccggatttaattcctggcgagcataggacaagaacttcttaatcagtatgggtgggagcaggtccaagtccccctcctccggaagtacctccagacgtttgtcaagatcataatcctgctgcataatgctgtcattatcgtcctccgttttgattgtgtcatcatcttttcccgctgccggcacattaaggctgacctcgcacatggagtcgctcattttgggcttaagagcatagcgggctgcaattctcgctcgtttcctagcgcccgcatggagagcccttacgtgggcagtcagcgacatatctctctccgagggcttgtccaataatatgtaaaccaaatggaactcccgcagcaaagagggtgaaatattaatattctgtagaaggtagcgcccctcatcgtattgtcctctttgtggatttgcgcacgctatcaccgaaggttgcgccgggaatgaggcaaatgctcctgcaagtggaagatttacttcctctgattgtaggcactgcaacagtacggcctgcttggaggcaagtttatccacatcatcgagggtgcagtgaccgcctccactggccatcatcaaggaacccgcttgtagcacacgcttgttacgcccagcaaacgtaacacccagttgctgtgcggattgagccccacgttttccactcacgtgggcaccacgttcagcgatctgagcacaactttgcagaatcttggtctttccaattccgggatcacccaccaggagcacgttgatggcttcagtctccgcacctttcccgccgagaagggatagtaaacaggcggctttgggtagctcatgtccgtatacctccggggcaatggattgcaccagtagcttaaagctgttgggttccgcattgatcatgacaatcgcttccaagtcacgttcgctgaactcccgcttgatgctgctcgcatcgcgaatgctgactgccttgagatagggctgcatctggttggaggtgtctccagtggtggtatcgtcgcccaattcctgcagcttaaggatgccagttaccacgacctcctgtccgacacgcacagcatcaactagatcatgtcgcagctccacgtccatttcagcaggcatgctggtctcaaagtcgtggaccaagttcaaactggactcctccacgcggataatctgtcggattgaaagcctggtgtatggggaactgcgaagaggcacgaattcgtcacgagccacacactccgaccgcttgcattgataaggacgtggctggaaggttccccgttggcgcatggcaatctccatctggcagcgactgcagcgaaaggcttgccacgtgaggctgtagctaggctcgcccacattgctcacaaaaccccggatggaaaacaaagtgtccactcgggaatggcttattccttctattgattccacaggcacaaaatcatccggtcgtgcgtagatcttgcgtacccgtggggttggaaggacgtactgttccggagtggacaccatagctgtggtggaatcattacagtccagctggtgattgacgaccacagtgtgcatagccaacgacagggttcctagcgtgcgaagcgggtgctcacggatgtcttcggacaaactaggccaaacctcctttagctgggcatctgatttgatgcctgctgcgcagagggggaagaatccccgatcccgtatcatcacaaaatcgaaggtgtgaggattacgttggtagtatgcctccacggccattatccttgtggccagttcgttgccctcctcgtatttctcgcgcaagaagtacagtcgccagccggaataagcccgtggattatccaccgcaatgctctgcacctggagcccgtcttctggtgcggcatagttttccggccgcagaaagctgcagtccaagtgagcattgcgtcctcgcttgccggctgtgcggctccagcccctgggttgccgagttgcaggcggaacagaaggagcgtctggtgctccaggttccccttggttgggttgtcgattgcctccggctgggatcacacgtccattgcgccgaaagtagaagtacggacggtaggctccgcctccgcgaccacgaccacgcacaaatcgcgatggggcgcccccccgggaaagcgttggattcatttcagctggggaaagtttacaaatttgcccgcttttaaatagagatgatacctatattacaaatgacatgaaatatcgataacgatctttggctaagatattgaacccttaacgattttatatttaaacttataaatcgatgtaataaaattattttggaattatttcggcggacacttgtgatatcttcgattcttgcttcagtatgctcagctgggcgggaaggtagtgttcaaatacacccgatagcttcgacttgacctcacgaaatgtttccaacacttttatctcctcgttctcatcagtgggctgcacggcctttagttcatgtagtaattcggtgcagccgtcgaggagcatcacctgcttcaggtgaagcttaagcagctcctgctgaattgtcttgatgcactggatttgttggtccatgcgcagtggaatcgtggaaagagccaacatttgctccatatgctttttatccttcacgaacattttagcagcactttccatggcttcagcaggttttgcttcaatctccttgggatctttgtgctttttatcctccacgatcgttttatgaataatttccatgttttcagcaggttttgcttcaatctccttgggatctttaatgcacggagcttccgtctcggttttagctggaatctgtaagggaaattagggcttactaactaactagccttagaaattgacagctatcgcctttttttttggttatctacagctttgtatttatttatttttttttttaccattttgttctctgctgaaaagttttagagaccgtatgcaaccaatgataaaactgaatagcagatcgaatactaagtcaaagcctccttttaataagaaactcatagttttttacagaacattcagagcgatctagggttctggtttctggtcaccttttttcgggaaaagtgaactcagattgacgggacagttgtccaggcgggccagttgcttaaccatgtcatccaggagcagg

SEQ ID NO: 40772 - DNA, 2280 bp, DROSOPHILA
tccccagctgaaatgaatccaacgctttcccgggggggcgccccatcgcgatttgtgcgtggtcgtggtcgcggaggcggagcctaccgtccgtacttctactttcggcgcaatggacgtgtgatcccagccggaggcaatcgacaacccaaccaaggggaacctggagcaccagacgctccttctgttccgcctgcaactcggcaacccaggggctggagccgcacagccggcaagcgaggacgcaatgctcacttggactgcagctttctgcggccggaaaactatgccgcaccagaagacgggctccaggtgcagagcattgcggtggataatccacgggcttattccggctggcgactgtacttcttgcgcgagaaatacgaggagggcaacgaactggccacaaggataatggccgtggaggcatactaccaacgtaatcctcacaccttcgattttgtgatgatacgggatcggggattcttccccctctgcgcagcaggcatcaaatcagatgcccagctaaaggaggtttggcctagtttgtccgaagacatccgtgagcacccgcttcgcacgctaggaaccctgtcgttggctatgcacactgtggtcgtcaatcaccagctggactgtaatgattccaccacagctatggtgtccactccggaacagtacgtccttccaaccccacgggtacgcaagatctacgcacgaccggatgattttgtgcctgtggaatcaatagaaggaataagccattcccgagtggacactttgttttccatccggggttttgtgagcaatgtgggcgagcctagctacagcctcacgtggcaagcctttcgctgcagtcgctgccagatggagattgccatgcgccaacggggaaccttccagccacgtccttatcaatgcaagcggtcggagtgtgtggctcgtgacgaattcgtgcctcttcgcagttccccatacaccaggctttcaatccgacagattatccgcgtggaggagtccagtttgaacttggtccacgactttgagaccagcatgcctgctgaaatggacgtggagctgcgacatgatctagttgatgctgtgcgtgtcggacaggaggtcgtggtaactggcatccttaagctgcaggaattgggcgacgataccaccactggagacacctccaaccagatgcagccctatctcaaggcagtcagcattcgcgatgcgagcagcatcaagcgggagttcagcgaacgtgacttggaagcgattgtcatgatcaatgcggaacccaacagctttaagctactggtgcaatccattgccccggaggtatacggacatgagctacccaaagccgcctgtttactatcccttctcggcgggaaaggtgcggagactgaagccatcaacgtgctcctggtgggtgatcccggaattggaaagaccaagattctgcaaagttgtgctcagatcgctgaacgtggtgcccacgtgagtggaaaacgtggggctcaatccgcacagcaactgggtgttacgtttgctgggcgtaacaagcgtgtgctacaagcgggttccttgatgatggccagtggaggcggtcactgcaccctcgatgatgtggataaacttgcctccaagcaggccgtactgttgcagtgcctacaatcagaggaagtaaatcttccacttgcaggagcatttgcctcattcccggcgcaaccttcggtgatagcgtgcgcaaatccacaaagaggacaatacgatgaggggcgctaccttctacagaatattaatatttcaccctctttgctgcgggagttccatttggtttacatattattggacaagccctcggagagagatatgtcgctgactgcccacgtaagggctctccatgcgggcgctaggaaacgagcgagaattgcagcccgctatgctcttaagcccaaaatgagcgactccatgtgcgaggtcagccttaatgtgccggcagcgggaaaagatgatgacacaatcaaaacggaggacgataatgacagcattatgcagcaggattatgatcttgacaaacgtctggaggtacttccggaggagggggacttggacctgctcccacccatactgattaagaagttcttgtcctatgctcgccaggaattaaatccggtcctaaacgaggacgccagcaatgctgttctgcgttacttccttgagctcaaaggaagctgcaatctcgatgaagacgtttccagccagattggcgcagggtaa

SEQ ID NO: 40773 - protein, 755 aa, DROSOPHILA
MNPTLSRGGAPSRFVRGRGRGGGAYRPYFYFRRNGRVIPAGGNRQPNQGEPGAPDAPSVPPATRQPRGWSRTAGKRGRNAHLDCSFLRPENYAAPEDGLQVQSIAVDNPRAYSGWRLYFLREKYEEGNELATRIMAVEAYYQRNPHTFDFVMIRDRGFFPLCAAGIKSDAQLKEVWPSLSEDIREHPLRTLGTLSLAMHTVVVNHQLDCNDSTTAMVSTPEQYVLPTPRVRKIYARPDDFVPVESIEGISHSRVDTLFSIRGFVSNVGEPSYSLTWQAFRCSRCQMEIAMRQRGTFQPRPYQCKRSECVARDEFVPLRSSPYTRLSIRQIIRVEESSLNLVHDFETSMPAEMDVELRHDLVDAVRVGQEVVVTGILKLQELGDDTTTGDTSNQMQPYLKAVSIRDASSIKREFSERDLEAIVMINAEPNSFKLLVQSIAPEVYGHELPKAACLLSLLGGKGAETEAINVLLVGDPGIGKTKILQSCAQIAERGAHVSGKRGAQSAQQLGVTFAGRNKRVLQAGSLMMASGGGHCTLDDVDKLASKQAVLLQCLQSEEVNLPLAGAFASFPAQPSVIACANPQRGQYDEGRYLLQNINISPSLLREFHLVYILLDKPSERDMSLTAHVRALHAGARKRARIAARYALKPKMSDSMCEVSLNVPAAGKDDDTIKTEDDNDSIMQQDYDLDKRLEVLPEEGDLDLLPPILIKKFLSYARQELNPVLNEDASNAVLRYFLELKGSCNLDEDVSSQIGAG

SEQ ID NO: 40774 - DNA, 5818 bp, DROSOPHILA
cggcggcggtggaggaggaggtggcggtggtggaggcgggggcaatgtaagcaatatttgtgttatgcaacttgcgttctaattgtgagtctaactacttgtaatcctcatcttagtgccagctcattcagctcatggtcccaccaaacttccaagtagcaatttaacaatatttaactttatccctactttccaacaattttaaaataattcgttgaccaactttctaaacataaatttataaaagcattgccaaattaaaaaaaaaaactttagtgcactagaactattaactttgagattaagccttgcatacagttttttaggaaggtgtttcgtgctacctgtattaatacgttattgtagaccacaaataatggttagattacattttatcatgcggataatagctgctgctgtatgtaattagagaactcctggtgctttggaacaagggtccccccattgcaatcctggcacaactaacctttttctcatttactgacttcgctgggcaaccttaaacaaccgtggctcgttatttgctcggtcccagctcaaagcgaaatctttccgtgtttctttgcccacagaaaaagggcggcggtggtggcggaggcggcggcggaggtggctccggaaataaaaacaaaggcggcgatggaggcggcggtgacaaaggtggagccaagaaaggacaagaccaaaaggcagccgcaggcggtggcaagaagggaggcaagaaatagcaaccgtggcaacatcaaagcgcattaaaaattacaaatttagagttaagttgaaattaaaagtgatatcagggtgtatatacgagtatctctataatgtatgtgactttcttacaatttactgggcgctgcccgcctcttctactacaagtacgttcggatatatttatgtaggttaagcttaacaatagaagagcatcccatccgcattccgctcgaatgcacttcacaggccacttgatttgaatcctctagcgaaaccactcctgggacatcccaaagaaggaagctgcgctcgatttggatttgctgctgtctcccttgcgggctccattgccacccgacttcctcgtcggcgtcgttgtcgccgtctgagatagagggataaaatgggagatgttattaattaattagtactattaattggtagtttgtctgattaatctgttaatttgccgctggactctcagatttatagcgagcagcgaacagcaacaaatggaaagcaaacataattagagaacgatttataccggcggagatcgcagctaattacaaaacatgcgagtaacggccaagtagccactgccataaattaacatttgcccagcgatttgatttcaataattgcagcgattcattaattaccatctaaggcactcgtatacgcgcccgtaatatatacataatcattctgccgatgttctggccatccacttggaaatttcgggttgggtttcaagcgaaacttttgccaaccacttgcggacgaagtagggaggagtggttgggaaatggcggcagaaagttgcacctaattaaaatttgtcttgcggcattctggtttatttattgctggatggaccaaattagtttaattaaactgctgcttcagcttgaagaggttttcaaatttggaaatgaagcacttaataagagcaatgcggctattttgctcactcttaataagtattggctaaacaatcaatatcatgcagcatgcaaacgaggaatgataacaaagtatcaacaatcaaataacattcctacccaaccagagcaaatgttgaaactattgacttaggaatgcagtcgatagaaatcctaggaaagaaacatgggaacgtagcattataacttgataaagttggtaaaagataaactttatatctattagggctgtcggtttaatgcttcagctaatcaatttagaattttaaatacaccaccaaatagtaaagcttatactcttgaagccaacaccgacagccctctatatcatcacactttatactcactttctcaactggctcttggatcggagatttccgctctgcgctagtaactcttccggcagcttggggcatcacaatgggcagcagcgggaaccacagcgacgtggatccggaagaactgagacacagcacattgggatctgcttcatgggccaaagaactggcagcagctgcaccctgactgggagcagctgccgagggagtaagcactcccagttcaccctgcagacggcttgcagctcgggacacatgagcggttatatgctcggcaaacagctcgaagtcaaagggatctatgtagtcgcgcagttggttctgctgggcgtggatttggtcgtagagagtcctctcctcacgtgaaatggcgaacacgcgctccaggaacttaagatcaaagtatagttgcagggcaatattctgactggctttggtgcattccgcgtgggccaatccctcgtagtggcagagcagtttccctatgagccgctgaatgaatgcttgcaataccttgggtggcagagtttggggaacaaccgaattcaatgcctgaattagctgatgaagatacgtctgcagagagagtcgcggctgactggggattcgaatggttgactgaacactctgctcctggtcctcgtcgcgctgttccagtgtcaaggtctgccaaagctactcaagaatataattatgttacgttacaaataaatttcttctttccatataattaccgcaaagtcgctgagaaccacttcatgattaatgacctttggcagtttctcttcgcaattgtggccggccaacacatcgtcaacgatgaccagccaaaaggatagcatctccttttcgatcaggccacaaatgcgctgccaatgctcaattcccaatcccgccgagttgtcagtccactgccgccaactggacggctggcagaagcacaactttaaattggggcacagctcgaccaaggcgagactattcctcaaagccaggagcagagcagggcgttcccttagctctaaacctttcaaattggataaatactctgtcagctgttcctcggccgtttcgcgcagaaactcgataagtgaaaccttgtcctcagccctcgtcgtttgttcttgtaacatcacattcagctcctgtacgatatccgccagatgtgagtcaaaacgtttacacagttctattgttgcgccgtcatagcccttcgtccgatttgccagtcgctttggttgatcgctgagtgctgccgccaagcttaaaggcaaatcatcgctctgctcccgccaaatttgtagaggcggttgcgactgaccggcttcaataagcaatagtacctgttcgtaggtcagcttcatggcggaagcccagctgctgcgaattatctctcgtactctggcgttgatcaacggcacgtactttctggcgtagaagtctaactggctacgcttaagatgcaattgctgttctaggcgaacgaaatccggtcgaccattagttctggccgcggacttaatgtcctggatggtctgcatgttggtgactagtgcaaagacttgctgcaagtgagccgctgccaaggcgttcattttatctagccattgttgaagtgaagaacccaactgctcaggtgttagctgaggtacatcaaattgtggcttaaaaccagcgatgatttcgggtaaaagatgaaccagctggcgctcgctactctccattcggttgatgctgggtggacacgtagaagaggcacactcctccaagcggctaaaaagaaggctataacctgtacgagagaaaagaccgattgttccaataataatgttgtgtgcctatctgcgaatggaaacatacccaaaagacacttgtccagaagctccacggtgctgttgagcacgtttaagctagccaaaatgcgatccttgacgcgacgtggctccgatggaccgctttgcaggcagttcagaaaggctgaggagcgcaggttcaagaaggatttcagcacagtactcaaatcgcttttgtctagcaagagaaggctctgcaggcagtccacagtcatttcttgtaggagttcctccctctccagtgcggtcagtatggcttgtttgatggtcacgtgaaagggacgcaggatttcccattgcttgcgcgctaccggtagtttctgcatcagggcactctggccgtccagttgcaagcccgtgctgatgtggcgactgaagatgaacaactcagtagcggcatagaagcgatcgttgtccaagtgcgtccagattagttccggcagggcagtaagcaacttaatctgagccatggtgccgtagtaggtctgcagcttttttccggcgttcctctccttcagtgcggcatctttagcacttgcattggcagttgactggaagcccaggagctgctgctcgtttagactgcggcaattggcctgcacgtgtcgcacttgctccataagtgtcccggccgacgtttgcatcgcagcaatggtgtcagccgcctgcaaaagatctcggtaccgctcccttaaagatttagaatgtttaagcagcaaatcttctgaaggtgccacatcactcacccgacatgagtgcgcaactcctcgcgcttgttctccaccaccgactggatctttttgtgcacctcgtctatctcggacacgctgtgctgctcaaacagcgtgtccacgttcaggtttaacaaattggccgtcatttagccgtcaaattagttttatttaaattaagaaaacaataacaagggagcagctgtaataaaatcgaattatgtatcgatgactggcaacatcgatattttctctcatgactgtctatgactgttaaatttatgttagtttacatttctctgttggtaaaaatgttagatatgctgtcatgtgcaagccgttacatttcaatataacataaagagttatagttaggggaattacctcatttaatcgaaaaaagatatttttctaaatccaggtttcatttgtttaaatatactttattaaatgcatttgtctggcatagataaactaatttacatacacaacaagtgtaaaagcaagaattctgattggtttggcagcagtaataaagaaaaaccaacaatggctttcactcctttcccaattcccgcagcactgcgttggcgatcacaattctttggatctccgaggttccctcgtaaatctctgtgacgcgggcgttgcggtagtaaagctccgcaggcagatcggtggtgtaccccatcccacccaggatctggatgcactggtgggcacaaaaggtggcggactcggaggcatgcagcttggccatggccgcctcctttgtgattggcagcccattatccttcagccaagcggcacgccacgttagcagccttgagatctccacccgcgtggccatgtcggccagcttctgctggatgagctgcaaccgtgccagatgctttccgaaggccaccctcttctgcgaataatccacggctagttccagggcagcttgtgcgataccggtggcctgggcggctataccgatcctgccacagtccaaggactgcatggcgatcttgaagccatcaccggcagctccaaggacccgggatcgcggcacgtgaacgtcctccagcaccagctggcaagtcgaagtcgcgcgcatgcccattttgctttccttcttggctatggagagtcctggaacatccttgggcgtaagaaaggcagtgattcccttgtgtttcatgctcttgtcc

SEQ ID NO: 40775 - DNA, 2708 bp, DROSOPHILA
ccttgttattgttttcttaatttaaataaaactaatttgacggctaaatgacggccaatttgttaaacctgaacgtggacacgctgtttgagcagcacagcgtgtccgagatagacgaggtgcacaaaaagatccagtcggtggtggagaacaagcgcgaggagttgcgcactcatgtcggggagcggtaccgagatcttttgcaggcggctgacaccattgctgcgatgcaaacgtcggccgggacacttatggagcaagtgcgacacgtgcaggccaattgccgcagtctaaacgagcagcagctcctgggcttccagtcaactgccaatgcaagtgctaaagatgccgcactgaaggagaggaacgccggaaaaaagctgcagacctactacggcaccatggctcagattaagttgcttactgccctgccggaactaatctggacgcacttggacaacgatcgcttctatgccgctactgagttgttcatcttcagtcgccacatcagcacgggcttgcaactggacggccagagtgccctgatgcagaaactaccggtagcgcgcaagcaatgggaaatcctgcgtccctttcacgtgaccatcaaacaagccatactgaccgcactggagagggaggaactcctacaagaaatgactgtggactgcctgcagagccttctcttgctagacaaaagcgatttgagtactgtgctgaaatccttcttgaacctgcgctcctcagcctttctgaactgcctgcaaagcggtccatcggagccacgtcgcgtcaaggatcgcattttggctagcttaaacgtgctcaacagcaccgtggagcttctggacaagtgtcttttgggttatagccttctttttagccgcttggaggagtgtgcctcttctacgtgtccacccagcatcaaccgaatggagagtagcgagcgccagctggttcatcttttacccgaaatcatcgctggttttaagccacaatttgatgtacctcagctaacacctgagcagttgggttcttcacttcaacaatggctagataaaatgaacgccttggcagcggctcacttgcagcaagtctttgcactagtcaccaacatgcagaccatccaggacattaagtccgcggccagaactaatggtcgaccggatttcgttcgcctagaacagcaattgcatcttaagcgtagccagttagacttctacgccagaaagtacgtgccgttgatcaacgccagagtacgagagataattcgcagcagctgggcttccgccatgaagctgacctacgaacaggtactattgcttattgaagccggtcagtcgcaaccgcctctacaaatttggcgggagcagagcgatgatttgcctttaagcttggcggcagcactcagcgatcaaccaaagcgactggcaaatcggacgaagggctatgacggcgcaacaatagaactgtgtaaacgttttgactcacatctggcggatatcgtacaggagctgaatgtgatgttacaagaacaaacgacgagggctgaggacaaggtttcacttatcgagtttctgcgcgaaacggccgaggaacagctgacagagtatttatccaatttgaaaggtttagagctaagggaacgccctgctctgctcctggctttgaggaatagtctcgccttggtcgagctgtgccccaatttaaagttgtgcttctgccagccgtccagttggcggcagtggactgacaactcggcgggattgggaattgagcattggcagcgcatttgtggcctgatcgaaaaggagatgctatccttttggctggtcatcgttgacgatgtgttggccggccacaattgcgaagagaaactgccaaaggtcattaatcatgaagtggttctcagcgactttgcgctttggcagaccttgacactggaacagcgcgacgaggaccaggagcagagtgttcagtcaaccattcgaatccccagtcagccgcgactctctctgcagacgtatcttcatcagctaattcaggcattgaattcggttgttccccaaactctgccacccaaggtattgcaagcattcattcagcggctcatagggaaactgctctgccactacgagggattggcccacgcggaatgcaccaaagccagtcagaatattgccctgcaactatactttgatcttaagttcctggagcgcgtgttcgccatttcacgtgaggagaggactctctacgaccaaatccacgcccagcagaaccaactgcgcgactacatagatccctttgacttcgagctgtttgccgagcatataaccgctcatgtgtcccgagctgcaagccgtctgcagggtgaactgggagtgcttactccctcggcagctgctcccagtcagggtgcagctgctgccagttctttggcccatgaagcagatcccaatgtgctgtgtctcagttcttccggatccacgtcgctgtggttcccgctgctgcccattgtgatgccccaagctgccggaagagttactagcgcagagcggaaatctccgatccaagagccagttgagaaaacggcgacaacgacgccgacgaggaagtcgggtggcaatggagcccgcaagggagacagcagcaaatccaaatcgagcgcagcttccttctttgggatgtcccaggagtggtttcgctag

SEQ ID NO: 40776 - protein, 886 aa, DROSOPHILA
MTANLLNLNVDTLFEQHSVSEIDEVHKKIQSVVENKREELRTHVGERYRDLLQAADTIAAMQTSAGTLMEQVRHVQANCRSLNEQQLLGFQSTANASAKDAALKERNAGKKLQTYYGTMAQIKLLTALPELIWTHLDNDRFYAATELFIFSRHISTGLQLDGQSALMQKLPVARKQWEILRPFHVTIKQAILTALEREELLQEMTVDCLQSLLLLDKSDLSTVLKSFLNLRSSAFLNCLQSGPSEPRRVKDRILASLNVLNSTVELLDKCLLGYSLLFSRLEECASSTCPPSINRMESSERQLVHLLPEIIAGFKPQFDVPQLTPEQLGSSLQQWLDKMNALAAAHLQQVFALVTNMQTIQDIKSAARTNGRPDFVRLEQQLHLKRSQLDFYARKYVPLINARVREIIRSSWASAMKLTYEQVLLLIEAGQSQPPLQIWREQSDDLPLSLAAALSDQPKRLANRTKGYDGATIELCKRFDSHLADIVQELNVMLQEQTTRAEDKVSLIEFLRETAEEQLTEYLSNLKGLELRERPALLLALRNSLALVELCPNLKLCFCQPSSWRQWTDNSAGLGIEHWQRICGLIEKEMLSFWLVIVDDVLAGHNCEEKLPKVINHEVVLSDFALWQTLTLEQRDEDQEQSVQSTIRIPSQPRLSLQTYLHQLIQALNSVVPQTLPPKVLQAFIQRLIGKLLCHYEGLAHAECTKASQNIALQLYFDLKFLERVFAISREERTLYDQIHAQQNQLRDYIDPFDFELFAEHITAHVSRAASRLQGELGVLTPSAAAPSQGAAAASSLAHEADPNVLCLSSSGSTSLWFPLLPIVMPQAAGRVTSAERKSPIQEPVEKTATTTPTRKSGGNGARKGDSSKSKSSAASFFGMSQEWFR

SEQ ID NO: 40777 - DNA, 3570 bp, DROSOPHILA
acagtactcaaatcgcttttgtctagcaagagaaggctctgcaggcagtccacagtcatttcttgtaggagttcctccctctccagtgcggtcagtatggcttgtttgatggtcacgtgaaagggacgcaggatttcccattgcttgcgcgctaccggtagtttctgcatcagggcactctggccgtccagttgcaagcccgtgctgatgtggcgactgaagatgaacaactcagtagcggcatagaagcgatcgttgtccaagtgcgtccagattagttccggcagggcagtaagcaacttaatctgagccatggtgccgtagtaggtctgcagcttttttccggcgttcctctccttcagtgcggcatctttagcacttgcattggcagttgactggaagcccaggagctgctgctcgtttagactgcggcaattggcctgcacgtgtcgcacttgctccataagtgtcccggccgacgtttgcatcgcagcaatggtgtcagccgcctgcaaaagatctcggtaccgctcccttaaagatttagaatgtttaagcagcaaatcttctgaaggtgccacatcactcacccgacatgagtgcgcaactcctcgcgcttgttctccaccaccgactggatctttttgtgcacctcgtctatctcggacacgctgtgctgctcaaacagcgtgtccacgttcaggtttaacaaattggccgtcatttagccgtcaaattagttttatttaaattaagaaaacaataacaagggagcagctgtaataaaatcgaattatgtatcgatgactggcaacatcgatattttctctcatgactgtctatgactgttaaatttatgttagtttacatttctctgttggtaaaaatgttagatatgctgtcatgtgcaagccgttacatttcaatataacataaagagttatagttaggggaattacctcatttaatcgaaaaaagatatttttctaaatccaggtttcatttgtttaaatatactttattaaatgcatttgtctggcatagataaactaatttacatacacaacaagtgtaaaagcaagaattctgattggtttggcagcagtaataaagaaaaaccaacaatggctttcactcctttcccaattcccgcagcactgcgttggcgatcacaattctttggatctccgaggttccctcgtaaatctctgtgacgcgggcgttgcggtagtaaagctccgcaggcagatcggtggtgtaccccatcccacccaggatctggatgcactggtgggcacaaaaggtggcggactcggaggcatgcagcttggccatggccgcctcctttgtgattggcagcccattatccttcagccaagcggcacgccacgttagcagccttgagatctccacccgcgtggccatgtcggccagcttctgctggatgagctgcaaccgtgccagatgctttccgaaggccaccctcttctgcgaataatccacggctagttccagggcagcttgtgcgataccggtggcctgggcggctataccgatcctgccacagtccaaggactgcatggcgatcttgaagccatcaccggcagctccaaggacccgggatcgcggcacgtgaacgtcctccagcaccagctggcaagtcgaagtcgcgcgcatgcccattttgctttccttcttggctatggagagtcctggaacatccttgggcgtaagaaaggcagtgattcccttgtgtttcatgctcttgtccaccgtggcaaagacgatacccccgctggcctccttggagtttgatatccacgctttagtgccgtttatttggtagctgtccccttgcagcttggccgtggtgctggcagctcctgcatccgatccgtttccaggttccgatagtgcatagaaggcgatgtgctcaccctgggtgtacggcaccaggaaatcctgcttctgctgctcggttccatgctgctgcactgcacccaggtacaggttattcacgcccatcacaatggacacggcggcgtcaccacgagccacctcctccatgccaatcgcgtaggcctggtaatccaatccggaaccacctgaaaaatcaatatttaatgaatggaatctagtagtatgatctatttatataccatttcaaaaatgaaaacatcacatattttatgttatgtaaatattgtaaatattataattgaaataggaactcaccatactcctctcgaaccgtcactgacatgagaccgagttctcccaaccgtcggacctgttccgccggataaagctcctcccggtcgtggtgtcgcgctttgggggccagttccgcattggcgaactcccggcaagtcttctggagaatctggtgggtctcggagagggcggccaggcatgcgattccccggtttccaccagcgattatcctcgcactccatgcgccgctcgagcgttgacctgcaaagacggaggcggcaaatcgatcatccagtcagccgggaatcacccagttcctcacccaacgtccgcgccactctgatcagctgctgcattccgtcgccaactgatcccaagcccgtggtgccggttgcgatcgaggtagtgaaagctttttcgcactcgtcgacgagccgatcgaaatacaaccgaggaaaacagcttttatacgcagctttttgaggcgaagttcatgggaggagattgaaagggggtcccgtttattaaaaactactaatcgattttgtaaaatggttcttttaaattgattttaattgagtataagaattactaaaatcattttagttgtttcaaatttgtaatttataatcggtttttaacaaattttaaagtttcatttaaaaatggtattgataagcgccgaagtcaccactgcgccactgtgttcgtataaagtgtttcaactatatagtactacctaaaatgatcgaaagtattttgttttggcgctaactttgtgaaattaccaagtttctgggttaaagatcatttgaaagaacagaaagggaaagcggttcaatggatttcgataaagaagaatccaccaagaaccctgttgatttcctataccggctgaatacgaaattaggcaatgctaatttccgatacacacccactttcattgaaaggtacaaggtgcattttacccacatgaaacacaagtacacattacaatttttcaacttacatattacaaagttagtggactttgggaattttcaggaacacgtgtgagacagttttttgaaacatttaagctcatggatcaaattgagaatatataacccattattgtttttcaccatttaaacatttaaaccagctttttgctagcgccatctaggttaagtaaacagaactgagcaccttacatcagcaaggtatttcgcagtcagtccgtgtaaaaatcattgtagagcgctgtaaattattattttcatttgctcttaacgtagtagaccggttaaaagggatttcaaaactgaaccatttccgaattattatcttcttctcagctaaactgttcaaaattat

SEQ ID NO: 40778 - DNA, 1379 bp, DROSOPHILA
atgcagcagctgatcagagtggcgcggacgttgggtcaacgctcgagcggcgcatggagtgcgaggataatcgctggtggaaaccggggaatcgcatgcctggccgccctctccgagacccaccagattctccagaagacttgccgggagttcgccaatgcggaactggcccccaaagcgcgacaccacgaccgggaggagctttatccggcggaacaggtccgacggttgggagaactcggtctcatgtcagtgacggttcgagaggagtatggtggttccggattggattaccaggcctacgcgattggcatggaggaggtggctcgtggtgacgccgccgtgtccattgtgatgggcgtgaataacctgtacctgggtgcagtgcagcagcatggaaccgagcagcagaagcaggatttcctggtgccgtacacccagggtgagcacatcgccttctatgcactatcggaacctggaaacggatcggatgcaggagctgccagcaccacggccaagctgcaaggggacagctaccaaataaacggcactaaagcgtggatatcaaactccaaggaggccagcgggggtatcgtctttgccacggtggacaagagcatgaaacacaagggaatcactgcctttcttacgcccaaggatgttccaggactctccatagccaagaaggaaagcaaaatgggcatgcgcgcgacttcgacttgccagctggtgctggaggacgttcacgtgccgcgatcccgggtccttggagctgccggtgatggcttcaagatcgccatgcagtccttggactgtggcaggatcggtatagccgcccaggccaccggtatcgcacaagctgccctggaactagccgtggattattcgcagaagagggtggccttcggaaagcatctggcacggttgcagctcatccagcagaagctggccgacatggccacgcgggtggagatctcaaggctgctaacgtggcgtgccgcttggctgaaggataatgggctgccaatcacaaaggaggcggccatggccaagctgcatgcctccgagtccgccaccttttgtgcccaccagtgcatccagatcctgggtgggatggggtacaccaccgatctgcctgcggagctttactaccgcaacgcccgcgtcacagagatttacgagggaacctcggagatccaaagaattgtgatcgccaacgcagtgctgcgggaattgggaaaggagtgaaagccattgttggtttttctttattactgctgccaaaccaatcagaattcttgcttttacacttgttgtgtatgtaaattagtttatctatgccagacaaatgcatttaataaagtatatttaaacaaatg

SEQ ID NO: 40779 - protein, 415 aa, DROSOPHILA
MQQLIRVARTLGQRSSGAWSARIIAGGNRGIACLAALSETHQILQKTCREFANAELAPKARHHDREELYPAEQVRRLGELGLMSVTVREEYGGSGLDYQAYAIGMEEVARGDAAVSIVMGVNNLYLGAVQQHGTEQQKQDFLVPYTQGEHIAFYALSEPGNGSDAGAASTTAKLQGDSYQINGTKAWISNSKEASGGIVFATVDKSMKHKGITAFLTPKDVPGLSIAKKESKMGMRATSTCQLVLEDVHVPRSRVLGAAGDGFKIAMQSLDCGRIGIAAQATGIAQAALELAVDYSQKRVAFGKHLARLQLIQQKLADMATRVEISRLLTWRAAWLKDNGLPITKEAAMAKLHASESATFCAHQCIQILGGMGYTTDLPAELYYRNARVTEIYEGTSEIQRIVIANAVLRELGKE

SEQ ID NO: 40780 - DNA, 3168 bp, DROSOPHILA
acactgccatcgctgccatcccgtcgcttggtgggcgtggcaggggcactggccgcgcctgatttgtaggcgggatgatcccgctcagcatcgccggcggaggagaaggaggtgtccagtagcgcgtcgcccgacgaggtcggggtgccacgtgaattagtgcgcttcttcatcgcctaactacaaattcgattatcaaatgtaggcgggtggcgtgatgtggttgttgttaggtggttggtggctcggaatcggtttggtggctaagtacatgcggggactgaaggttgcgcaacattcgattcgattccaccaagacttgccactcggctctcctcgcagcggtttctatggctcccggctcgagtgacctcgattgctatggcgtgggcacggctcctggatcctcgactcgcgttcgatcggcgcacgtttattttatcatttgccagctaccgtccgttgttgtcaattaacatgctgcgcgcggcttggaccaataaaaatcgacacttgccggcggtggtgttgccggagggttgaaatgtgtgacttgataacaggggcgttgccagatgaatagcggaacgttgggggtgatccaggtatcttatgatgacaaatattttgtatattttcagatcgtattcgaaaagcagtcatcaccctactttataacaagattatattgtcactattttagagttatatagcgttagttatataacttagttctttaccttattttttctatataataactttctaggcagcatttatggcattcccgaggataaaatgattttttgtttacaaacagtcaaataataatgaggtcacgcataacattattcagattggatatttcaacatagtggaatcctggaacacccctaatgctatgactgtagccctgaacagctgattgcacttgttgactaaaacgcaatccacgactttgcattggtttcggaataaattgcttttaaatcgctttataatgctggacaaggttaaaaatgttatcgtagtgctatcaggcaagggcggagtaggaaaatccacagtgagcacccaattatcgctggcactgcgaaaaaacggatttaaggtaagccaaaccatttcaccacaaaaacattaccgatgaattttgaatggtactcatatgaacaatctattaggttggtctgctcgatatagatctgtgtggaccgagtgtgccatatctattgggtctggaaggacgggatatcttccagtgcgacgatggatgggttcctgtctatacagatgaatcccaaaccttggcggtgatgtccattggatttttattgaagaaccgtgaggatccggtcatttggcgtggtcccaaaaagaccatgatgatccggcagttcctcaccgacgtcaggtgggatgagctggattacctaattatcgatacgccacccggcacttcggatgagcacatcaccgtaatggagtgcctgaaggaggttggttgccacggagccataattgtgaccacaccgcaggaggtggccctggacgatgtacgcaaggagatcaccttctgcaagaagaccggcatcaatatcctgggcatcgtcgagaatatgagtgggtaagttatttgagtttgttaagccgcaagacagacaacaaaataggattcattttaatttgtcctcaaaaaattggaactccaatgcaatgcaacgagaacgatatccatccctgactgaaaagagttttacaagcttctgataagcatttctactgtatttgatgctgactaattgaaaatgcaaatatacatagatattaattggacgcctttgcgtgtcaagtttacggcagggcgacacctgtggactttaaccaggtgataattatctcatgtttgactaaattatcttatatttgattgtcacaggttcgtgtgcccccattgcacctcgtgcaccaatatattctcgtcaaacggtggcgtctcactggccacttacgcccaagtaccacatctaggaactctgcccatagatccccgtgttggcattttggcgggcaccactacgtccgtcttggatgagcttccggattccacgacagcggaggtgctgacgcatatagttgagaagttgaaaacgatgttggtctcctaaataaataccaacataacaattttgtaaatatgatagcttgtttcattattcagtttatgaatataaccattttcttcaggaaacgatttaatttgccatggtatttaattggtaaacttaaatagggactcccattgttaaacacattttagcttttgtttagctttggtttctttttctttatttttgtatgctttggaatgaatgtagttgatgagttttgggtataataatttaaaattatatgagtgcgagcgtttgatatgtaatcactctaatgcaacaattctgcgtgtgcagtaattataatttacaatcaaactaatactttccaattataattaataacgtattccttaactgcttaactcctactgctaaacctaatcgctttatttattgatttgagcatagtttaaagatcaaattgtatgcttatctctggactgacgacaaagtatagtttcttttcctaagtagtactatcatgcagacttcatccactgttttggtataatttttaagatcaaaaatcagtctgcaggaggatggaattcacacagagaaaaaacgaactgataaactgagatggcaacctggaactataattttctctctgtgcaggaatcacaacttttgctccgtcttcgctttctccgtttcattcagctttcgaactggatttaatggtatggcatggtattttttgtttttcgaatatctcttcacgatggcataaagggatataaacactataagtataacaaagcccattataaccacgcattccaaaggccaatcggtttggatgcgctcctggggcacctctgcgtagggataccttatttgctggatctccatactgttgagatccttaatctgactggtcgattcgggcgccacgaccgccggttgattcgtgatgggattatcggtcaccacggataagaagttagttgcattgactaagatcacggtgggctcatcagttgctttcggt

SEQ ID NO: 40781 - DNA, 783 bp, DROSOPHILA
atgctggacaaggttaaaaatgttatcgtagtgctatcaggcaagggcggagtaggaaaatccacagtgagcacccaattatcgctggcactgcgaaaaaacggatttaaggttggtctgctcgatatagatctgtgtggaccgagtgtgccatatctattgggtctggaaggacgggatatcttccagtgcgacgatggatgggttcctgtctatacagatgaatcccaaaccttggcggtgatgtccattggatttttattgaagaaccgtgaggatccggtcatttggcgtggtcccaaaaagaccatgatgatccggcagttcctcaccgacgtcaggtgggatgagctggattacctaattatcgatacgccacccggcacttcggatgagcacatcaccgtaatggagtgcctgaaggaggttggttgccacggagccataattgtgaccacaccgcaggaggtggccctggacgatgtacgcaaggagatcaccttctgcaagaagaccggcatcaatatcctgggcatcgtcgagaatatgagtgggttcgtgtgcccccattgcacctcgtgcaccaatatattctcgtcaaacggtggcgtctcactggccacttacgcccaagtaccacatctaggaactctgcccatagatccccgtgttggcattttggcgggcaccactacgtccgtcttggatgagcttccggattccacgacagcggaggtgctgacgcatatagttgagaagttgaaaacgatgttggtctcctaa

SEQ ID NO: 40782 - protein, 260 aa, DROSOPHILA
MLDKVKNVIVVLSGKGGVGKSTVSTQLSLALRKNGFKVGLLDIDLCGPSVPYLLGLEGRDIFQCDDGWVPVYTDESQTLAVMSIGFLLKNREDPVIWRGPKKTMMIRQFLTDVRWDELDYLIIDTPPGTSDEHITVMECLKEVGCHGAIIVTTPQEVALDDVRKEITFCKKTGINILGIVENMSGFVCPHCTSCTNIFSSNGGVSLATYAQVPHLGTLPIDPRVGILAGTTTSVLDELPDSTTAEVLTHIVEKLKTMLVS

SEQ ID NO: 40783 - DNA, 2900 bp, DROSOPHILA
gatggtgtggtaactcatgcgctgaagaacattgggatagttcacattatccaagaagggaaagggcactggtaagcggaggccccatcccgtcaaggttactggaactcctccaccaacgaagtctttcccctgcgatcgatactcaattgcactaatggtcgagttatttaacttcagcggaggtttgatggacagcacggcaagatcgctggtaaccagttcctgatacttgggatggatgctgtaggatagcacctgggagcgggaacccttctcgttcagtcctcgaattccggccacaacagacatgcgactggcgttgagaccctgacaacagtgagctgcagtaaggatgcgattgggagcgatgatggatccaccgcagaagtgcatctgaccaccgcgtgttctgtactgcagcgaaacctggtagggcacatgttcgcctggtgggatgtcagcgcctccaacaatacgatgtggagtatacccactgggttgacgagctttaacaatatacacgtctgttaccaggggattctgagttactgattccaattcaaactcacaattcagtctcccgaagactcctcccaaagctacaactccgatcagcagtagttgttcagttagacccatcgttgtttggctaatgccactggctttgcacctgccacacttcttaaataagagcttagcccacattggcgaaagaatttgcatatgtatcgcaaaatatctgggtcaccttggctacttggttatgccattatatttgatcttgaaattgaaattataatgagagcttctgctggtaacgcagcccagatacctggtatgcaaatatctaattacgaatttgcaagacatatttacggacaacgataatgccacatttgactgacttggtaaagtagagtttatcagaatatatttgaataactcgcgatcgatattccaatatttgttttgacaatttgtacattgtgatattgctttagaccattctttccttaatccaaccgtcaaacatggacactctggtatagacatcaggattgttcgaggcacagaatgcagttccataggagacgacgcccacctgtttataggactcaccactcttcatcaccaaaggaccgccagaatcgcccttaaaaagtatttcaaaattagctaacattatttcgatttccacttgaatatactactcacattacaggcacccttgccaaacctttccaaggcacagatctctgtgtccgtcagctgggtcatcgtctccttgcacttggaattgctcagtgtcttgtagtcgagtttctggagtacagtgggatatttggcgaaaggacctgtgccaaagtggaagacagaaccccatccggtgaggagaacctcctgatcggcacctaccatgtccgatccactgacgtcgatggtggacacacgcttctcgtccagctcaaagggcggatcgatcttgaggatggcaatgtcactagtcaccagctcctggtagttctcgttcatctcgtacgactgcacctgcgatcggaagccggagctatcgttgagatccctaatcccagcaactacgctaattcgactggcattctggccattgacgcagtgggcagcggtaaggacgcgatttggggctatcagggatccaccacagaagtgtcgcatctttccactgcgggtaagaaactgcatggacacctggtagggaacatattcatcctctggcacatcgtaaccgccaacaactcgctcctgggaattaaggtctgcctcctcgaaatacttgtccactgcgataatcgtggaaaaatgtatacagtactctttggttaagttataaatttcacttacaatcgatgacattgcccatgggcttactttgaactccacctagagctaacaaagtagagctaagaagtagcacaaaataagttactccgttcatggttagactgagcctgaaactagcagtgcatccgaggtttatataggcatgccagagtcccaattaattggggcttttcgttctgctcgattcatttgaattttatcaaatgcagctgtgggcggtcgtcccacctcttgtaatgggttacaaggtcgctgggaagcgatagcaatggtctatgtgataggaaccgacagtaggtaaggggagacaattgggaatggttgttgtataaaccaactaagacttatttcacttagaaggcaacttaaacaggttatatagatactacctttgcttaatcacagcttaagtgaccaactatttctggaacccatacatcatctaaagatctgtggtgatgagtgagctacctcgattcccgagaataacacctacgcaaagttaggacgtaggtactaagagaatcagcatcagaataaaaggcagtctactaaccaagacctcctcctttcagagcgatctgccttcgagttttaatcagcgaataatttaaatattccgattaaacaagcccctgccacggcagcggacatttcttttaattcattgtgcggacaaggagacaaggagacctgccgctggcaatcagcaccttggacacctcgggcacctcggaggcagttgcagtttgagcttcgcatccagacaggagctccatccagggccatccacatgttcgatgcaaatcaggcttcattgcagcctcgagttttgcctcaattccaatgcttctttcatgggcgggccatggaagcgctatctggtccacattcggagtcagatgtgtcagttccgggcctgattgcatccagctaatgaatcatttcgggtgtagccggattggacggaccagcctcaactgtgtgtgtggcgcacaggcgcgaattaattatgcaca

SEQ ID NO: 40784 - DNA, 777 bp, DROSOPHILA
atgggcaatgtcatcgatttggacaagtatttcgaggaggcagaccttaattcccaggagcgagttgttggcggttacgatgtgccagaggatgaatatgttccctaccaggtgtccatgcagtttcttacccgcagtggaaagatgcgacacttctgtggtggatccctgatagccccaaatcgcgtccttaccgctgcccactgcgtcaatggccagaatgccagtcgaattagcgtagttgctgggattagggatctcaacgatagctccggcttccgatcgcaggtgcagtcgtacgagatgaacgagaactaccaggagctggtgactagtgacattgccatcctcaagatcgatccgccctttgagctggacgagaagcgtgtgtccaccatcgacgtcagtggatcggacatggtaggtgccgatcaggaggttctcctcaccggatggggttctgtcttccactttggcacaggtcctttcgccaaatatcccactgtactccagaaactcgactacaagacactgagcaattccaagtgcaaggagacgatgacccagctgacggacacagagatctgtgccttggaaaggtttggcaagggtgcctgtaatggcgattctggcggtcctttggtgatgaagagtggtgagtcctataaacaggtgggcgtcgtctcctatggaactgcattctgtgcctcgaacaatcctgatgtctataccagagtgtccatgtttgacggttggattaaggaaagaatggtctaa

SEQ ID NO: 40785 - protein, 258 aa, DROSOPHILA
MGNVIDLDKYFEEADLNSQERVVGGYDVPEDEYVPYQVSMQFLTRSGKMRHFCGGSLIAPNRVLTAAHCVNGQNASRISVVAGIRDLNDSSGFRSQVQSYEMNENYQELVTSDIAILKIDPPFELDEKRVSTIDVSGSDMVGADQEVLLTGWGSVFHFGTGPFAKYPTVLQKLDYKTLSNSKCKETMTQLTDTEICALERFGKGACNGDSGGPLVMKSGESYKQVGVVSYGTAFCASNNPDVYTRVSMFDGWIKERMV

SEQ ID NO: 40786 - DNA, 8088 bp, DROSOPHILA
tttccacttccactttataagtgtctgtgagccattagaaaatatttgccagaggtgcactgaaaataatgtcttaggctattcaagttgataatatcctaagcaaagcttgtttaaattgttcctgcttaactgaagtgcaccaaaactattaaaagcgatactgaataaaaaacgtggctttaatgacccattatataagtataatgcgtcattgccacatttcttatttctttattgaaaccttgtaagactaacggttattactcttttatctgctttaaatgcctaaatcaattcccccatttatttaaattttcacggtgtattgacgttacgagcataataaacaaacgttaaacagacgatgtcggcgacagcaggaaagaggaagaaccaagaactcccaacgcacacactccatccaaaaaaaaaagaataaaaaaaattaaacttagccaaagcaaactgtcacattagcatattgagaaccgaggttagccagcaaacatgcgtctgctctcttcgttctgagttgtccagctctgtacactgctcgaaagaatcgatataaagcaaatacctacctctaaagccaattaaaaaaaatgcatttttaattttctcttaatgctcttgtttaaagaagccaaaaatagggaaaaagttgaattatttaaataaaatgtaatttaatattttaagaactgaaacgctagatattaacaggaatgtctgaacattacattaataaccatttcattaagttacattttttcgtgactacatgagggaagttattgaattcaataccattttttttctgtgtaagctctgcgacctcctctgccggcgtcgctgccaacgcacgctgcgctgcgcatgcgcaactttctttgccccagcggcgccaactgagacgccgacagcgctgttgtgggggcttgggtaaaatggcttagtcgctcttctgcgccagcacctcgtatcagtcgacttgcagactttcgcgtgcgcggtggtgcgacctaactataccgttgttatatagcaccatataatatagcaaagagcaaacaaacagatcgagaaattcgctgggattagggcgcgacttgttgacagtttgcagtcatgtgaaatggttcaattagtgcaacaacaataagacataaaagaaaccgtgtttaatttacataattaacaagtggagtgtgaacggggtagagatttcgaaaaattccccgcgttagaacgagcagaacgagaatcgaaatatattccgataacggcacagatcgtcgagaccgctacgacgaccaaaaggctcattaagtttacatgcattgaattgcataaccagcaggcagaagaagatgatgatgctccacttacgtcactggccactggtgctggccatggcttcctgcctgctcttcacagcagcaacatctgcgacaccagctacaccagcaacaccagcaacatcagcaccaccagcaacatcaacagcaacatcatctttatcctccattccgggcaaatatcaagccttgggtgcagcccaccatcaggcaaagaagctaaaaatcggagacgtcaatgcttcctcctcggatgccaataaacctgtattccggcaaaatccgatcaagaattggttcggtgccttcaatcgcaataattcgccggcagctcagaaccaaacatcgccgacatgttcctgcaggtgagtcgtttggtttgagattgtctccgtttgtccccccagagatacagatacaaaactgaagttacgaagatgcaacacgcacggcgagatacaaaagctgtcatggccatgatgacaacttccagttagacgggcaaagaagtgataaacaactctggcgttgtcattgtcacgacacccaaatggcataaacagttaaagttacaggtagattttagtgcctgcgaggaggtcacgcaatcggagatatatttattcctggccacactcctccaaagtaatcataggagaccgacaatagttagatcccatctaagttccaagttctcttttaattatgggaaagcatagtgggaaatgtatcgaaaccaaataaacatacgtaggtccgaatgactttaatattgctgttattttcagtttatttattgctcaaatcttatattatcttatcttatattaagagcacatttatcaggaattgatcttttcgcctatttcaaaatacaagtctttaaatcacgttgccattcaacttgtcaatagactccattgccttaagaataattttaaccatcttttgagtaataacctgactaccttcaagtgagcaaaggtgaagtcttaaacatttttaaaacattcttctaatcccaaaagaatcgcctacccattcgttacccgtttccaaaagccaattcccggcttgacctcgaagccgagttccctctgtagaattgcattcggagtgcattcttgtgtggccattaaacaaattgcattaccaattgggaattcaactttggcttttggcataggtaaacaccccagggtattaatagagtcgactgtaaaaatgaaaacaaaggcagtgggttcttaagggacataaaaatcaattccggaggctccgaatagattaggtcccaaaaaagggacctctaaagattcttatagctccaagctgcatagttatttaccaaataaattcccccgatttatatatttggaaaagctctgaatgctataaatttacttggaatcgatagtcgcaaccgttctaatctttgttaatgaatacctaaacccgttttatttctatatataaattttactttttttttttgcatgtgaaagaagaaaagaaactgatttgcatacgatttgataacagtctctgtttggctttcgagaacgtgtgtgtgtttatacacccagcagagacagatgagtacggcagatactgtaaaaggcgtatcttcaatgcgtcatgtcacattaatgtctgtctgcgcgggaggcaggggaatgccgtcgacgttttcttcgtcttttggccgttttggcctgtttggccgtctcggcctgtcttggccgtctccgaagtgggtcgttgtcgcacattttgcttctttgtttcgggacgcctctcgaccagaccaccattttggggcaatgacacgattaaacatacacaaaatctgaatcccaaatacttgttgcggccggatcgattgattatgtggccaaaataaataaaaagatataaagaagagagataacttgttacgcgtcctttcccacttggtggaatatttttattttggctgcaagcggtgttctcttgtttaccacgggtaataaaaaaaacctgtttaatgtaacgcagctggcagccattaaatctgcaaaaatcgctcatttattttatgtacgtccacaaggcactttgacactttctttatgtcggggttgctgaactctgaacttgccgatcgggagagaggcccgtcacccttgacccaatccatttttttcttctcgcgaaaggcataaacttcgtaaatgttgttactaatgagatagcagttgaattacagtgaaaatataaatattaattagaaactgactttagttattcacgttgtaatattctttatctatcgacaggtgcggagagcgcaatgacgagtccaggattgtgggcggtacgacgaccggcgtcagcgagtatccatggatggcgcgtctgagctacttcaataggttctactgcggcggcacactaatcaacgatcgctacgtgctgacggcggcgcactgcgttaagggattcatgtggttcatgatcaaagtgaccttcggggagcacgatcgttgcaatgacaaggagcgcccggaaacgcgcttcgtgctccgcgcctttagccaaaagttcagcttctcgaacttcgacaatgatatagccctactacgtctgaacgatagagtgccgatcaccagttttatacggccaatctgcctgccacgggtggaacagcgccaggatctatttgtgggcacaaaggctattgcaacgggctggggaaccctcaaggaagatggaaaaccctcctgtttactgcaggaggttgaagttcccgttctcgacaacgacgaatgtgtcgcccaaacgaactacacccagaaaatgatcactaagaacatgatgtgctcgggctatccaggcgttggtgggcgggacagttgtcagggtgattctggtggtccactggtacgtcttcgcccagatgacaagcgattcgaacagattggaatagtatcttggggtaacggttgtgctagacccaattatccaggagtgtatacccgagtcacgaaatatctggactggattgtggagaactcgcgagacggttgtttctgcgatgaggattactaatatcataaagagagtgctcaaagcggtggacaattcttcgccttagtctgtagttaatcccttagtagtttaggtcatattttgtacttttatactaaaacaactgaataaagataaacaatgcagtaggttagaaatcccttaatcagtgcgtcttatatttggctaggaaatttctttactaattgcaaaaatgcattttatgtacaaatataaacatcgaaatttcgcaataaaaaaattcgctcatgcgaattgtaccacatagcagagcaaggtttcgatcctcggacctctgggttatgggcccagcacgcttccactgcgccactctgcttgcttgaagtactggacctcaaggctagttaattacaaacgagaagtggaacacctcgttaccgacgaatatacatttgtgaccctttacagtgcactgctttcttaacagctctgttgttgctcatccacaaagcagtgttcatgtattactataagaatacgctttaatcgtacagtgaatgtgtatacagtttcaacaactgaacagttaatgcgtacatacagtagttagaacgctgtactgtgaagcgcatttctattttacttttattggtaacaaagtgtcctttgtaattacatcgactcaatggcctgttggcctcaagcaagcagagtggcgcagtggaagcgtgctgggcccataacccagaggtccgaggatcgaaaccttgctctgctatgtggtacaaattcgcatgagcgaattttttgcttatatttttttttattgaaaaaccccgtaatagcctttcaattatgcgttatgagagcatgataaattttaatcaaaaacctaaatatacgataaagttgaccacgttatatataaaatccaaccatttatacctttaaatgagtccttcctaaatattgttagattgaaagaaaccgcaagtacatatatgttaatacgtctaaaaatctttccgacgaaacaactggctttatatactcaggctatgataaatttgagaaggtgctaactttgtttccattctttattttagcaattacttgtgtttatttttagtcatccctagaagattacacagctgactactgttgctccgcagtcagttaattgtgcgcctaactgtgtaagacacaacaaccttcagccagcagcaacagttgcagttagaagtctaaacattcagcggtttgatgcggcccaaaaagcaaatatcgttagaaacattagctagctagtctatggcaaactggtttccatcgaacagctgaaagcgcaagggggcaaataaaagatgaaaagaaaagagcttagaagaagacgttgactttaaaagtcaaacgttgctttggccggagaaccaaaaagttttctcatttcaaatgtttgtttatgaaattttagtgttttgcctaatgaaacttacgcggaactgcggatgaacgataccgaaccgaaagattgctgatagccttatctatttgtcgtctttcacttgtttataattggttactcatcacaatcacagtgatcacaggaaaattgacgtcaatttccactttcgcttcgcccacttttcatttcatttcatttcacgaccgcactcacgtgtgccgcgccttgcgtaattatttaaattcaaaatttttgcaatgcatcaagattcgcattcgcgcatctcacagatatattttcgtgtgcacagaggggcgctccaggtttacgtttcgaaattttctttgccgcagttcatttttcacgttgcgttggcagcagttgttgtttaccgtacgccgatcgcgcgctcactgaaaaagccaccacaagctccccgcgcacccaaagatacacagagagccatcaggccagatattccgacggatggagcgtcgcctgagatctcgagacctttgcgcttggccacgatctcggagtttccacgctctcccacttgccggtcatatgaatgaatgagtatttttggtacatggaaaaaaattgataccaaaattggtcacttattctaatatatgcatacagctagatagaactgtattctgaatatatgcgcctcaaagtcataatcaatcaatactcataaaataagtatttatttatcaattttggtaatctaggaggccagtcattaatattaactattttgacaatatagaagtaaggtatacatcgatcattgacagtctctaaaattattcccatcatagaagaaataaaaaaaaattttagatatgctttccccggagtctccggagaaaccgaaaaaaagtctacatgacctcgggctattaacaaagactgaagagaaaaccaaagggagccttgtagccctccagtctatcgacaagcgcctgaagaccctcttggaccgccttacatctgtggagaactcaatggctagcttgaatttacctgctttggacgaaggtaatggagacacctatgaggacttggaaacattggaggatgagttggacaaccaggagaaagaactttcagaatttgcaaatgaagaagctattgggtcaaaggtagatgatgatgaaattgaagaggtagacaaggaagtcacaggaaatcaataatgcgattttccattgtataattgttattaatgctacggttttccatacgttatacacgaggaaaacgggcagaaaattgttaattgttaattgttagaataaaaaccgtggcaaaaagaattttttttcttgcttactgtgtattgttttcttgtttacttgtcttcttcagcttagttgttttttaaaatttaagaaagcataactttccgttaagaaactctgcgctttaggcaatttgtttacaaacgacttttacattggcacatgtgcgacctctagcgttcataaaacctacagctgaagatgtatcatacataaatatttttcaattctggcaacgccatataacagtaacggtttttaagggcatgagttaatgaacttttgaaacaccttctaaatcaatccccacaattaaaagcggaagttcttttcttttgttacgtttttgtattttttctttttccatttgttttaatacaatatataaaaaccgataaaaaatcaaaaataaatataaatatgtaggtgtacacagtttagtttgaaatgcgtttgatggctggcaaaagtcagggctgtctacgaaagatacaaaattacaaaagccgtggctcggacgcttttctatggccatgttaacgtaaataagacttcagtttttaggtttatcagtagactacagttacaaattagttattgctcttcatttcggtgataattgaaattgtgtgctgtggcaatttgctggttacattacatatgcgcgtatgcataaatataatacaaattaaatatgtaggtgtaggtgtgtttttcgcttaggtctctaggggctaaagtgtttatagttaatttttgctaaacgatcacattgaacaggcactccgctcgcactcacactcggtaaaagcattcactccgcgacatacacgcactcacttctacattcattcactctctggcttacaaaatacaatttcgcacttagacttag

SEQ ID NO: 40787 - DNA, 1831 bp, DROSOPHILA
cagactttcgcgtgcgcggtggtgcgacctaactataccgttgttatatagcaccatataatatagcaaagagcaaacaaacagatcgagaaattcgctgggattagggcgcgacttgttgacagtttgcagtcatgtgaaatggttcaattagtgcaacaacaataagacataaaagaaaccgtgtttaatttacataattaacaagtggagtgtgaacggggtagagatttcgaaaaattccccgcgttagaacgagcagaacgagaatcgaaatatattccgataacggcacagatcgtcgagaccgctacgacgaccaaaaggctcattaagtttacatgcattgaattgcataaccagcaggcagaagaagatgatgatgctccacttacgtcactggccactggtgctggccatggcttcctgcctgctcttcacagcagcaacatctgcgacaccagctacaccagcaacaccagcaacatcagcaccaccagcaacatcaacagcaacatcatctttatcctccattccgggcaaatatcaagccttgggtgcagcccaccatcaggcaaagaagctaaaaatcggagacgtcaatgcttcctcctcggatgccaataaacctgtattccggcaaaatccgatcaagaattggttcggtgccttcaatcgcaataattcgccggcagctcagaaccaaacatcgccgacatgttcctgcaggtgcggagagcgcaatgacgagtccaggattgtgggcggtacgacgaccggcgtcagcgagtatccatggatggcgcgtctgagctacttcaataggttctactgcggcggcacactaatcaacgatcgctacgtgctgacggcggcgcactgcgttaagggattcatgtggttcatgatcaaagtgaccttcggggagcacgatcgttgcaatgacaaggagcgcccggaaacgcgcttcgtgctccgcgcctttagccaaaagttcagcttctcgaacttcgacaatgatatagccctactacgtctgaacgatagagtgccgatcaccagttttatacggccaatctgcctgccacgggtggaacagcgccaggatctatttgtgggcacaaaggctattgcaacgggctggggaaccctcaaggaagatggaaaaccctcctgtttactgcaggaggttgaagttcccgttctcgacaacgacgaatgtgtcgcccaaacgaactacacccagaaaatgatcactaagaacatgatgtgctcgggctatccaggcgttggtgggcgggacagttgtcagggtgattctggtggtccactggtacgtcttcgcccagatgacaagcgattcgaacagattggaatagtatcttggggtaacggttgtgctagacccaattatccaggagtgtatacccgagtcacgaaatatctggactggattgtggagaactcgcgagacgatatgctttccccggagtctccggagaaaccgaaaaaaagtctacatgacctcgggctattaacaaagactgaagagaaaaccaaagggagccttgtagccctccagtctatcgacaagcgcctgaagaccctcttggaccgccttacatctgtggagaactcaatggctagcttgaatttacctgctttggacgaaggtaatggagacacctatgaggacttggaaacattggaggatgagttggacaaccaggagaaagaactttcagaatttgcaaatgaagaagctattgggtcaaaggtagatgatgatgaaattgaagaggtagacaaggaagtcacaggaaatcaataa

SEQ ID NO: 40788 - protein, 483 aa, DROSOPHILA
MMLHLRHWPLVLAMASCLLFTAATSATPATPATPATSAPPATSTATSSLSSIPGKYQALGAAHHQAKKLKIGDVNASSSDANKPVFRQNPIKNWFGAFNRNNSPAAQNQTSPTCSCRCGERNDESRIVGGTTTGVSEYPWMARLSYFNRFYCGGTLINDRYVLTAAHCVKGFMWFMIKVTFGEHDRCNDKERPETRFVLRAFSQKFSFSNFDNDIALLRLNDRVPITSFIRPICLPRVEQRQDLFVGTKAIATGWGTLKEDGKPSCLLQEVEVPVLDNDECVAQTNYTQKMITKNMMCSGYPGVGGRDSCQGDSGGPLVRLRPDDKRFEQIGIVSWGNGCARPNYPGVYTRVTKYLDWIVENSRDDMLSPESPEKPKKSLHDLGLLTKTEEKTKGSLVALQSIDKRLKTLLDRLTSVENSMASLNLPALDEGNGDTYEDLETLEDELDNQEKELSEFANEEAIGSKVDDDEIEEVDKEVTGNQ

SEQ ID NO: 40789 - DNA, 3086 bp, DROSOPHILA
gcttgtggatttgaactcgctctccatcgtatttgatctcgctatatagtccagtggggctcttcttgaaggcgtcctccaccgacttgcagggactggccaacatgggcgatatgggtgtcattacctgaattgcactcgagctcgttttcttagtcttcttaacgggactactagcataatttttattttctttggtggcaaactgttcgacaattgccaccaaatcgcgggaagactgatatgcggggtaggcatcaggaccaaaagcatccaggatgtgccgggctcgggcattgattcttaagtcgtgcttcaccaagcgaataaaggtgcgcagatccaggtcagtggccttcgagcacaacttctgtagcagatctgtttgctcatcctctttggtacgctccaccaggtgcaggagcatttcctccacctcctgcagatagagtttgctctgcttttgcggcttgagtttcttagaagcagcaaagtgcttgcgtagagtttccgaaacgtcgccatctacgggaaacgagaagttagaccagactcaacaagagtttgtgtcggaagtttcttgaaaaatgacaacttgccctgctctagatccagatgcatttgctgttgatctgcattaaaaatgcgcgaaaagagtttgatcagcgccttgttctgcagattgtagacgcgctgattggccgccggaatgaggaactgcacccagagcacggtgtcgcccttgaagcccttgccactgctccccttttcgaagaatcgctgcagtctctccgctttcttcaggtaacttgactcgccggcaatttcatcacagatgcgacggaaagtgtccaacttgttgtcctcattgtgcaatcccttgctggccatcttattacacagaagacgagttagaatcctggcctgccacgttagcctggacaatagcatacgcacactaattgcaaattaaaaatgtggttgtctatttcacagaacaatgcaaacagactttcgactcacgagtaaataaatcgggaatatttgactcaaatcagctgttgctcgccaaacacgcgctcggcggcgttgtaattggcggctcgagagtcttgcaatgccgttacgaatttgaagctcaggcgccagaacgggtgcagattcgattccacgacttcaacgtgcctacggagcacgagaattccacgggttgccagccgggcgatgcgctgcacgtggtcaccgagctgcgtggacggtacgagacgcaggaactgctctgcggcgccttcctgcccaagccactgatgtccagtggacagcagctacaccttcagtttgtcggaaaatatccgcccacaatgacgaacaaggtgcaatactacggatttcgcgcggagtaccgtttcttaaccagtaagtgtttccactgagtcttaatcaaataaagactgatatttatttaaaaattggcttattttcaagattttggtatcatgtcggggattcaaaaggaaggatgttcctttgtctacaatagcagcgagcgaataagtggcctatttcactctccgaattttcccggatattacctggaaaatgttgtgtgcaattattatttctacggagcaagtgacgaaagagttgtgcttcacttcacatatttcgatatcgagggcattggaaggtaagatctttatctaaactatcacctaaaaatgtttaatccccttttctgtgcagttgtgaccaccaaaccgccagcgattacatcgagttttccaatttcatgagcacggatcgaaagttcagcagatactgcggaaagcttcccgattttgaaatgcgttctgatggacgtttctttcgagtcaccttgcattccaatgatcgctttgtggccatcggattccgcgccctgtacacctttgaaaccgtttcagtgaataattccatcaccgatcttcgggataatgcctccatgcagagtttcgtctcaacagcgtcaactcagccggttgcaaatgtaaacaaattaattgcatgtatcttatgcacttataaagcataccaatcttatgtttaaaatatagagacaaaatatttcgaaattttgttttctaattctttaataaattttaataatttttttctattttaatggcacacaacttcattaaatttaaatatttaatcttggccaaattatcgttttaaaagcaatcgatttcatgttggctatcgaagtttatgcgtagtagttcaagaactaacaatttaagttgagggattttaagtattaggatgtaaattaaacgtgatatcatcgataaaaactccgccaagcattttcattttcaatagtttctggtaaaaattatttatttaatttcaacttcattatcagagttaccgtgtaaacgagccactcgttgttatctgcaatcgatctttacctgttcgattcagttttgtagagtcacgacataagtatatgctatctttttatcatttttggtataaattaaaaacaaagaaacaaattaccattaattgtttaaatttaataatgtcaacttctttaaaacataacattcaacaaaacatattattattttgatcgtttataagattagttcctttgaacaagtttaatccaaaagccgcctttgggtgacaactgaaaaccggaagtaatgagctctagtggaatgcaggatttcttggcaggggcaaagcggtagtccttcaaaagatagtagataacagcctttgcttcaagtagagcgaatcgggaacctataataaatacattttacattttttcgaagaacaattttgaatcaatcaacttaccaatgcagttgcgttgacccaggccaaaggggaagtatgtgaatggctgaatagactccttgttctcatcgctaaaacgttccggatcgaacttcatagggttctcaaagtacttgggatcacgatggaagccgcatgtaggcagccagatgacatcgcccttcttgacctcgactttctggccatccacatcgaaggtgatatccttgttgcattctcgatcgacggca

SEQ ID NO: 40790 - DNA, 826 bp, DROSOPHILA
atgcaaacagactttcgactcacgaattcgattccacgacttcaacgtgcctacggagcacgagaattccacgggttgccagccgggcgatgcgctgcacgtggtcaccgagctgcgtggacggtacgagacgcaggaactgctctgcggcgccttcctgcccaagccactgatgtccagtggacagcagctacaccttcagtttgtcggaaaatatccgcccacaatgacgaacaaggtgcaatactacggatttcgcgcggagtaccgtttcttaaccaattttggtatcatgtcggggattcaaaaggaaggatgttcctttgtctacaatagcagcgagcgaataagtggcctatttcactctccgaattttcccggatattacctggaaaatgttgtgtgcaattattatttctacggagcaagtgacgaaagagttgtgcttcacttcacatatttcgatatcgagggcattggaagttgtgaccaccaaaccgccagcgattacatcgagttttccaatttcatgagcacggatcgaaagttcagcagatactgcggaaagcttcccgattttgaaatgcgttctgatggacgtttctttcgagtcaccttgcattccaatgatcgctttgtggccatcggattccgcgccctgtacacctttgaaaccgtttcagtgaataattccatcaccgatcttcgggataatgcctccatgcagagtttcgtctcaacagcgtcaactcagccggttgcaaatgtaaacaaattaattgcatgtatcttatgcacttataaagcataccaatcttatgtttaa

SEQ ID NO: 40791 - protein, 111 aa, DROSOPHILA
MQTDFRLTNSIPRLQRAYGAREFHGLPAGRCAARGHRAAWTVRDAGTALRRLPAQATDVQWTAATPSVCRKISAHNDEQGAILRISRGVPFLNQFWYHVGDSKGRMFLCLQ

SEQ ID NO: 40792 - DNA, 3722 bp, DROSOPHILA
actccataatgctgcaggtgaagttcacagtggatggaattatcgacactttgcgccgcactggaactcactttgtgcactgctatctgctgcaacataacgcaggcaaacataccaagtacaccgccaatggatcgcccagctcagctgccggtcaggtgtccagcgaggaggaaatggtcaacgtgccactgttaaggagtcaggtgcgccaacgatcagatcataattgataacacatatttaattattttcctaattgcttagctacgtggttcacaagtcctagaagcggctcgcttgcatcgccttggttttcccgaatcagtgccattgttggaatttgtcaggcgtttcgggcttttggccggggatttggctagcaataaggatgtgagcgtggagcagatattagctgtcaatgaactggatgtggccagctatcgcataggacccagccaggtgagttctaaattatatcttctttgttgaagtttacaagcatttgccgagaacttttttcaaaaaaagctttaaatagaatagcatacacccaataactattagagcgcacatgtttagttaacggcctccatattaataattataaaatccaaatttaaaaaaatcaattatgtgcaatatttatttgctttatataattagatattgcagtttctaattgcgctagcagttagtccaacaggtttttataaatgtgtattaaatatatttcgtctcgattgctgattttgatggaattgacagcggcagtcgatgaaccagtttgactgaagcctctctgtcttctcccccctcaatggtggcttttgataccacgtttctataagattaattactctcagtcgaaggcaactcccatctaattgtttttactcacgcgtaataaggttggttattccgaagagttgacattgacttaacacgttcgttcaatagttaatgaaaatcaagacggaccaaataataggctgagtttaattacctccataaacctgcggagtgatccacttttatttaagatgtaccgaatgattacttaaatgtaaaataatttttgactaattcgaattctttgggtggatagattcttgtttaagtctaggcttatttatattaaaaaaaaaacatcactttttggtctgtagcaatcgtggtttcctttgatctggatctagccaattgaacgccggtttgctgtctcccgaatagtggacggccggggtcgtttaatgtggaccagcccatcgctggtgccatacggagactgcggccgtgtgctcagataaaagatacctcttttggggactgccggttcaccgcccatgaactcgttgccggtgcatgtattgactgcatatttttcgctgcctccgacgttgcagttgcaggtggccgatagcaccgatttcgctgagctgcagcgcaatgcggcaaatgatttcggttgccggactgactcggcaaagtagaacatggccgcgaagtggtcgcagacaaaatcaaactccgtggccgtggcgttgggacaatgtggctgcccgaggccccagttggcaaagaaggaggcatgactgagcttagtactcggattgccgagcagcgttagatccgtgtgaattgactccacatacagggcatcgttgacgtccagcctctcttcgggtcccaggctgagttgagtgagaccagcgggatccaaggcgaaaatagcaccaaggcgatgcggccttaacagctttccagtcaatccagagatgtgactgccggcgctgtgcccaatcatatagatttgctcgtagggaactcctgtgttgtcatgaagaaaccgcaacattttggccacattggcagctatcgacggaagctgcttagacacacgtggatagctgatgtccaacgactggcgactccagtccagaattatgacgttgtaattgccccgggacaggtaggcatccttgatggcagcattcgagcaggtgacactctttcccgcccagccatgaatggagaccctaagaaaaaaaaacacataacgtttaatagtgatctagcaatgaaaactagccacaaaaacttacctaactggccatttcggattgaagtgcgagttccttagcatggtcagatctcctggtcgcagcagttgacgctcctccggattgaggggcgtataaagatcgtaccgcagcagctttgtttgcgaaggacggggccttccgaggatgacgccagcctcagtggtaatcatgccttggattacatccgaaatggacacttcgcacttaccgggagcataggcaaagtagtcaactgacgcatccgctgaaagggcagacgaggcaaaagctgcttatagaacatatatatcggattgatgcgttcagaacttacttcccgctgcgccaaggagcagcaggcacgtccacagcaaccagtgtgatatatgcattcccgttaacgagcccataaaccgcactggccaaagccaaaagcctgatgaaaattcacgtcgatgcgtcaattaaaattcacttaagtgcgatttaaggtgttcagttgtttctcgaaattctgccacaattcgcgatccaaattttatcactcgctcgcgccgctcactaaaagaacgttaaatttctgagccgggcagagctgatctgagctgggctaacctgtcgtgcacctccgaatcgttacaagcctcgaaccgaagtattgctaaattctaaacggaggcttggttaaataaagcccgctgcgttctgcctctgccgccggcgaccggcaagggcggcctaccagcggcggcagcagaggcagcagagcggtcactgtcatgatgaacgaccactaactggttggaacggcgggctggtcagtgccggtacaccagtgcagtccacctatcgcggcttttgcagtggctgaaagatgcagtttttgtgtctaagtgcaggcaaacacttcacagattgtcaataaagggatgctgagatggatgctggctttaaccaccttttcaaccatagacagtgctacatagtgggtcaataggctttcactgagcactcggctcttcataagttattaatttatgcattgattataaacgtctgtgctagcataatatattcgacacgcatatctttaactgatttacagtttcgggtcgataacgccatcaccagttggttgatctctgccagttgcccgcttatataagttcacctgagatatcattaataataattggaaaatgatcgcactctgagtcaataatatgatctgtcatttcgcaagggattgtccattacaacatgatggcttggaatggattaaataaattaaataattgcacgctatataatagaaataatacgttaatgtattctagcctgcatcttacagaaattattagccattagttgttaattatttgataaatcagaactagattttgcagttagaccagtcgctttttgtactcgttttagatcacattccaattaataaaatgaggttggtaaacagaagccccgggcctggggagtcgttgatcccacttagaactctacacttccacacatttcacctgccccagacgaaatgcggctgagattttggggactgggccaaaagatcccaagtgggttagggttcagctgtgttttgccaaccatttagcagtaaacttg

SEQ ID NO: 40793 - DNA, 1587 bp, DROSOPHILA
aacgattcggaggtgcacgacaggttagcccagctcagatcagctctgcccggctcagaaatttaacgttcttttagtgagcggcgcgagcgagtgataaaatttggatcgcgaattgtggcagaatttcgagaaacaactgaacaccttaaatcgcacttaagtgaattttaattgacgcatcgacgtgaattttcatcaggcttttggctttggccagtgcggtttatgggctcgttaacgggaatgcatatatcacactggttgctgtggacgtgcctgctgctccttggcgcagcgggaacggatgcgtcagttgactactttgcctatgctcccggtaagtgcgaagtgtccatttcggatgtaatccaaggcatgattaccactgaggctggcgtcatcctcggaaggccccgtccttcgcaaacaaagctgctgcggtacgatctttatacgcccctcaatccggaggagcgtcaactgctgcgaccaggagatctgaccatgctaaggaactcgcacttcaatccgaaatggccagttagggtctccattcatggctgggcgggaaagagtgtcacctgctcgaatgctgccatcaaggatgcctacctgtcccggggcaattacaacgtcataattctggactggagtcgccagtcgttggacatcagctatccacgtgtgtctaagcagcttccgtcgatagctgccaatgtggccaaaatgttgcggtttcttcatgacaacacaggagttccctacgagcaaatctatatgattgggcacagcgccggcagtcacatctctggattgactggaaagctgttaaggccgcatcgccttggtgctattttcgccttggatcccgctggtctcactcaactcagcctgggacccgaagagaggctggacgtcaacgatgccctgtatgtggagtcaattcacacggatctaacgctgctcggcaatccgagtactaagctcagtcatgcctccttctttgccaactggggcctcgggcagccacattgtcccaacgccacggccacggagtttgattttgtctgcgaccacttcgcggccatgttctactttgccgagtcagtccggcaaccgaaatcatttgccgcattgcgctgcagctcagcgaaatcggtgctatcggccacctgcaactgcaacgtcggaggcagcgaaaaatatgcagtcaatacatgcaccggcaacgagttcatgggcggtgaaccggcagtccccaaaagaggtatcttttatctgagcacacggccgcagtctccgtatggcaccagcgatgggctggtccacattaaacgaccccggccgtccactattcgggagacagcaaaccggcgttcaattggctagatccagatcaaaggaaaccacgattgctacagaccaaaaagtgatgttttttttttaatataaataagcctagacttaaacaagaatctatccacccaaagaattcgaattagtcaaaaattattttacatttaagtaatcattcggtacatcttaaataaaagtggatcactccgcaggtttatggaggtaatt

SEQ ID NO: 40794 - protein, 387 aa, DROSOPHILA
MGSLTGMHISHWLLWTCLLLLGAAGTDASVDYFAYAPGKCEVSISDVIQGMITTEAGVILGRPRPSQTKLLRYDLYTPLNPEERQLLRPGDLTMLRNSHFNPKWPVRVSIHGWAGKSVTCSNAAIKDAYLSRGNYNVIILDWSRQSLDISYPRVSKQLPSIAANVAKMLRFLHDNTGVPYEQIYMIGHSAGSHISGLTGKLLRPHRLGAIFALDPAGLTQLSLGPEERLDVNDALYVESIHTDLTLLGNPSTKLSHASFFANWGLGQPHCPNATATEFDFVCDHFAAMFYFAESVRQPKSFAALRCSSAKSVLSATCNCNVGGSEKYAVNTCTGNEFMGGEPAVPKRGIFYLSTRPQSPYGTSDGLVHIKRPRPSTIRETANRRSIG

SEQ ID NO: 40795 - DNA, 4777 bp, DROSOPHILA
ttttggttacttgaaacgctaagactgaaatggcttgttatggagaagaaaacacgtcctgcaatacattatataataaaaagaacccagcaattttcgcatcaccacattacagacaacaaagtactttgtcctcatcgttctgtgtgatccagatccccgactatatatgatatatacacctagctagatttaagcgatttgtacatacagaagcaaaagcaaaacaatataccagaaaattgcctgttaaatacatttatatacacatatgaatttagttatatcacgatgactagtttttagttcttagaggttatttagttagtaaggagcccaactgacgtaacgtgaataaatcaactatatatgtgcccatatataaagcgtactatttaattatttagtttttactggacttatgacacaacgagccactgtaatgtcttattcagctcaatgctcataaacaaaataaatatttttggaaaaaatactgtagttcttcttatttagccaagacgtccaaacctttttttaataaatttaattgagatgaagatttgcattcgaattctatagaagcatcaaacaaatattacaacagtatcgagtgggttattaaaaattaaatatgtaaaaatcgctcattgtgttaaaatattaattataatagattagctcaaacatcttaaatcgacattttgtgcaacacataaaaattctcgcagacaattggcagctgattacgattaaacaaaaccgaaattagccgttttcctttaaagcaatcagcattcgtgatctcttgtttggttacctcacaatgctagttagttatagcgccataaaaccccattttcaatgtcagggaaatcataaggtcataaggttatccccacgatcgttctaatgtgatcacagccacaatctataataaccagttcccaatagatagacaagattagaaaacgcagcttggtagagttttttatattttataatttaatttattcagagtgctttcttgggtatcgggtcagacaattgaaacagcattaatatcatattcgcatgtgtggcctgtgggggcagcggagaggagataacaaggggctggccatcaaaggtacaacatacggacatactttccagcgaaagctagacacacataggattaaatatagcacatagtataacagaatatatatggaattgaatactttgaacttgagtgtagcttagtttcgtacgatagaatgtttggcttttaaagttagaaagatgtgtttataaaaaagtgtgtataagtgctgtgttagagaaatgcgtaaagtgttgttttggaatgtacatgtgcaatggcacacacgcaacattaatgtattcttgctgagaaacaagtataaagcattttcgctatactgaaaccgaaattcgttagaaagtaaaagtatgttgctcctgtgtctgcccacaatcgctccaactagtgaactctgtccttaaggtaaccaattggactagcccacttaatgctgcttggccttcaggctagctggcatctctggtggtggtgggcggggaatgcccagggcgaccttcacaccatcgtagatgaaccactgcagagcggtcagggtaccgatcatgataatacgaggagtcaatccgttccacatgccactgaagcccagcgacttggccacgctgatggcgctagctcccttggcctggttcagcttggacaccaccacatcagcgggatgcgacaccacggcacagaacacaccggcgatgtagccagcggcgaaggtcacgatcagctgctcgcccttggtgcagtcggcacgaggcttgggcaccacatacctgggaaaagttgcatcattagtattgatttaacggggttcgttggggcttgacaacccgaactgtgaacggtattgctctagtttttacatttgaactttcagtggctacctgctaatttgcacttcaaaaggaatgctttgctttttttattttatccatagtaacaaactagttctgaaataatatgattttcctatatttgaacaagataagcattcgtcgttggtttttattctggcgtgccatttattagatacgaatggcattcttatctgctgacgcgctaaaagtttattttattatgaatactttcagttttgatcaattagcatatcacttttgaaatttcacagattaacagtctacctttaaactattgtaatagcaaaacgctaatacgaatacagatattgtgcacagcactggtaagtttttccgctgtagaaactagaggatacctaaagaggaaatgttacttacttgtagagcagctccacggtgcgctcgaagcaagcgaacttcatcatggtgtatgggatctgtcgcatccacaggggaaccagacccttgtagaaggcattgacgccctcctcctttagcatcttgggcactgcctcgcggaagttgttggcgtatccgggaatagtctggatcttcaccttggcggcctcgaacggcgccagagcgatatcggcgaagaactcggccgaagcggaagcagccagatacaaggaggtgcggtacaggtaggcgttctcctcgccaatgatttcggcgtacttcaccttgaacaactcgtacagaccgaacttgcacagaccctgaaagatacagaaacgcggattagcctgctgtttctcagaagttatttttcagtttgcagtagtatccaagattttatcttcggtatctgtttctcccgtaaccataaagttgtcaaaggtgtgttgttattctgaggtatactaagatatcagcctaggaatcaaacttcctaatgttcgattcgaatcacttttatctgcttcaagcccggaaccgatgtaattaaggtcagccgacctggtcacgagcatataattcgcctccagacgattatgcaacccataaagtgaagcccaatctcacctgtgccgagtagccgagcagagtggggaaccagcccttagccagtccgcgggcgccctcctccgccacggtgaccttgaatccgtgcaccagattcttgtacttggcctggtcgacctgcagacggcacttcaccagatccagtgggaccacgaaggtgtgggtggtgccgcagctgagaatgccaccaattccgcacagagcgaagtacttggtgctgccgaattcgcacgaatcctgctggttggccaccggggtagcggcggcggcgatctggcgaccctcaaccggctggggttccaccactggggcggcggcatcgcatcttgccatcgacatgggggtgcggaatggcgagttccgggcagtttcaaagaagctggagaacatcttgattctgttcttgttctggggtcggctgaaagtagagagaccatccattagttacgtatatatgtacctcggaggcgacatgtgctttatctaattatatatatagctgggtaatcagctgcttttcgcttttgtaggttacataacggcgtgcctcgaattccgagcacccggacttacgacaccaaatttacccgaaaagcgaaggattttaagcaaccacgtaaatttagtgtatgttaagggagcgatagagcaccgctcggctactttgatttcgattttacaaaacttatgcaattttcgctcggaattttcgcacttactattcgtcagcaacgttagcggctcgttggcgaggattcaaagaatgagggggggctcacggaggtgcagcgatttctcacgaataccaaaacgccttaatggttttgccgtggagaggtgtaactagcggattgaggatagttggccacactcatgtcaaaatcttcggctatggactgcaaccttggtgcaaaactttggtggcgcctgagcgtggactcgaaccatctgcatacgaggtatcaggtgagattattttaatgccattgccttcgttgtgaataaaatattaattattaatattaatttcatattgataacattagttgtaaatattttgaaaaaataataaattcatttgtaaaatcctcatatttttgcatagtatttgtgatttgttttctatttttacacaataaaacaaattttaatctaaagctttattgtatttagaactctctgtaaaatatataacaattttcaattatatgtacattttaaatttataagttatagccccatggtaaaactggataattttatgagtaaatatgtgaaaataaagttctgccatgatttcacatggggttggcccaatccttcactttttacgcacggacaggaaattaggcctttgtattccattttatatttcactctgcaagtgaagcaaaattcaccctggtgatcttcagttaataagatttgacaaccgatttctggtgaccaaacgcagcagactttggcattcatagtatctgtaaaattaaaaaattagtcttttattactattcaaatgcttcttataccgatatgcagtccgggtggaacgcaaacaccctctttattggttgtttttgggaattcaccttgtagacgacccaatcgcctataaaagtttccttcataacaactgaatcctgtctctttaatccgacacatttccgtattttccttcctacaatctaagcatctcccattttctattatagatacgtttttttcggcacaggtgatcaacagtctcccactgagtataataagaaaatatata

SEQ ID NO: 40796 - DNA, 1686 bp, DROSOPHILA
ccccccctcattctttgaatcctcgccaacgagccgctaacgttgctgacgaataccgaccccagaacaagaacagaatcaagatgttctccagcttctttgaaactgcccggaactcgccattccgcacccccatgtcgatggcaagatgcgatgccgccgccccagtggtggaaccccagccggttgagggtcgccagatcgccgccgccgctaccccggtggccaaccagcaggattcgtgcgaattcggcagcaccaagtacttcgctctgtgcggaattggtggcattctcagctgcggcaccacccacaccttcgtggtcccactggatctggtgaagtgccgtctgcaggtcgaccaggccaagtacaagaatctggtgcacggattcaaggtcaccgtggcggaggagggcgcccgcggactggctaagggctggttccccactctgctcggctactcggcacagggtctgtgcaagttcggtctgtacgagttgttcaaggtgaagtacgccgaaatcattggcgaggagaacgcctacctgtaccgcacctccttgtatctggctgcttccgcttcggccgagttcttcgccgatatcgctctggcgccgttcgaggccgccaaggtgaagatccagactattcccggatacgccaacaacttccgcgaggcagtgcccaagatgctaaaggaggagggcgtcaatgccttctacaagggtctggttcccctgtggatgcgacagatcccatacaccatgatgaagttcgcttgcttcgagcgcaccgtggagctgctctacaagtatgtggtgcccaagcctcgtgccgactgcaccaagggcgagcagctgatcgtgaccttcgccgctggctacatcgccggtgtgttctgtgccgtggtgtcgcatcccgctgatgtggtggtgtccaagctgaaccaggccaagggagctagcgccatcagcgtggccaagtcgctgggcttcagtggcatgtggaacggattgactcctcgtattatcatgatcggtaccctgaccgctctgcagtggttcatctacgatggtgtgaaggtcgccctgggcattccccgcccaccaccaccagagatgccagctagcctgaaggccaagcagcattaagtgggctagtccaattggttaccttaaggacagagttcactagttggagcgattgtgggcagacacaggagcaacatacttttactttctaacgaatttcggtttcagtatagcgaaaatgctttatacttgtttctcagcaagaatacattaatgttgcgtgtgtgccattgcacatgtacattccaaaacaacactttacgcatttctctaacacagcacttatacacacttttttataaacacatctttctaactttaaaagccaaacattctatcgtacgaaactaagctacactcaagttcaaagtattcaattccatatatattctgttatactatgtgctatatttaatcctatgtgtgtctagctttcgctggaaagtatgtccgtatgttgtacctttgatggccagccccttgttatctcctctccgctgcccccacaggccacacatgcgaatatgatattaatgctgtttcaattgtctgacccgatacccaagaaagcactctgaataaattaaattat

SEQ ID NO: 40797 - protein, 356 aa, DROSOPHILA; identical to SEQ ID NO: 26034

SEQ ID NO: 40798 - DNA, 11262 bp, DROSOPHILA
cttattaccatagcggccgcaagaccatacgcgtatttcgcaccgcggacactgaaatgatagccaactaccggctgcaggctgagcttacggcgatcaaaagcagcaaagatggacgcgctatagttttgggaactgtagacgggtgtatgtcggtgctggcgatcgtcgatccaaagaaagaggaaatgaatgagtacctgaacgacctgccctcccgcgacgagaactggaaggccaagttggccaaaatgaaggcccgggttggtttcaaggcggcaattcgtgtggccaccatttcctcacgttacgccaaaaccagcaagggaggagaggatggagaggaggagctgctcacagagattacggaggacattgtcgtgccagtggccgattaactcaattcgttaatttataaatataacatttattttcgcatatagttcatgaggatgttacaaaaatacgctgcgtttctactgtgtatgttatcctgcgtgtaatgcgtgctctcggcatcgaaataagtgtgtatgtgcgggtaaaactgaatgggtcttaaactaaaaaatggttaaggggtaagtgctatttggtaagaactacggttagctaatatgagtataaattagagtttttagcgcgcactgagcccaacgcttggcttgaaacaatttgaggggtgttgagagtgttgaaaacataaccagacataataataacaagaatcgatcctagtaggcgcgtgttgcaaaaacaatgacctttcaagtatacacaaacctttaacatgctactgcttttactgacaattcaaacaaaatagcgtaggcataaactaacaagctgtctaatggaacccggtctcagtcacagtcgccactttaatctcaactcagccaatcgaatcttattgaatcgcatacgaaacacaactcagtgctaatacatagaccgatcgtttgttattagtaaaattacaatacatagttggaggagacatagtaatagtgtaatctgttaattattgttactgttgttaacctgctttcgacactcactgctgcttctgttaccacacattattaccgtgaatatatatgtgccgatccgtaagcatacaactatgttaaataataaatgatttatgtagtttacgaggacttgctcgatcagtgtgttttgaggggtctcttttttcgtataattttaagctgccgcttgtctatagctaaggttttttttagctacgggaagcgcacagtttattgggcatgattctctttcttgatttgagccagctttgcctggagatgctgcaagcgatttggtgacatgtcccgcttctgattgaaataccccagttaatggttgtttattttttcgtttagcctactcacttctcgcttaatgagcgacgccttttgcgcgttcattccgttcaggcagaggttctcgtcaaccaccttattgtccagcatatgggatccatcgtctgctgaacgtgcagatgctagcttggcggcccctccggtcatatgatactgcaggcggtccatccagaaatcgggatcgggaccgttgttctggtagttgacatctgtgagataagaacgagtagctgctgcagttcgtcggatttaaacagtatagttagtatacgttagtataacaaattgggcgttagccgatctgtgtgacgctcttacccgtccgattatcctgtgtggatccagcgttctgattcctctcaatctcggctaaaccctcctcgatgtacttgtgaaatggggcactggagccttgcagaaaggtacttagatcgatatcaggattttgttgctaaaatgtttagaagtattgcctaaggtgcctcaataatcaattgaaatattttttgaaaacaaaccttaaagtcgtaaagtttctgcagaccttgctgtttggtatctctatctgagatcagcttaaagatctgtgatactgtatcatgtgtttggtgcgaaattcgcttggaggcaatctccttggccctctggggggaggcaccaattcctgaagcagagccatccttttggaaattctataaaaaaatagcgtttattttgtatttgagcattattataaaatttttttttaagaatttccaccttgagaatgcgtatcaaataagtatgtagctccgagtgtgttggaatctggttgagatgctgcagaatagcattccccttcacctttgccatgttatgcagaatggtcttaatcgtgcgcattggagtgtccgacggtcggttttgccaccaagtgctaggcagcgcgagcatgaactcgtgcacctcgagaattacggcgtcatagttcagctcgttgcttcgttcgggtagcatcttaacgttgcgccatatgcacttcatcagcaggtctgtaaacttcggcagctttgcctccggacaagtctcccgtaataggcgtatcaaagcactacgaagttttatattcaattaatatggtttaataaatagtaatatcaataatcttaccagtttaaattcgtaaaatctaccttgtccaacacttttagacatatgccattaataaccttgttatactgactatcatcacccacggccaacttcggatcagccataaggttcaacagcgccgacattagatttttgatgcaggccacgctcagcgttttgcccagaatgttggcatggaaaaatgtatacagaatggataatagcggctggtaaacaactacggattgagccgatggtatttgtgagagattctgataaaaagaaacaaaagaaaacaatatattaagattctgaagataactatataataaagtttattataccttaaactgtgcaagcacattctgaataaatatttcttcatagtcgcgcagcacagcctgcttctctggagcctcgatgatggcggcaagctcgttaatagccgcgcgcgcctttagagtgtccgtgctgcttacaccttttataacttttaccagctgcggatcgtgctttggcaaaacatccgccaaactgttagtataaaaaagaaacgttaaacagcggatgtgtgggataggcagatggagcacttactttggtatattgttctccagctgctgttgaggctgctggtgctgcaagcgcataggactgcgatacggggagactccactggtcattccagccgtggatgacggggacgtcgttaaagtctgctgcatatagtgttgtcgagaaatcagccgatcgaacttctcctgcgggtagtgaatgccggcccgcgtgggcctcaccttaataggctcgtccagcgatgagatatctacgttcagtagcggcttctgctccatttggtccactcggacccaatctttttcgatctcgctgattacctgcgagtccaagccgaatggtccgctgggcttctgttgctgggcctgctgttgtaactgttgaagctgttgctggagtagaagcagctgtgacgaaggtgcctggtcgaaagttctagataatcgaaacaaaagaaaatgtgaaataaattcgaacccaattaaaccgcatacacatagaaggacaacaaagaacaaaaaaagcaacgacaactttacaaacagcaagcaacacaaaaaaaactaaacaacacaagtataaagaaagccactttacgcctgtcgagtcagggagctcaagtaggcaaccacgtttgtggcgctccgatctgtcatgttgttctgcccacgcgcatttagttctcgctgcaaactaagttaataaaatataaataataacgaaaatcaacagaaacaaaccgaaatttataaaaataatatgctcatcttttggtacatccgagggaggaaactactaaccactaccgcatcttttgaaagtacaaaacaattgcacaaacggtagaagacaattaaccgaaaggaaacgaacctaccttgtcttcgtatgttttttacctcaggattaactatataacattgtggtgtaaagtttacataaatactacagcttgttttagaaatccaaaaataaaagctttcactcccaaacagagccataactacgaattctcgattaataggcacgcacattaaattgggcaactaaaattatacataggacgcacatcaacattttgtccgtgtcttgtggattattttattattgctatcccagaataatgacaacaccagtttccaaccctcggttgtacagggcactcgcaaaactttaagctagccttctcacttacccgtcctcatctggtggtggaagctcgtcgcaaccgttgcccacttcagcatcttcgatttcgatgctgtcatgtcgttgaggtgccggcacatcaacagatggcggtggcgtgggcttcttagtctttttggctcgcttgatgcgctcatctagcattgagaggtccttttcgttaagatggccaatcatcttgtaagtcttttccccggacaaaaagaagacctggacgatgcagttgagtgctgcgttgcgtacggaattatcccggtcggaaatctggcgagcaatctcgcgcaccgccgattggggacagatgttcatgccatagctttcaattaggaaggttaactcgtcaaggcactcagtacgctgacgggcattcttcgattttagaccctccatcacatagccaaagaccttgacgaaagggaagaccaatattacttgccgcagaacgcggcgtacgccatttcgaacagcatcctttggatctccgatctgggtgtgaaaaagaaagcttagaaaattgtaataccccctactatctggaacttgcctttaaaagcagatgtgggacaaaactgcttccctcgttctcggccagaatgtattcctcgtcaatgagtacctggaaaacctgtactagatattcgagacccttaatcaacacagaagggttcgtatcgtaaaatcgcagcgtcagccatttaagtattaggtccagattacacaccagcgccttactgttaccagccagatcttcgctcaactgctcgatgactttcaagtggtagcttcagggcaattcaagtaattatttaggtaatgcgaaagggacactacagggacttaccgaaaatcgtcgtggaacatgttggctatcagtgctttatttacgtttgcggtcatcatttggtcgcgtaacagttcggtgaattcctctcttggggttacaaaagtccactttagtaccttcattttttgctcgtctagcagccgctggtttttagcactgttggcgcacagtagcggcgatgtgtcgatatcttcgtcctttttgcgcgctggtacctgcttgtcttgtcctccggcaacccgggctgtagcactcttctggattccaggcgcaccacctgctccaccgccgcgcactgtttttagcttcggctcctcaggtattggagcctgatgcttgcctttgggcagcggttttaccggaagattaggacgcgctttttcgagtgctgcaagtatatcctttttggacgcgggcttctgtttgtccagagcgcggttcattgcatcaaatccaaggtgaatcataatgcccaacaccgcctcgttggcatttttccggacatcggcgtttcgatcgcagatgtgagcatataagtgcggcaccattgaatggatatcctccttcgatactgacttggggggaagaccaggcagcttatctgccagccaagcccacaattctgtctttagagctggggatcctcctttcagggcatcggctatcatttcgctctcaaaaaattccttatagccgcccttttcgccaaaactattgatgcaattgagggcagcggctcttacaaaactcttgttatcacccagagcgtgtaaaaagccagggaacaagttccgcacgtgatttcgacaaccagcccccatggctgtggcaagctgctcgcaaatggcaagtgtcgtttgggcaatcttagcattggaatctaccagacggtgggccagagcaggagccaagtcgccaatgctgggtttgattagccgcgcctctgaaataatagcctgcagcttagtcagaccctcgttgcgagttttccagtccttgtcggacatctccttcagcaatgcctccgtaatctgtggagcaatatcaacgcgtggtagaagatcagccatattaatgggctcctcttctccggctgccccaccatcatcgtcctcattgtctggggaattaccagcggttccaccgctgctacgttgaactcctctaacaggcttgggtggtttttcgcccacattcttgtcaaactctacctggatctgggactttagtgcaggcttctcgctgtcgaagaacatcattagagctttgcccatatacatagacatggtgcctaccatttgaatggcggaagcacgaaccgttggattcgtgctctgcacgccttttcgtacatcttcaataagtgtctttggctgcaattggaagccgaattctatgattgacctgttaacccagttaaaggcctctgattgcactttaggcgatttttgttcaaaagcaaagctcaatactttgcccacaacatactccagtttagtggcttcggcaaaggcagacaaaacatctgcagctgctgcaccattcttggcgtctgctagcttctcgattatttcgttaatcaccagatcaacggttgtcgtggtcagtggatagttttcagccacactgcggattatgtctagcttaaacttgagtacctggaaattcatttctttgaggcctggctttcgtccactgattgttcggatcaggatctgtgatatgccagcctgttttgcatcaaaaccgcttatttcgcccagaagctgttccacagcagcaaggcggttcttccagttggaatccaccagcccattaagaatttcggctggcagaatttcttcggatttttcttgcaattcctcgggggttatttcgcgttccgtggctaggggttttccacccgctttaagagctgcagttggggcagatgtagctcctcctccactaaccgtcgccggttttttcaagaccttacgtgcccctgtagtggccggtcgggttactggcttagggtccacactaccagccactgtcttagccggagcagcagctttcgcagtcggtgcagatgcaggtcgtgtctccttctttggacctgcaacctttattttaatctccgccttttcttggcactcctttatcttggccattttgagtggatcgacgtcggcgagcaaaggagtcaccgctttgtctcccattagctttattaaagtaccaagagcttcggcgctgctgtcgcgtacggttggatctggttcgttaagcgttttcactagactggtggtcagaagtttaagcagctttttgtttagcgcggttggttgggtgcgggttagggcacgggcaataaacaaggccgtttcggacttaacacttggatttttgttggacagggactctacaatggactcttgctgggcctctagagaagtggaggcgtatatggcatcaatagcttcacgcagcgctgtcacaacattaggtttcttctctttaaatttttccaacagggatgggacacaagcctgaaatagaagaacacatatgaaaacacgttatttggaagaaggtgagagttacttacggatgcgtaatttgagaatcgctttgccaatcctttggctagcaaggctagacattttccggccattgcaacgaggactacgttggagtccttggttataacctttttaagagcgcttaccagcgctccatactcgccattctctagcttggggtggtcagtgagcagtttctccaggacttccaacgattctttgcgcagagtccatttcttttcctccagcttatcgtagaagtccttgggcattttggagagaatgtcaacggggtctagaagatccataggatcgatttcttcaacgccagcctcgccatcatcctctgcatacgaaaaccaaaatcaaatcaataattcactgcttttgtaatatcgagggcttcataccattatatgcatcctcggtcgctgcagcatcggcgatcttcgcttgcttttcctgctgggactttagatatctaaaagtaagagcggtttagctaggcaatgatagagagaaatccttgaacacacctggagggttcaacgcgttcacctttgagtttgtcgaattcatcctccagctcctttagcgttacctgtggtagcgttgagatctgtgccttcattgcagctccgatccaacggtaaatctcaacagccagctgcttgccctcatctcggaccgtcttgtctcggtcagacattagcggagcaagctttttaattaacggcttgacgccgatcaccttgtgtccgaactcgcggagggccagtgtggtggctgccacgcaggcagacacaatcttagggttcttggcctccatacctttaaccagctcttcgacgacggcctcctgcttctctatctccacatacattagagccacttggacggagagctccttggttttggtctttggcgccgcaatgcacttctgaacgatgcctgtcatcacgtcgcctactgtgcgtcccgccagcccgctgttctccacaaaaatgagggccgcttctagacccttttcctgggccagagcattagagtccactaccatcttctttatgagccctgcaaatttagaccattccggcgacttctcgtcatccagctcgcgaaagatctttgcggcctcctcgtaaccatcgacgcgggctttccatagtttatggacacaccgctcctccaccggcaacttcttgtactctgtgtcctcggccattgtgtcgtgtttcgtacgctactcgggttctcctcaatggtctcagtcgcaaacagcctcaagcagcattctgcgaaacaaaaagataaatatgtataaaaaagctactttaatcgaatttttcttaaaagaaaaactagccaagcttccaatgaagcagaactattccggatgtcaggagtcatcgagctgatgttttaaaattgagcttaatagtctatgaaataccgatggccaaggaagcagaatcatccatccgtttcgctcgaggggcggaaaaaagtaaatgggtcggccatatttagattgtcgttttctaagtgcagttatttggcaaacagaagcagaaataggagagtgtaaatttggattttcggaaaaggttggtgggcttgtcacccaggatgggtgatatcatgtcgctgaatagcgcgttattttttcagtcaattaatcaggggcacggcaaataccccccgcacaaccactacaaaaggtgacacacgcacacgaaagcctgcgactgaatcaggcgtggattttccatcactcccatttattattcatgcatctgtctctttaatattgttttgatgcgctcctactgtgctcacgtttgagtagagcatttttcaattcggatatgcccgcgctttgtttcttcctctctcttgatttcgctctttcaagctctcacgcacaccgacgctctcaagttcgaattaacggatcataccgcaggcaacaacaaatgtttctcctgtgggctgtgtgtctggattatgccgtcgtttaccgttccacccaaccgccaatggttgcagcggctatcaatttccagtggctgcaacttgagagccgcagatgaagcacatatcgcccattttagcgacaaacaaattgcgacgccctggaacaaaatcgcgatgcatccgagtgcattccggtacacgcactagcacactcaccatcagaattgtgatccaagtaccgccgtagagcggggactgggcgaggagctgcgggacttacagctggccagggacagcggcttgaaagggctgcgcaatgcaataacttcgatttttcgcaggcgacgacgtaccaacacttacacacggcacaacacagaagcacgcacacttattcgacaaagacacaccgacggggtctttccgggatgccaagtaatgtagcaacaatgaacaataacttaactacgtttccagcacttcgagcctcttttgtgcagcggaatttacttggtttcgcggtaggtaaataaataataattttcgcagttttccaacagcgtcgttgcgccagtgtgaccgctactcacaactctagcatcccctaaaacctagaattagtgtgctgggtggaaaactttgataggtacgcgctaaattttaaacatatatttccaaatatttggccaacattgatttcaagcgattaccacaggcaaatatttatttgatgtttgggagcattcccgtgtagaacattaactaagagagatttgacattcagcataaaaaaagccaattgtataattgttatgttgtatttattgagccatcgctttcgatgcgcgtgatctccagaagatgaatagtgtgtccgcccataaactccagcagatccactcccgactccttgccaatgtcctccatgctgatgggtaaagcctgcagcttccacttcttgagcagcgcctctatggaccagtcggcgctccgctcctggtatgtaaatataaatttggccccggcatttcgctccagcagaaaagcaactgtgaccacgatatcctcgaacacgctgggatcgtagaagcagtctgctgcaatgataaggtccagaggcggcagtcggaacacgctgttcagcagcaggccccaactcaggcccaccacatcgatatcaacgcccggctgcagttgattggccaggcaggactttcggatatgggccagtgacttgggcagaatgcagttgtcagtaagtaccacttgggcgcggcatttggccgccagaatgccgggcagggcggtgccgcttcccagctccaggatgcgcttgcccgccagtgtctgtcggcgctcccacaggaagtgggctaaaattggtgcgcaaggccatgtgtagaaggagtaggcaccctgaagcagctgtaggcggacactttagatactacacgaacacctggttctaaggattacctcaggtattttgatctccagtcgctcggcgggtgatccgctgaagacaaacttgcggatatgctcggcagtggctgtggccgccacaatgtca

SEQ ID NO: 40799 - DNA, 6747 bp, DROSOPHILA
cgcaacgacgctgttggaaaactgcgaaaattattatttatttacctaccgcgaaaccaagtaaattccgctgcacaaaagaggctcgaagtgctggaaacgtagttaagttattgttcattgttgctacattacttggcatcccggaaagaccccgtcggtgtgtctttgtcgaataagtgtgcgtgcttctgtgttgtgccgtgtgtaagtgttggtacgtcgtcgcctgcgaaaaatcgaagttattgcattgcgcagccctttcaagccgctgtccctggccagctgtaagtcccgcagctcctcgcccagtccccgctctacggcggtacttggatcacaattctgatggaatgctgcttgaggctgtttgcgactgagaccattgaggagaacccgagtagcgtacgaaacacgacacaatggccgaggacacagagtacaagaagttgccggtggaggagcggtgtgtccataaactatggaaagcccgcgtcgatggttacgaggaggccgcaaagatctttcgcgagctggatgacgagaagtcgccggaatggtctaaatttgcagggctcataaagaagatggtagtggactctaatgctctggcccaggaaaagggtctagaagcggccctcatttttgtggagaacagcgggctggcgggacgcacagtaggcgacgtgatgacaggcatcgttcagaagtgcattgcggcgccaaagaccaaaaccaaggagctctccgtccaagtggctctaatgtatgtggagatagagaagcaggaggccgtcgtcgaagagctggttaaaggtatggaggccaagaaccctaagattgtgtctgcctgcgtggcagccaccacactggccctccgcgagttcggacacaaggtgatcggcgtcaagccgttaattaaaaagcttgctccgctaatgtctgaccgagacaagacggtccgagatgagggcaagcagctggctgttgagatttaccgttggatcggagctgcaatgaaggcacagatctcaacgctaccacaggtaacgctaaaggagctggaggatgaattcgacaaactcaaaggtgaacgcgttgaaccctccagatatctaaagtcccagcaggaaaagcaagcgaagatcgccgatgctgcagcgaccgaggatgcatataatgaggatgatggcgaggctggcgttgaagaaatcgatcctatggatcttctagaccccgttgacattctctccaaaatgcccaaggacttctacgataagctggaggaaaagaaatggactctgcgcaaagaatcgttggaagtcctggagaaactgctcactgaccaccccaagctagagaatggcgagtatggagcgctggtaagcgctcttaaaaaggttataaccaaggactccaacgtagtcctcgttgcaatggccggaaaatgtctagccttgctagccaaaggattggcaaagcgattctcaaattacgcatccgcttgtgtcccatccctgttggaaaaatttaaagagaagaaacctaatgttgtgacagcgctgcgtgaagctattgatgccatatacgcctccacttctctagaggcccagcaagagtccattgtagagtccctgtccaacaaaaatccaagtgttaagtccgaaacggccttgtttattgcccgtgccctaacccgcacccaaccaaccgcgctaaacaaaaagctgcttaaacttctgaccaccagtctagtgaaaacgcttaacgaaccagatccaaccgtacgcgacagcagcgccgaagctcttggtactttaataaagctaatgggagacaaagcggtgactcctttgctcgccgacgtcgatccactcaaaatggccaagataaaggagtgccaagaaaaggcggagattaaaataaaggttgcaggtccaaagaaggagacacgacctgcatctgcaccgactgcgaaagctgctgctccggctaagacagtggctggtagtgtggaccctaagccagtaacccgaccggccactacaggggcacgtaaggtcttgaaaaaaccggcgacggttagtggaggaggagctacatctgccccaactgcagctcttaaagcgggtggaaaacccctagccacggaacgcgaaataacccccgaggaattgcaagaaaaatccgaagaaattctgccagccgaaattcttaatgggctggtggattccaactggaagaaccgccttgctgctgtggaacagcttctgggcgaaataagcggttttgatgcaaaacaggctggcatatcacagatcctgatccgaacaatcagtggacgaaagccaggcctcaaagaaatgaatttccaggtactcaagtttaagctagacataatccgcagtgtggctgaaaactatccactgaccacgacaaccgttgatctggtgattaacgaaataatcgagaagctagcagacgccaagaatggtgcagcagctgcagatgttttgtctgcctttgccgaagccactaaactggagtatgttgtgggcaaagtattgagctttgcttttgaacaaaaatcgcctaaagtgcaatcagaggcctttaactgggttaacaggtcaatcatagaattcggcttccaattgcagccaaagacacttattgaagatgtacgaaaaggcgtgcagagcacgaatccaacggttcgtgcttccgccattcaaatggtaggcaccatgtctatgtatatgggcaaagctctaatgatgttcttcgacagcgagaagcctgcactaaagtcccagatccaggtagagtttgacaagaatgtgggcgaaaaaccacccaagcctgttagaggagttcaacgtagcagcggtggaaccgctggtaattccccagacaatgaggacgatgatggtggggcagccggagaagaggagcccattaatatggctgatcttctaccacgcgttgatattgctccacagattacggaggcattgctgaaggagatgtccgacaaggactggaaaactcgcaacgagggtctgactaagctgcaggctattatttcagaggcgcggctaatcaaacccagcattggcgacttggctcctgctctggcccaccgtctggtagattccaatgctaagattgcccaaacgacacttgccatttgcgagcagcttgccacagccatgggggctggttgtcgaaatcacgtgcggaacttgttccctggctttttacacgctctgggtgataacaagagttttgtaagagccgctgccctcaattgcatcaatagttttggcgaaaagggcggctataaggaattttttgagagcgaaatgatagccgatgccctgaaaggaggatccccagctctaaagacagaattgtgggcttggctggcagataagctgcctggtcttccccccaagtcagtatcgaaggaggatatccattcaatggtgccgcacttatatgctcacatctgcgatcgaaacgccgatgtccggaaaaatgccaacgaggcggtgttgggcattatgattcaccttggatttgatgcaatgaaccgcgctctggacaaacagaagcccgcgtccaaaaaggatatacttgcagcactcgaaaaagcgcgtcctaatcttccggtaaaaccgctgcccaaaggcaagcatcaggctccaatacctgaggagccgaagctaaaaacagtgcgcggcggtggagcaggtggtgcgcctggaatccagaagagtgctacagcccgggttgccggaggacaagacaagcaggtaccagcgcgcaaaaaggacgaagatatcgacacatcgccgctactgtgcgccaacagtgctaaaaaccagcggctgctagacgagcaaaaaatgaaggtactaaagtggacttttgtaaccccaagagaggaattcaccgaactgttacgcgaccaaatgatgaccgcaaacgtaaataaagcactgatagccaacatgttccacgacgattttcgctaccacttgaaagtcatcgagcagttgagcgaagatctggctggtaacagtaaggcgctggtgtgtaatctggacctaatacttaaatggctgacgctgcgattttacgatacgaacccttctgtgttgattaagggtctcgaatatctagtacaggttttccagatcggagatccaaaggatgctgttcgaaatggcgtacgccgcgttctgcggcaagtaatattggtcttccctttcgtcaaggtctttggctatgtgatggagggtctaaaatcgaagaatgcccgtcagcgtactgagtgccttgacgagttaaccttcctaattgaaagctatggcatgaacatctgtccccaatcggcggtgcgcgagattgctcgccagatttccgaccgggataattccgtacgcaacgcagcactcaactgcatcgtccaggtcttctttttgtccggggaaaagacttacaagatgattggccatcttaacgaaaaggacctctcaatgctagatgagcgcatcaagcgagccaaaaagactaagaagcccacgccaccgccatctgttgatgtgccggcacctcaacgacatgacagcatcgaaatcgaagatgctgaagtgggcaacggttgcgacgagcttccaccaccagatgaggacggaactttcgaccaggcaccttcgtcacagctgcttctactccagcaacagcttcaacagttacaacagcaggcccagcaacagaagcccagcggaccattcggcttggactcgcaggtaatcagcgagatcgaaaaagattgggtccgagtggaccaaatggagcagaagccgctactgaacgtagatatctcatcgctggacgagcctattaaggtgaggcccacgcgggccggcattcactacccgcaggagaagttcgatcggctgatttctcgacaacactatatgcagcagactttaacgacgtccccgtcatccacggctggaatgaccagtggagtctccccgtatcgcagtcctatgcgcttgcagcaccagcagcctcaacagcagctggagaacaatataccaaatttggcggatgttttgccaaagcacgatccgcagctggtaaaagttataaaaggtgtaagcagcacggacactctaaaggcgcgcgcggctattaacgagcttgccgccatcatcgaggctccagagaagcaggctgtgctgcgcgactatgaagaaatatttattcagaatgtgcttgcacagtttaagaatctctcacaaataccatcggctcaatccgtagttgtttaccagccgctattatccattctgtatacatttttccatgccaacattctgggcaaaacgctgagcgtggcctgcatcaaaaatctaatgtcggcgctgttgaaccttatggctgatccgaagttggccgtgggtgatgatagtcagtataacaaggttattaatggcatatgtctaaaagtgttggacaaggtagattttacgaatttaaactgtgctttgatacgcctattacgggagacttgtccggaggcaaagctgccgaagtttacagacctgctgatgaagtgcatatggcgcaacgttaagatgctacccgaacgaagcaacgagctgaactatgacgccgtaattctcgaggtgcacgagttcatgctcgcgctgcctagcacttggtggcaaaaccgaccgtcggacactccaatgcgcacgattaagaccattctgcataacatggcaaaggtgaaggggaatgctattctgcagcatctcaaccagattccaacacactcggagctacatacttatttgatacgcattctcaagaatttccaaaaggatggctctgcttcaggaattggtgcctccccccagagggccaaggagattgcctccaagcgaatttcgcaccaaacacatgatacagtatcacagatctttaagctgatctcagatagagataccaaacagcaaggtctgcagaaactttacgactttaagcaacaaaatcctgatatcgatctaagtacctttctgcaaggctccagtgccccatttcacaagtacatcgaggagggtttagccgagattgagaggaatcagaacgctggatccacacaggataatcggacggatgtcaactaccagaacaacggtcccgatcccgatttctggatggaccgcctgcagtatcatatgaccggaggggccgccaagctagcatctgcacgttcagcagacgatggatcccatatgctggacaataaggtggttgacgagaacctctgcctgaacggaatgaacgcgcaaaaggcgtcgctcattaagcgagaaaagcgggacatgtcaccaaatcgcttgcagcatctccaggcaaagctggctcaaatcaagaaagagaatcatgcccaataaactgtgcgcttcccgtagctaaaaaaaaccttagctatagacaagcggcagcttaaaattatacgaaaaaagagacccctcaaaacacactgatcgagcaagtcctcgtaaactacataaatcatttattatttaacatagttgtatgcttacggatcggcacatatatattcacggtaataatgtgtggtaacagaagcagcagtgagtgtcgaaagcaggttaacaacagtaacaataattaacagattacactattactatg

SEQ ID NO: 40800 - protein, 2018 aa, DROSOPHILA
MAEDTEYKKLPVEERCVHKLWKARVDGYEEAAKIFRELDDEKSPEWSKFAGLIKKMVVDSNALAQEKGLEAALIFVENSGLAGRTVGDVMTGIVQKCIAAPKTKTKELSVQVALMYVEIEKQEAVVEELVKGMEAKNPKIVSACVAATTLALREFGHKVIGVKPLIKKLAPLMSDRDKTVRDEGKQLAVEIYRWIGAAMKAQISTLPQVTLKELEDEFDKLKGERVEPSRYLKSQQEKQAKIADAAATEDAYNEDDGEAGVEEIDPMDLLDPVDILSKMPKDFYDKLEEKKWTLRKESLEVLEKLLTDHPKLENGEYGALVSALKKVITKDSNVVLVAMAGKCLALLAKGLAKRFSNYASACVPSLLEKFKEKKPNVVTALREAIDAIYASTSLEAQQESIVESLSNKNPSVKSETALFIARALTRTQPTALNKKLLKLLTTSLVKTLNEPDPTVRDSSAEALGTLIKLMGDKAVTPLLADVDPLKMAKIKECQEKAEIKIKVAGPKKETRPASAPTAKAAAPAKTVAGSVDPKPVTRPATTGARKVLKKPATVSGGGATSAPTAALKAGGKPLATEREITPEELQEKSEEILPAEILNGLVDSNWKNRLAAVEQLLGEISGFDAKQAGISQILIRTISGRKPGLKEMNFQVLKFKLDIIRSVAENYPLTTTTVDLVINEIIEKLADAKNGAAAADVLSAFAEATKLEYVVGKVLSFAFEQKSPKVQSEAFNWVNRSIIEFGFQLQPKTLIEDVRKGVQSTNPTVRASAIQMVGTMSMYMGKALMMFFDSEKPALKSQIQVEFDKNVGEKPPKPVRGVQRSSGGTAGNSPDNEDDDGGAAGEEEPINMADLLPRVDIAPQITEALLKEMSDKDWKTRNEGLTKLQAIISEARLIKPSIGDLAPALAHRLVDSNAKIAQTTLAICEQLATAMGAGCRNHVRNLFPGFLHALGDNKSFVRAAALNCINSFGEKGGYKEFFESEMIADALKGGSPALKTELWAWLADKLPGLPPKSVSKEDIHSMVPHLYAHICDRNADVRKNANEAVLGIMIHLGFDAMNRALDKQKPASKKDILAALEKARPNLPVKPLPKGKHQAPIPEEPKLKTVRGGGAGGAPGIQKSATARVAGGQDKQVPARKKDEDIDTSPLLCANSAKNQRLLDEQKMKVLKWTFVTPREEFTELLRDQMMTANVNKALIANMFHDDFRYHLKVIEQLSEDLAGNSKALVCNLDLILKWLTLRFYDTNPSVLIKGLEYLVQVFQIGDPKDAVRNGVRRVLRQVILVFPFVKVFGYVMEGLKSKNARQRTECLDELTFLIESYGMNICPQSAVREIARQISDRDNSVRNAALNCIVQVFFLSGEKTYKMIGHLNEKDLSMLDERIKRAKKTKKPTPPPSVDVPAPQRHDSIEIEDAEVGNGCDELPPPDEDGTFDQAPSSQLLLLQQQLQQLQQQAQQQKPSGPFGLDSQVISEIEKDWVRVDQMEQKPLLNVDISSLDEPIKVRPTRAGIHYPQEKFDRLISRQHYMQQTLTTSPSSTAGMTSGVSPYRSPMRLQHQQPQQQLENNIPNLADVLPKHDPQLVKVIKGVSSTDTLKARAAINELAAIIEAPEKQAVLRDYEEIFIQNVLAQFKNLSQIPSAQSVVVYQPLLSILYTFFHANILGKTLSVACIKNLMSALLNLMADPKLAVGDDSQYNKVINGICLKVLDKVDFTNLNCALIRLLRETCPEAKLPKFTDLLMKCIWRNVKMLPERSNELNYDAVILEVHEFMLALPSTWWQNRPSDTPMRTIKTILHNMAKVKGNAILQHLNQIPTHSELHTYLIRILKNFQKDGSASGIGASPQRAKEIASKRISHQTHDTVSQIFKLISDRDTKQQGLQKLYDFKQQNPDIDLSTFLQGSSAPFHKYIEEGLAEIERNQNAGSTQDNRTDVNYQNNGPDPDFWMDRLQYHMTGGAAKLASARSADDGSHMLDNKVVDENLCLNGMNAQKASLIKREKRDMSPNRLQHLQAKLAQIKKENHAQ

SEQ ID NO: 40801 - DNA, 33632 bp, DROSOPHILA
cattattgttattcataaaaaggtttatgcgcatgttttttggttggactcatattaggcgtggtcaaagcttgaaacaaaattgcactctaaattagattttttattataggcttgttaaattcagcctggataggctgaattgttcaaaagtgtgggagtgatcgttttgccatgcccactctaaccgcccaaaactgccacgcccaaattttgtaaaatttttcgaaatttttacataatcttgttagtcttgtaagtttccatcggtttgccaaaaaactaactttagccacacccactctaacgccccaaagctaccatttttttctcattttatttcccaatatcgatatcccagaaaaatgatgaaatttctgctttgcattctatctatctgagtaacgggtacctgaaagtcggggaactcgattatagcattctctcttatttttgtttaaaatttgcgtgtcccttgttcattgagaaagatgtacatatgtacatacttgtgtcctcttcaatttgcagtaattttctatgctcatccttcaacagtaattgaaaagctttatctcagcgatcttctataaaaacatacgaactccaatagaaaatgctttttagtctcactcacctcacgcaattcacatagtaatcttaacttaatacatacatatatattactgtacagtcgtgggaattggcaacttcataattagcgtcgaattcacagccgtgaagacgtctgtcaaaaccggctagcatgcggctgacgcatttgtcccaaacacttgtttaaaacaccagcagctgcaaggaagccgacgccaatttaggggttgtttccctacgtcgtagtcagttggttctcttagccatttgtctctttgccgttggctgacgacttgccgccttcaagtttgtttcagtttcaatttgaccgtcgaatgcagagaacgtcggtacaccgctcttgctattgctatcggccagctaaaacaaaaacgacctgaagccataaaaacgcgtgtgaatgagaggccaacgaaatatccatagcataagtgaacagtgagccagtgagcgctttaaatagaaaacgcgaaatagtcaactcgatggaacgcaagtgtaggaaataaatcgccgtctagattattatagcaaaattgccaaaataaccacttgtgagccaaagtgacacaatgtgaagagcaaacgaaaatataaaaataaattaaaaaacaaataaataaatgcaatagggttaacttaaacatcacaggggaaggattatcaaaggccctgatccaaaataaaacggtataacctaaatatcataatcatgcataccataatacaaactactaggttatgtgcttgcaacaagtagtaagcgcccaaaaaaaatgtaataatttgtccgagaaataatattggaaagcacttttaaatgagcaagcgctcaaatattggttgcaaaaatatataaaatcttttatacctatatgtatatttatatataagagtggatatacgcgaacttttgtgcacacatatagaaattttcgtacattgagtgtacgcgcacaaatacatacatatttacacatgtgtgtgtgcatacatacatctatacagcagtgccggcagaaaagagtcgggctaaaagaaattatatcactgcccgaatccgtttttagaaatagtttgcaatgaattttcgttgctttatattgtcgatgtataaatgcacatatatctttacgtatatattaaacaacatacatatgtacatatggaagaagccagctaatataaaagcgcacacatggcgtttaagtaaaagagactaaaactatatttttaaaactcatgggctaataaggttagcagtgtttcttaaaccttaacaaggacattgattttttacttattatcaagccgagcaacgattttaatactttgaagcctattagattaaaatttaatatttaaacgaaacaattatttaaaaacaaaatttaaaacaatcggttacctaacagaatacaaattttttaaggataggcttaatgtgtcaataaattcttactgttatccgaatgaacagagggaaattcaatacaaacttttggtgaaatacgaaagtacgttgtgcttttaggacggcctatttaccaaaacatatgacttgccattggttaaagtcacattcttcccttaaatggcttatctatcacttcaatactacatttgttaaaccggttaatcgtagagtaaaagattctactagattcgttgagatgcatgtaacaagcagatggaagtcttttcgaccctccaaatgatatatattcttgatcagtatcactaaccaaatggacctagttaagtcagtacctagaagataagaactgatataaagcatgcagattctagagacggatgaaattgtttgtttgggaggcttgcgacgctgcgcaagtttccgtctaattgttaccacgcccactctaacgaccaaagccgaccaaaactgtaacgcccaaacttttgataatgttttaatatttttccatttttgtatacgttttataaatttccaacgatatgccaacaaaattttgccaggcccactctaacgcctacaaaccacccaaaactgccacgcccacacttttgaacaatttttatttcattattttttttcacattttctatcactattgcaaacaaactttaaatttttcgttcaagctgcgagttgaattacgggtatctgttagttgggtctattgtctttgtcaaatttgatcgatattgcacatatcctgttccacccataataatggcgttctctttttgaattattcgtatagcagctaaatgagatagtgtttcgatccgacccttttcgatttatatactatctgccaaagaaaaaaaggtttatggatatcgatactatttatcatagcaaatatacgtgaccaaaatgttgtggctaatcaatagcaagacaaaaagaaaacacaacaacaactttttaaaatctttcgacgtggcagtggtgggcgttagagctttctagcttttataattcctgaaatctcgacgttcatacggacggacaggcaggtggacgcacagacggatggacattgtcagaaccactcggctaatggaccttgatttagaataattgtactaaatataagccgaaatttttccgtttgcctgttatatacatatacttttcaacctcctctagggtagtgtatagctgaaacgccataatcaagtctctcgactattagatgccttcccttagcaaaagagaatgcgaaatagattgatatattctagttggaaaggaactgtcctagactggacaggtgcacagcagcggttgcatttattgctttcgactttaaatacaaacttctgaagtaaggggttattcggacaatttgagtatatgatgatttaaacagctcaaagaaagctgggttcggaaaaatcgaatttttgaaatttaaaagctggaatcgtttgcccatgtttgcccaccaattagttttttttgcccacgtccagtttttgagatatgaattttcgaaaaaactgttctttgtaagaaactttgcttttggcgccacaacttatagttattacatacatatacaactttagttttaataggtgaaaaatcgaaaaaaccattattaaggggtgggcaatcaaaattatttatttttaagggtgggtaaacgaaaaaaaaacaaattttaaagggtgggtaaacgaaataatttatttttaaagggtgggtaaacgttaaaaactgattttaaaggatgggcaatcgaaattatttagtcttaagagtgggcaaacgttaaaaacaaattttaaatggtgggcaagcgaaataatttatttttaaagtgtggacaaacgtttttattgcaaatttttattttaaagaggtgggctaacgaaattggttatattttaagtgttggcaatcgaaaaaaatttaaaaattaaaaaaaaatttttgaaaaaagtgaaatttttgattttcgaatatttttgcacttttggaaaattcatatttcaaaaactggacgtgggcaaaaaatactaattggtgggcaaacatgggcagaaaatggacaaacgattccagcttttaaatttcaaaaattcgatttttccgaacccagcttctttgagctgatttaaacatgtttacttccatgtctctataggggtttgtattttgtggcgtcacatacaatagatcgaataattatcaaaagtatgagagttgcaatcctctcagtaaatcttgcgctttgtaattgtcactaaaatctgttcgcttagtctaaactttatagttcatataaagttcccgatatctcgaagttcctacggacacacaataacatttatgctatcttgtttacttactacaatatttatgtatctatctaaccagtcgtggtactctactatatcgatattttttttcttatataagcaaatgtaacgtaccaaaaactactactaacactatttcttcttccttttttttcagaattaaaaaaaaaacgattgtttattatttatggtaaaataatacaccgtagtaatttttcaagaacagtcaaatttggaaagaatgaaatatataaagaaattatgactgacaacggttttgaattaaagtgaaaagtgatattgatgcactaaagcagcactcggaaaacatcaacgaggcaacatacaaaattaaagttttaaaaattcttaaaagaaaattttgcggtaaagtgacttaacaattaacggtatgggaaacatggcgctgaggcaatcagcaaaggatgttgccaagtcgaattgcgtcgcagtgagaagttcaatatccctatcgctggtactggtgctttgcttagcgctagttgatagctccactgcacaagttggtaagtctttaaaagtattaataccgaaacaccaatcatatgatcctaggaaaaaatttaaaaacttttcaaaagtatgggggtcacctatttggtccttttgtagttgttaggacggcgtggccaaattgtttttggtttaccgatagaaattggcaaggcaaataataaagcgaagagaagtttaaacatttttcaaatgtgtgagcggttttttgtttgacaaatgatatcaaaacatttttcaaaattgtgggcgtggcagatttaggcgctttgtgggcgttgctctgcgctaatgtctctagaacctgtatgcttaatctttctagcttcaatagtttctgagaactctgcgctcatacgaacgggcatggtcagtttgactcggctattgatcttgatcaagaatatatataatttatatagtcggtaacgcttctgtctgttacatgcttttcaacgaatctggtatacccttttactttacgagtaacgggtataaaaataccacctccattacattacattattttcagtttctcttcactgctttccttcgcattcatgggaagcgcatctgcggaatgcttacaacatttgaatataaaattttcccacatttgagaagacgctcactctagaacaccatggttggttgcatgagaaaaggaatttttcgaaagtcgcaacttaactatgggaagtatttttccacgcgatatgcaatcgtttaggaaccttaaaaaaggcaaaagaagaaatcttgatgcgattgttaaaacggaaaaaacggatcgaatgttattactacaacgaaaaattaggattttggggcgctgttcataaaaaaaattttttgttcatttgtttgcttaaaaagcaccggggtaatttttgtcgtggcagcttaaatagaggtattctgatattattaaccgcgacttaaggtcgcgtgctatattctatctttttttgagcagtcgattgagtcatgtcaatctatccaatcaatctgttaacgtcgatgaataaaataaaacaagaaagcaagctagagtcgacaaaaacttacatatgcacctttgcaattataacatttagtcaaaataggtaaatatattggaattaatttgcccactgttcctatgagatcatatcatagcatcaaatacatagtattttctcaaatttaaaacaacatttttgaactttattagccagtttcgaaattccaaaaaaatgtggaagattctccctcttactctcactagctgaggtatctaactgtccgataatcgaagaactcgactagggcgttctcttttgctagttttctagataaaaggtgttttggtttgaaatataatccatgtggattttaaaattttaatttccgtttaatcccggtaacattataggaaatggcgggaaaaccactggatttagattacatttaaggttgggattacatcttcgctggggatgaatattttttgttaactattattcgccaggtaacatccacgctcggctagatgcgttggcctgtaaaataatgtttgcattttatgttggccctattaatttggtcctcgacattttaaaatgattaggatcaccagttacgcacacattcttgaaaaatgtgtttatattttttcacatttaaatcttttctacaactcttgaaaaattgtatctattatctatctatctttttctataaacaatttttgccacgtccattctaacgcccgtaagccgccaaaccggtcacgcccacacttttgaacaatttttaatattcacactagctgagtaacgggtatctgatagtcgggaagctagactatagcattctctcttgtttttcggtggtttgttggcgttacactggtcgtagcagaaagttttttggaaaatcgataaaaatttatgagaataatataaaagtgaaaaaatatcaaaacattttgaaaacgtgtgggcgtggcagtttcctggcccttagagtgaatcaacaaacttgcgctgggcggacggacggacggaaagacggacatggatcgtctccgcagttgatcctgatcaagaatatatgctctttatatagtcggaaacgctttattctagtatattctttttattccacgaataacgagtatagaaagtaacaaaagaacagaatcgcatagggtcaatattttcataaatattatactctttatttaagtaacttataccttttgaacattttttcatattttattccccaatatctatcgatatacaggaagaaattttaaattttgcgttcgcattcacactagctgagtaacgcgtatctgatagtcggggaactagaatatagcattctatcttgttttggatttacgttttgcgtgctgatctaatgtcgatggcgttctatggttttttttcaaatttccactgcgctgccaatattaatataattgttggtggtagttgtgctcatggccaagcgtggcctgtaccaactccggaattctgccaagaggttgggcgccggaacagttttcgccttgaaattctctttgatggtgcttaaaatgaccgatttctttcgaggtgccctcagtggccttgccaatatggcgcttttcacctttcgcactccaaggccctctgctatcaagaaaatctgatcagcctaaccgagcctaaagccctcccaaccaacaacataccccctgcgcgatattcaaaaccaccaacttgacactcaattttctagacactgcctttaaatttctttatatctatgtgtctgcctgtagccagggtaccaccttataatcctttggtggacgccagggattccactactccgccattctggtcaacaggggcgcgaactatggccactcaatccaatctctctcccgacaccgccgccgatttttctgcccgcagcatgttgctgaaacatatgttgcggacttatgtcccggacttatcgctacgttacaatccgtgttgctagcaattaatttccaaatactttgatggtactaacgcccttacaaatctcccctaccgaaatcagcgtggggaacgcgagagaaccaggactgataccgcgattagccagttatttccgtatgaccttggcgtggcatttgcccagaaatttgccctaagtcgtagtaggcgagccatcaaaaatctgggaccaaacttggcactgtaggcttctgcaaacttactttgcttgaaatttctgcgaaatactctttggccttcaacaaagcttgccactgtagtacgaagaatatattttcgctcgtttttctcatactgttgctacatgactacctgggctcgactgcgcactatttcagcgagtccttttggtctaggttcattgaataatcttctataagatcctctttccgcagcagggagtatgtagctccagaggttatcatatgctgaacaaaggccatataatatatataacatatatgcgacaggtatttgtccgcgagctcaaatcggtctgagacattaaccatttgaacgaagcgtggtccgtggtccgtccatgaccctcaacgtatgccatgaatttttcaagaacacaatagctgttaaacattcttgctcacttactgagtaattttgttgtgccttaatgaggtttttttttttttgaccaaaaggcgataggacatatatgtccttgctcaggcaactgaactatgacccctctaacaccagttttgctggcatcaaagtgtatgataaaatgtttcgaaaaatctccacttttgagaacaggagctttgcttaattataccctttactcgtaaaataaaagggtatactaaattcgttgaaaaccatgtaacaggcagaagcgtttctgactagaaatcgaactagccatgaccgtctgcccgtatgaacatctcgattttaggacctataaaagttataaggttgagactaagcatacagattctagagacatagacatgacccatgttgccacgcccaatcttacgccctaaaaccgcacaatactgcctcttttgaacaatttgtgaatgttttttcatgattttattagttttgtaaatttctatcgatttgcaaaaaaaaacttttgaatttttcttcgttttattgtttgtcttgcaaaattttgtcggtttaccaaaaacactgtggcgcagctccattgacctacaaaacgcccaaaacggtcacgcccaaactttttaaaaatcttcaaatattttctcatattatttcccaataccgatatcccagaaaaatgataaaatttcgcgttcgcatttacactagcttagtaacgggtatctgatagtcggaaaactcgactatagcaatctcccttgacttgtcttctatttttaaaaccgcttcgacaccgtttataaatgtaaacaaatcaataggcagacaaaatgaatgtccgtaccttatggctttaatttatttaatgagactcccttacagcattttcattatctggggatctaataagcatgagctcgaaatagatcctttcaaatatcgtaatcttataataatataatatataatataataaaataaactacatatatcttgttaaataaatataaaccataaatgggactcaaataatatggagattaaagtgaaccctaatcatatttaccttctgatattgtaaaaccaattacatagactgctgctttagagatgcgtattattttgtaaatttgttattttgtcgctcatcttgtgtggtgttttatgtaaaaacaagtgtttcttatgaacgcatgtctatgtcaaagatataatattgttgttgtatttttttagataccaccattagtcagcaagaaagtcaatcagttgttctaccctgccccgtcgatgcagaaaagtgcggaaaactccactcactaaattggtttaagggcgatgatcgcattgctgcaatgcttcttggagatagtaatgtcacaagtgttaataaagagttcgacgaaaggtatgtaaacgtattaaaaacaacggtagatctatgttaatctttttttatctctttagggtaactgtggagcaaaacccatacagactagtaattaaggacttaaaaatagctgatgaagatatttatctttgtgatactacattttttataccagaagaaacttgtgataactttaatggatatcgaatagaattgagagtcttaggtaaacaaatcaaataaactatatatgtattacgtttgttatcattataaccaaactgcatggcaaatgagctttatgataattttaattttgtgtgtacatgtatatattgattgagatactttgcagtactaccttacgacattgaatcgaattatttcagccgaaagaatcttcaatgttgcttaaccacatgtgatgcttaaataaatagacatgtcctacgaatcatctcatcccattttcaaacagagagagatcgtttcagagagtgatagtcggtgagagcagtatgctctgcccgcgtagaggaccaatgcacaatgaagaacttgaccttcttggcataaatcaatatcgcataaactaaaatgtaatctacatatttaaacgttaaaacgaagtcatttccatataccttttcacaatcaggatcatctgacaaattagtgacttcaagaatgcgcctgcttaaattcagagatgaaaataatgggttcagaagtttccaatccaacaatcacatctgtaatgtggaaattcgatatagttatgtcttatgtctggattctgcaccctctttttttggagtgaatcagaatcttataaatggtcgctgtcattggaagccagggaagcttgtcgctaattagttgcccggttttatggcacagcttgatacttatccaggtctattggcatgtttataggatttggatatcaacgccagtcataaagacgtggaagttgttgaacgcttcgcaagcagtatttccaaaatttgtgccaccgaatccttcttgttttgacttgtcaaccctaagcgaaagctctttgtgataataattactgaatgaccttttacacccgttgctcgtagattaaaaaggtatacgatattcgttgaaactcatgtagccggcagaaagaagcgtttccgaccatggaagttacatattcttgatcaggatcaataaccgagttgatctggccctgtccgtctgtccatccgtataaacgtcgagatctcatgaactataaaagcttgaaggttgagattaagaactcagatgctagaaacatggacgcagcgcctatgccaattttccacgcccactctaacgcccactaagatcccaaaagtgatacgacctcacttttgaaaaatgttcgatttcgggaaattcgactatagcattctctcttgtttctctctgtaaccgcggtgttatagacgggactccccattttttcaccgatttgatatccagcatgtagtaaaaatgtacaaaattatatccagcaatgtagtggacttacacaatctttcgaagtaaattcaaactaaattgccttccgtccatgtcgggtattttgttgaaaacatatccagctttctgttgcatgttttctatttatgcaacatattgacatgaaatgaattggaaaatttcattcagtttttcacgagaaattgcgggcgccacatttctacctaaaaattgaataatagcgaaaagttgataaaaagtcgttccgaataggtaattaaccactacaacaatatggactaatacacagatgtcaacaaattttaaaaactctatttaaaattgaaatatgattttgaaagttggacgaggacatccctagctaagttcacaaattgttaaattgttttggccttttggtggaacagatatgcatttaagtaggcactttgcagttgttttttaacatttgaatgtttatttaacatttcagttacataacattaagctttggcttattaaaaccacatcatagcccaaagaaaacaaaacaggtcggattccccacagtgtaatgcgagacaatttctaggagtcaaaacctgtgaaactgcgaagtagcttaagtttagttagttttctgtctgttaacttactttacttgcttaatactcacctgcatgtaaaaatagtttaattttctgggagttcggattatgaaacattctttactgaaaagaaatctaacaacgaaaaaactatcgaattatacttgaaagttttgttttttacttcgcgtaatattctttaagttgcttgtcctataaagtgtaatgtgcatataaaactagactggttcttgttttaaatatatcctagtctgagaagtgaccaaattccacacagctgatgcaattatcaaagaatagaatatattcactttaaagcttatttttcccacatttcctttagctgtgtaaggggttgcttttaaagcatatgtatagaggtagaaacagcacctttaagtactcaggtgctattcttagcagtatacgcttttccatttacctttgattgctagaagaagatatgtcttggcacttatattgagtaaactttttttcttttgtgatttctgcttaaacaaaaactggatttctttcttttcggctagtagttgaaaatctacctttacatttctatattttaaccattctctttctctttctctcattaaaaacaacacatgcgaccaatttcataatcatttaatatatacacacttcttttaacaaacgaaaactataaaaaaaaacccaccgtcgacatggaaaattataataaaaataaccctctactgcaataataaaaaacatgtttccttgcccggcgttataattgattaaatactattttatttgcaaaatcccctaatccttaattccgcctaaatatgttgtatttattaatattttattaatatatctgcgtgataaaaatatagaaaacattggtaaaaataataattaaatacttaaatatatataatgtgttttagctactgtagctaagacggaaaagctcccattaaaagttcgttagaattaatatatatttttggttcggtttttagaattttttatgttttttgtttttaaaaataaatattcagaagtgaaacgaataattttgaatcacagtttgcatttatttatatttaagttaaaggatagttttattttatacacgatttatttaaaatcacatttaaacatgtttatccatttaaaattttaccgtactcacacacaaacatcacaaaaacggcaccaattttaatatgttggataataaactcacgcattcagtgccacccactgaggttgttatcctggatgcaaaaggagatcgaatcaagaacggcagtgtagtggggcccatgcaggaacgccagtccctcaaagctacatgtactgtaaggaacacccgacctcaacctgaagtgagctggtttcgcggaacaaagcgtttgacaacttgtaagtattatattaatgtaccataatgaaaattagtagagaagtttacaatacaaatatgactacgatacaaggcaagaggcaaggattcctttctgtccgaattgaaaactaaaatggttggaaacataaaaaaggtgtgtgaatccatgaaacaaaaattgtcaaaaaattgagctattcgataaagttaaatgctacgttaaatggaatttatatgtttggaaaggttgaaattaacagtaattgctcatcccctctggggggatgttcttgtttcttctgaaacaggatcgctagcctaggtaattaagaaatattcgtctaacaattactgtcgactgccgaagtaggcaagctattttacacttcataaacttaaaactatcttgttatgcttctttttgatttatttagactcccccactcatgacttagtcgatggtctttatacgtcaacactggagttggattggacattgtctcgcgaagatcttgctcaggatattgagtgtcgtgtgaaatctgcagcaatacaaaatgttactgtaactaagtttagcgtggatctacaaggtactttaataatgcctacaaattccacccgagtccaacgattactgttgtatgcctaagtaatatgcggattcttggaatacggaataagaatcaaattttgtttatattgtaaacataatttgttttttatttattcaacagttcgcccaactagcattgacattaatggcgtaaaacatcacacagtacaaggcagcaaagtggttttaacatgtgacgtaagttttgaaaagtaatgagaacgtataaagggtattataaaggcaaaaatgatcagaggaatggatcaaaattctgtaaaaaaaattcagaacaatcgaatggtggtttggcagtgccgtcattcaccttagtctattcaaaattaagctcataataaaaatacgctctttagttataataccgatacattaaaataaaatgtattcaaatgcctcgtgaaagctcttatagattcgtaaaactagatcttaatacagacggatcaatgaaaggaaagcaaacagaaatgctgttttccataacaacaggcatattttcaaatttctatcaatttctctcgaaagttttgagcaataaaaggaacctcacctagacggacgtcctctatctctgacttgctctgatctaattcacactcacattagccgagcactaggtattgcaaagtccaaaataaactattcacttagttttttttatcaccaataaacaaataagtcctgcggtagtttttatgaatttggtgttacctgtaaacgactttaaagcacagatcaatgaggcacgagtaattgaaattaaagggtttacaggattcgttgaaaagaatttaaccgcaacgattccaactgtatatctctatttggtcatgtccttctgttcgtatgaaagccttaatatcaggaactatatattctaacaatttcaaataaacctttgaaacgcctcttctaacgcccacaaatcaccctattgaataatttttgctaattttttttcccatatttctaccgaaatgggtatctcgactacagcgttcttttctttttatctatgttttatttaaagaacatcaagagtaattttgtaaataacgtaaaacacttttaactttttatagattcacggcgctcgaccggcagtaaatcttacttggtataatacaaccaccataataagctctggcgaaaatgaaataactgaagttcggtctaaatcggtaaaaattatgttgtaaaatcgacatagatagtttattagcaatgtttttttcatagctcgaaaaaagcgatggcacctttcacactcaatccgaactaatttttaatgccactcggtttgaaaatgatcgcgtatttcgctgtgaagctgaaaatattgttctgcaaattaatcgcgaaaaaccaatttcatcagcgctcacgttggaagtcctatgtaagtatacaacattaaaatgtataattaatatgctatttataagatatatgtgtaaatatgtatttattgaaactatcacgcctatactggatccttggattaatttgtacattatttgaacttaacataatattcttttcttctacaacagatccccccgtagtcaaagtcagtccatctgctataactgccaatacaagtgaaatagttcttcttaattgtgaatactttgcgaacccagcttctctgactcaagttgaatggtaagtaagctccgtctgtataagcggagagatcatgaattccaagagagctagcagattgtaacttagtacctaaggttcatagtaaactcatttacaatgtaattttaaaagttcattgtcatcggcaatcatttcaacttgaatatcacctatctatatcttaagtcgttttaaagccttgcagagggtagaatttatatatactatatacactatatataattgcggttttaaatgatgttaaattaatcagaatattccgaatattcattttaaatatgttcttgatcataaagtgttattaatactgaaagggtatatatactttaacttgccgaaccaagcttactttcttattttatttaatatatttcaagctgctttttactttctttttacttgacatgtaatttaatccaaaaaaaaaaaaaaaaatacaaataatctttttaaacttcaggtatcgcaatgatattttagtgaatgtcaatgacacgactcattataaaggtggtaattcggagaatgtggctcttgttataaaatctactgaaaaagaggacattggaaattattcatgtcaattgtcaaataatattggcaaaggaacttctgatcaaaaaataaatcttgacgtgcagtgtaagataatctacaaatgtgcccaaatattttataagattttaacatgcttaaaatctttatttcagatgctccaactgttgaaattctaatgataccagagggaccggtaaaggaaagcgatgaatcaaatgttactcttttttgcaacgtgttggatgcaaatccgtctgttcttaccaaagtgaggtggtacgccaactctacgctccttaaggaacttccagactgcgaagaaacaagagtacgtatataggttacgtgtttgtactgttaagtccattacaataatttcatccaaatcggatcactattgaggtacaaattcttgtagtcggataccatgtaccatagttacaatatcaataatcatattatatttaatttgtttttaaattatgtattctggtatgattacaattcatttgatttatattactttaaaagtaatattatttggattattatttgtaattttaggaggacctgtgtcacatagaccccagtaaactcttgttggagagcattggtcgtggcttcttctacaattattcctgtgagggattcaatgctgcaggctggggtccacgaagcgaagataaagagctgttggttggttaagccccttttagcaaaggcattacaaattaacgtgtttccttttaattttcgtttcttataggtacattacgagccaggtcctgcggcactatctcatttcccgttagtcgccgttaagaaaaagagtgtgacattctcctgttccgtagatgatcccggatttccagaatcaaataggtttgtagcgcaaaaggccaaccagaatcacaaaatgaaaaatccccaacacgctccgcttatggattttcataccgtccaagcaatgcaaccgcaggaggtcgacattgcttttgaagcaatgctgctgcataaacaccaaaatcctctaccgttcattgattcgattcaaacatcaacaagaacaccacaagaaagcgcatctcatccagcacataaaatcaaagagactcatgctttaattgatttacatttaaaccattccctctgtacattgatcacgctcaccacatacatgccacaatcgccaatattaactctttacacgggggtacaacaaaaaaaagatgcctccgctacatcctacgccctttatcgaaaaatgggcaaattttcgtttgttgctcaaatagtttcgaaacccaacagatttcgttggctacgcggcggtcggggtcctctgcaggacattgtgacgaaggactggacggtggagccagtgggtctcgatagccggacaaattattcttgctacgcatacaatgagggaggcaaaggtgtgatggccacggtaaacttagaggtacacgcacccccgttcttcatcaagaacttgccaccgtacacgggcattttgcattcttcaccaaatgcaactttgacttgtcgcatcgaatgcgtcccgcgatgcgacatatcttggcaaaaggatggtgtgccaatagaaaggaacgatagccgatattttattaaagaaaaatacatggatgcctcccccgcaacgggagattttgaaagcatgctatcagtgttggtgagtatgttttatatgttaaactttgttctagcgctaaataaatacgatataaatataaatttctcgactaacatttcaaatttcctttaaataataacataaatttcaaaacgagaaagatcaagtatattagctagctctaacgagtcgatgcctttgaaccattacagtgactatacatttaaacagaagcttatgtatatgacggagacttatccttgttgtatactattattttgtcttttgatttgtgtagtgagtctcctttttcttgcttgcctagcgcgtgacaatcatgttcctctttacgcacccgtcgcgaccttctggcaactctactcggccttacaatcaaatacaaccctggctctcttatcgataagtctaagttatccgtcgataatgcgccattttcaaaacaacttctcctacccgacatatgcaaaattcctatggatgttagtaacaatatttaattaatgagctgggacaactgattttattattttgatcaaattaacacggaaattctatttgtaggaatttattaaaaaacgcatacaatgttttattaggataagtttaaacataaaatgtattgtgtggtttttgcaaagttcttttatttactgttatcttcgcttattcatcattcggttttccccacacaattactcttctctcacaaaaatcggctacctatcaagtatcgagtaccttgcttggcattttaaatggtgaagaaagcccgcatagtttaaatcccacaacctgaaagcggcattatatactcagcaacggtagatgttctaaatgaaccccttacttttacgtatgcgttctatttcgtaccgtccatgatccgtaacagcaattatcttataaggttctaagaactttcccttaagttttagtccgaattatttagttgctttctttttgaatcaatctcgttctcattttagccctggatccctttaatgttctgtctggctatttaccgctctttatcaagtccttcaatttattgcaatcggtcattcgcatataatctcctagaaataaatttaatataataaatatatatattaaatattacattcgcaataaataattatcagagtcaagaatacagataatgggataatgtcaattatattcagaacataatactctgtaggagttataaaactcatagttggaactacaatgatttaagattaggggtagtagtttctagtgaatctgctgggaacagagaagtttagccgagtttaaccaagtcggggctatcaacattaccacgaataagcttacaaataaaaactgttccaagcatcgttctacggttacctagggaaggtgaattatttaaaagttgtctaagtaagtaggtaatataagttttgcatcccaagttaggcgctgcaagtcaaacagtaacaagcccaaaactgccaagcccaaacttttggacaatattttgaatatttgtcatatttttatagccacgtattactcccgcaaaccgcccaaaagtgctacgcccacactttttaataattttaaaatttttttttatcacccagaaaaaaatatgaaatttctcgttcccatatcaatcgaggaggcttgttagagatcgacaaagagataatcggaacacaagacttaaaaaatgacttaagtgtggtataaaatatatttatagcaccgccactatgtttcaggagtaaagatcgaaacaattaaagccagatataaaattatttagcctcagaaagttgccttgtttagttggcttcactgatttctcttttattacttcgtcgattgtcacccctaaagtatgatcacatggatctttaggacatcagatgttgtttgatcagggagagccgaaaaaggaaaatttgtttctttaatggaaactccgttagttttgaccggtagtccggactcaatattcaatattcactgtggtggtaaactaatcgggacaggtggaatcactggctgagaaacaacggattgatcggattgctcggaatctttttcagctgccgatcttagcaacatttaaggatttgttgcgattgacagctgatcagcttgttgatcatttgccagtggttgcggggcgttatccttagcttcaggctattaaattgcaaatctagcggggaatggagatcatccgcccgacgaaaactatctctagctctacgaaaactgttggtcagtcctttcaagtcacctttattttggcgcataagcgatttcatcgcgttcgcaatagtagtttattctggtcccttagctgggatatcacttctttggccgctaaaaccagcgcacttataagctccgttttatcacatagccaagaagtctatttgggcaggtcagattttataaccaggcgggatttattttgacaggcaaataacattagtgtccatatttttatacccgttagattcgtttaaaactatgtaacagtcagaaggaagcgtttacggatatatttagtatatatattcttgatcaggatcaatagccgagtcgaccttgccatgcccgtctctcagtctgtcgtattgtccgtcagtccgacgtccgtctgtccgtatgaacgtcgagacccatgtagccactcccacaaaccgcacaaaactgccacgcccacacttttgagaaatcttttcatattttttcacattattattagtcttgtgggtcacgcccactctaatgccctaatgccggcaaaccggtcacgcccacacttttgaacaattttttaactatgctactgcaaggtaaagtgggccttttgagtatccatcctaccacatctctaccttctttggttacctttatgtctgctgcatctagaatggctctactcaaaatagcatcgaaactcatgtattcatctggaactacgagaaactccaccatcatgtgtatgtgaaatcgcaatttagcattctatttgttcgttatgtcaattcaaattgcgccccgaaattggaggaatttatttataatcgcggtctatcaagtatcgagtactctgcttggcattttaaatggcgacctgactaagtgttgccatatagcataaatcacttagagtttgccgcaaagaatcccacatcccaaaaatgtctacaccgctgctgaaaatgtttaagagtttttatgctttttgctactttggtaataaaaaattgaaataagtttagttgaacttaaaatgtaaagcaagcttcttaatgaactgttcgacatagacaaataattccaatatgccaaaagggatttcgccatggacattatttaaaacttttatttggttaagtgaaacctcattgacaatacatgctgtaatttcagcacttcaatatgccaaattggcctgattcgaaattcaacatcgaggctgataatgcaaactactcatgcgtatcaacgggtaatatcgtcggcggaagcataagaagtcgcacctattttggcattgagtgtgagtactaataattattttaactacaaaaacttgaaacctttcctttcctaatagacgcacccgaaaatacgacggtttcggagaacattgtttatgtgcaggaagacacaataccaggacgagttatttgcaaatctcgagctaatccaggtttgttttttaaccatttaactttttcacattattagcctaaatcttattactacagagccttcatacaagtggattttcaaaaacgaaactattgccaatggcaatgcgttaattattaatactgctatgaacagaaacgacgatggaacatatacgtgtttagcttataacaagcacggcagcagcattgcgaaaaccgtaattaaagtacaatgtaagtgtgaaatatgaaaatatgatcgaccttatcttgtcctcatattacatattttaaagttaagccacgttgcgaaatcgagagacaggaaatcgatgaccaggacacgctcatttgtactgcatacggaaatcctatagaggtaagtgttgttaagtgttaactaatgttaattagtcagaaccataggtacagtcagaacacaggtatctctgctcagctagcatatattcaacacctttgaatatatctttaattgctctagtagtgatcgccagacagtagtccaggacagagatggtgattattattataagttgctgtgaagataatatggatggcagagagatgccagagatatcaaagatgttgacttcggaaatcatattctcacagatagaaaagtgaacattagagttggtctaacctatgaattttctccgtagacctctcacacacttctggctgaaatttgaatttattcccctctttctgcgcccactgaaagtaaaagtttttaattttcagctggcttagcaagtttagcttaccaaaaaggacagtgaagccctaaaaaataagaaacacgaataattttaaaaaaggacagaaacagtttcttttttttcattttgtgtacaaccatttataagagatgtcgagttggaatgcgttgatttgatttcttccgctgagtacatgcaagctttaccagttttttgaaaaaatgggatcaacttcatttgcttgaacttaaaaaaatcgaatacatcgttgaattcattatcccaaggaagaatgttacccgacaatataagtcttaattccacttcctgttgaaaccgtgcttctcagtatcccttggtgtcctttgcttctaaacttctcgattcaataccgccgcatttccccggttgaatacttgggatttacacttgatgtccattccgcactttaaccaaattgtagatcttcttcagcgcaaattgccaaatattgccaaatcgccaagtcttcttttcaaagagaaacgctgtcaattccactgttgcatgtaataacttgttttgtacgagcatttacaaataaggaaaatattatagaaatcgcatcttacagaccgtcaaaatgttctatccccaatttgatcctaacataaattaattacttttcatgttcttgcaggcagatttttcttggtcaattaaaactgaaaatgaaacagacgaaaacttgggcagcggaaaaaaggaaaattcggtagaaaagagtttttacatattgcagacggactatgcaatatccaggacttacagatgtgtggcgaataatacagttggttatggcccattttgtgaaattgaagtagctggtacgtataaaataaacattaatttaagatcaattttaaatggttagcacgtaaaataagtttgccgatttatatgtgaggtacctttacatattaattgttatgctccttttacccgttattcgctaagtaggggtgtaagacttaataaaaagtacgttcatttgacccagaaaatatatatattattgatcaggaccacaaggagaatcgattaacccatgcccatccgttcgtatagtttcgagattctgctacgttcttctacgatcgctagaatgcgactacaaacataaaaatgtgactagaaatttgcacatagaacgtcgtcccaaatcattagctatactccaaccaccacgtgggcacaacgtgcaaatggatctaatatatgtgttgattcacttccgtttcctgggaatgttttcttccctttcttgggaatgtttacagatctgattgtacaggatgtgaccagtatgagtcggaaattcgtcaattggcttcttgctccgcacgattagttgaaaaaactaatgttgatgtgcatccatgatgcgatgaattcattcatcggcagcaataagctgcaccgcccacaatttctttattttatttattctagctaatcgatatcctatcgatatattaaaattaatattctaccccgcactaaaactagttgagtaacgggtatctaatagtcgacgagctcgactatagtattctctcatgttcagacaatttaccaaagcatggcactgcctacggaatattctctttttcattaagagtaaaatttttatttaagctacatttatttcttattttaacagctgcttcatcacttttagtttggtggcaaggtaaatgccaaaaaagacccataccgaactcattacttttaaattataatataggtctagataaagtaccatgtattttatattttcatataactgcaacctattgtactaataggcttctttatgttttgctttgtttttaaacatttcaatttcattccatgcataaataacttaattaataatactatataaagtgcgcccaaaaagtaagtaaatctaaatataatataataatatcattttatatagatgtgtcacatcactaaataaatttttctaaagatttttatatcacattatgaaattaaatccttttccgtgctatatttgtttgcagaagtattacaattttttaattatttatttttttaataattttcgtaataccttattagaaagaaccaatcgcaattcaaaaaataacaaaaaactaagtataaatacttaaatactcatttttctcaaaaagtttaatgtttttgtaaggtttttaatgttttgtaagaatgttttacaagatttttcgtttcgttgctttagtctaattaacatcacaaaacctagacgtaccacgaaagtgaaacgaaaaaattaagcccgcatgaggcttaaaggcttgaaatttacgcttttaattttatgacttgaatttgaattttcttagttttattgtttgacatgccaacttatataggtataccaaaaacaagttggccaccccctccccacagccaaacacacatgcaaaacgaccaaaacggttgcgaccacacttttgaagaattattatattttttcatattttatttcccaatatctatcgatttcacagaaagacaagagagaatgctatagtcaagttccccgactatcagatacccgttactcggctagtgtgaatgcgaacgtgaaaattcataatatttctgggatatcgataggtattgggaaataaattgagaaacaatttaaaaactgttccaaagtgtgggcgtgaccggttcggtgtctttggagcgctagagtgggcgtggcaagttttttgtcaaatcgataaaaatttacaaggctaataaaatgatgaaaaatatcgaaaaattgttcacaaatgtgggagtggcagttttgggcggttgtagggtgttattagtgggcgtggcaaaaagttttttttagaaatggatagaaattaacaagactaataagaatgtgaataaatgtgaatattttttaaacgtgtgggcgtggaaattttctgcggttagtgggcgttagagtggttgtggccacattggtgaacaaacttgcgatgcgtcgttgtctttagaatctgtatgatagaaccttctagcttttatagttcctgagatctcgacgtccatacgaacggactaacagacggacaaatcgagtcggctattgattctggtcaagaatatatatacattatatagtccgaaacgctttcttctgcctgttatatacttttcaacgaatctagtatacccttttactcttcgagtaaccggtataatgatgaaatttcgcgttcgaattttcactagttgagtaacgggtagctgatagtcgggaaactcggctataccattctctcttgttaataattggattgcggcgtgctttgaaaacgttttcaactagtctgatcttattacaacaatttttttatggcttataacaagaaaaactttaaaagcgaaactataaaagtttttcgtgtgttaatgtattattatcaatagtaaaaatatttaatagaaaaccaaaccagccagatatttttttaattttgtaaatttctatcgggatgccaaataactttctgctccgcccacactaacgccgcctaacacttttgaaaaatgatttgatattttttgatttttgtattagtcttctatatttctatcgaaacagatgtttggcgttgaaatgttaacatttttttaattttatttacatctataagccagaaaaatgacgaaatttcgcgttagcattttcagctgagtaacgggtatctgatagtcggggaacttaactatagcattctttcttatttttaagttacccacacatgtacatatgtacatatatatgatctaacagacaatttattttaccgtttcgttttaaatagagttgtatgaaactgaaaacaaacgttcaaatttttatattttcacaacccttaagtgtctaatgtgtccctgagtaacattagtttcatttcataaaagcaccttcgttacagcaacgaaaaatcgaataacactctgtttcttttgaaatttagagcaactggcatggtggcaactctgggaaaagaacactcttatcatactggttgctgctatcttgggattattgctgaccgtaattgtaatatgttgcataattatatgtatttgccgtcgccgtcggcgccaggataaatgtgagtatgataaattattaatagcaatacgacttcttacaaacaatctcagtaatacaaattctaagcaaaaattaaagcgaacaacaaaaaagcttgcacaatttgtttaccataagtcacgaaaatggttcttaaaaaaaaaggattttgttgtttgattgttttaccataaactcctgttgtatagcgttaaaaaaaagcatgggcaaggcctttttaaaagcttttgcatgatattttgtacttaagtctgcaaaaattaataaaaaatcaagtcagaagacaaatttataccctttaacttcgtcgagtacaatctaaaactttgtaagtaagggacatgattcaatttttggtacagtgtcgaggcaaattcggaatttgtttggaatgtggtcaatataactacgattattgtccacgttttgcgaatcacccaaatctcatgtatttgttgggtctcatctgacacggcctcataattggtttacaagctttcttaactttgctcatgtccattaaacaatcggaggtgcttattcacaagaggccccaaagtgaaacaatacatttgaagtcaaaattaattaaaaaaaaggcaaggcttatgtgccgacgctcgaaaggagttcgtttaaggtcagatagggcccttccgctgggcttctcgttggtccgactgatgtgggtgggggtgctgcccacaagataattattataatcatacatttttatattaaaatatgtgtgtttgcttgacttctttatttatttataaaacatgttcgacttgcattacatttgcgactgtgcgacatcaatgcacgctgtattaaacgcaactaactcgcatgtgcttcgacaacaattccatgcatatatgacacacacacaactacacctatatgtacagatctcacggaagtgccaataaattctatccaaaggtatgtaataattgtaaattacaaattaaattaaataaaagctttttagctacatgtgttagtgcacaaactttagctaactatatagagatttccctttaaaatgttaaaaacttcagaaattggaaattacctttttatcatcagtttttaactaatgatttattttttagtacattttgtaattatttgcaactaaaactttcataacattccaaaataagttcattatgaatttttcccaatttattggccataaaaagtatttataaatatctcaccattgtaataaaaataagtctacatgacgacataagctttgcatttaccctagaagatcttaatgttttactaatttgattccatttttttacctgaaatactgcaccttcatacatgtcccattcccacacaccatcattagtgcattgtctgatcagttagatatgtcacgagcgggtaggaatttatcaacacaggataaatgtacagccattttgccaaatccatcttcgtcccggtttattggtagcgcaccaaaatcgccaccccgctggccaattcgacctggagtaatgcttcatgtgagcagtaacaccaaggaaaatttgactgtaaatcgaatgacagtaaaaccgaacgtatctggtaatcgtggcgacatgagtcagttgtcggctcaattgagtgctgcattaaacggaagccgggataattctgatggcaccatcctaaccgagatttctgccgtgtctggggaaaatgaagcatcaaatctttccatactagaagtaacaaaccggaagaaagcaactgtaccatcaacaataagaaatgtatctacagccgaaggggaaatcatatcttccaaaactcacagtgctggccacatcgcattggatcatgtctggtcattgatatttaaaaaatcagacgatcgcactcgggatagtcaacggagccatgttggccttttacagaccttttggcgcgggctgggtgctaaggaaagcacctccggatttgagagtcagcatcgtttgaaaggaatacgttgcagcggaagtggtagagtatattaagaacatttttattttagacctgacaaatttttctgttttatgttctccttttttttttttttttgtttttgccttattttcaatcgaacaaatatcaatcctgtagtaacctacaaaaaggcaaaagagactgtacactcaacgtcagacgcagcatcaaatggcgaatcatccttaacaaaaaggcccaacaactgccagccgtccgtgtcaattcaattgcaatcaaacatggaggagaaaacatctaaatttgtattaaaagatgaaaggaataattcatccacggaagtagaaaacataccgtgtaatatggtgccttctataacacggggaagctccattgagtctccgcagagacctgccccctcatcattgcccttaaagaattttcttaatgtaaccagctggggatgttctggtaattcaacgatggtcccatcccatatactcgctaacgagcaaagtaagaatatgtataaaattttttttcgattttactaagtatacgaaaacaattacaaaatacaatgaaaaatttcaatagcagattgaaaactacaaaatagtttgtgttgaatatttaaacatctgcaattttcaaaccttctatgtgtaaactaaaatattgtaatcgatttcttcgacagtcatatagccgtttttagctagacagagatattacaaattttttcaaaacatattgaaaagaaaacaagagaggatccttatttgttacgattttagtaagaaatcataaaatgtttgatagtttatacagctttttgataacctaagcgtcccctgtagatttgtagataataaaaactttgaaaatccttcgaccaatgcaaaaatttatttgtaaaattttgccgtagaatctattgggtgtaggtgatccagatgcagctttagataaaggctttctactttctacatattaaggtaatgctagacgatgataccaaattaaatttcagccctattaaggaattggtaataatttattacagaataacaagcttaaaacacaaatggcttgaccaccatcataccgcttgctccatttttttttaccgtgccaactaagttttcttttttgaatgcttctcgatttttcctgcgtacaaaaacttttttcctttaattcggaaaataatcatcggaaatgttgatttccgaagttttttgcttttagattttcctatcactttaattatgtttataccagtgcaaagtgtacaccgtttgcaacgcactaaagaagacattatcgaccatttgcgactccgattaaaagctaatacgagtattcacgaaacttttccgaaggttctatttttaatgcatgctgcatgtaaatcgaaaagggcaggatgtgagtacctaaaataaataaaataaataaaataaataaaaaacaaggaaggatacccgttacttacgctactaatcaaattttgaaaagtttaggagtggcagtttttggcagtttgtggacgtggctatgactctggaatctgcatgtctatatctctattttgttaattttgttctccattcgcttcgcgagtatctatttcaatttgtgcactataaaataaaggtgacttgaaaggactgaccaacagttttggtagagctagagatagatttcgttgggcggatgatctccattccgcgctagatttgcaatttaatagcctgaagctaaggataacgccccgcaaccactggcaaatgatcaacaagctgatcagctgtcaatcgcaacaaatccttaaatgttgctaagatcggcagctgaaaaagattccgagcaatccgatcaatccgttgtttctcagtcagtgattccacctgtcccgattagtttaccaccacagtgaatattgaatattgagtccggactaccggtcgaaacccctcacggtgtttccactcaagaaacgaattttcggctttttcggctttacctgatacaacagcatctgatgcattgtcctatatacaagacaaagcaaaagccgataatataaaagtggaaaaattaaacttttccgtggctagggacatttcatcttacaaggtaactatccctactgaccgtatgttctggtgatttttgtacggatagtacagtggtaaaagcgttcgaagctaagataaaaaataagaaaaaggggcccgtgggaattaaactttcctaacgtgaccagaccacagccccatcctcttcttctacttcttcctcttcttcaaaaacttacatataggcctactatcttctatcaaaaagaaagagacctgcgtagcaaggaattgtgcttacatagacttgattgaaaccggagatacttaactctgaagttttcccagatgtgaaagtaatatataggcacgatcgtcccacctgacgggtaggtggagtcttcattgcggttaggtctacccccacgtcataggaggtactttttgtcgagtcccgtacgtaagctgtcattttccgatagatcttttccgcagtcttcttaattcccagaatatctaaatcatttgtccgcataagaaataagagataaaagggaactcagagaagtcaacccagcgaattcattgttttcgcaaggcacactttctgcggctaaataattatacccgttactcgtagagtaatatggtatactagattcgttgcaaaactgccacggtccacacctttgaacaattttttattttattctcattttattccccaatatctatcgatataccagaaaaatattaaaatttcgcgttcgcattcacactagctgagtaacgcgtatctgatagtcgggtaactggactaaagcattctctcttgtcaactcttgtcttccgatccgtcaatctctaacaaacctctttaatgaagggttgacacacctaagaaatgtaaagccgagactttatataaaattttaaaataccggttctcagtctattataatgttctgcctataatataccgtgggactcgcgtgtaaacgcattacattacttggtcggacattttattctattccattttattctactagtaacaggtatagaaattttctttcgttttttatcattggagttttatttacaccatagaaaaccattatttaacaaatttatcatttcgaccttaatttgatgaaaatcggatgattgtattatttagctgcgataggaagaatcgggaaaaattattaaaaataagttataattttgctgattttgatcataaattgctcttgtttgtaattcaacacaatcttataggtcgcaccaccaattcaatcgtaagtagtataaatacaaaatatgtattcataatgttccatttataggcttaaagttaccagtggctgtaatttgcacgtgccttcaatgttgcatattaagcactactcttatctaatgaaaattaactgagaatatactttgaaacctcgttttgaatctcttaagtttatttctcaaatattttttttataattatttaattttcttttcttctcgtttgcttttcatataacaaatacaaattcgtgggaaaatatttaaaatacaaccaatccgtaccatatatgcctcatatagtacacgacaagtcgtcttcactaagggaaccgttgacggaacctggcgagtatgagaatctaccatttcatggtctgcaaacggcacctaacaaggtacaaaaaaacatatttataatctttcttagacttcatgtctacttttacgatcatatgacttattttaataacccaatgcattttaattatattgaccaaaattatcgtgtacataaaacgtttattatctaacagctattattgcttcatcacatacttgcctatttactttgtattcgcttaaagtgattacaatgcacgaactccgaatctgttcaaaaaaaaaaatccattctgtggctcataacaaataaatatgcaatatattgtaaattcaaaatatgaagtgtaacgcacttcctttaaactcaattcttagcaaatcactactttctataccattctcgtaaacgtgttcggaatcggtgcactgttgtcaatcaatttattgggtgagatctatgcaattttttcgttacacagttcctaacacattgctaaaaagatacacattataagagcacccgccaaagaatgttatttatagtttacttttaaaaataatttgtataaatttaaggagaaatttaaaccagttttaattgttgtataattttgtacacccctttttccttttgaactacaatataaatagctaagtaagttttttaaattgattgcataggtaaagacaacactgaaacgattttaatgtatcttctagtcttgatcgttgtttctattatttaagtgtttatatctttattgttgttcgctagcaaacacttgtaaaccgacaagaataacaaaaaatttataaaatgcatataaaatttcatttagctaatatttttacctaaaactaaactgatatttttctgttacatttccttctgtgtgctccttgctaacaactgatgcttacgcatggatttgctaaccagttctctactacccctacaaattttaataacaacacaaatgcggtgcgcgttgctcaaagacccaaggaactgattggaaatatcaatcagccatctgtcggcctctaccaagattgccaggccactcatgatccactattgtaccatcaaaaatatttttgcgatcaggacgcacttaatgatcagagatcgcagtacaccacaatgcaccgcccaccaaacaatgtacagtataaccaaagcttatttaaac

SEQ ID NO: 40802 - DNA, 3835 bp, DROSOPHILA
aacaaaaacgacctgaagccataaaaacgcgtgtgaatgagaggccaacgaaatatccatagcataagtgaacagtgagccagtgagcgctttaaatagaaaacgcgaaatagtcaactcgatggaacgcaagtgtaggaaataaatcgccgtctagattattatagcaaaattgccaaaataaccacttgtgagccaaagtgacacaatgtgaagagcaaacgaaaatataaaaataaattaaaaaacaaataaataaatgcaatagggttaacttaaacatcacaggggaaggattatcaaaggccctgatccaaaataaaacgaattaaaaaaaaaacgattgtttattatttatggtaaaataatacaccgtagtaatttttcaagaacagtcaaatttggaaagaatgaaatatataaagaaattatgactgacaacggttttgaattaaagtgaaaagtgatattgatgcactaaagcagcactcggaaaacatcaacgaggcaacatacaaaattaaagttttaaaaattcttaaaagaaaattttgcggtaaagtgacttaacaattaacggtatgggaaacatggcgctgaggcaatcagcaaaggatgttgccaagtcgaattgcgtcgcagtgagaagttcaatatccctatcgctggtactggtgctttgcttagcgctagttgatagctccactgcacaagttgataccaccattagtcagcaagaaagtcaatcagttgttctaccctgccccgtcgatgcagaaaagtgcggaaaactccactcactaaattggtttaagggcgatgatcgcattgctgcaatgcttcttggagatagtaatgtcacaagtgttaataaagagttcgacgaaagggtaactgtggagcaaaacccatacagactagtaattaaggacttaaaaatagctgatgaagatatttatctttgtgatactacattttttataccagaagaaacttgtgataactttaatggatatcgaatagaattgagagtcttagtgccacccactgaggttgttatcctggatgcaaaaggagatcgaatcaagaacggcagtgtagtggggcccatgcaggaacgccagtccctcaaagctacatgtactgtaaggaacacccgacctcaacctgaagtgagctggtttcgcggaacaaagcgtttgacaacttactcccccactcatgacttagtcgatggtctttatacgtcaacactggagttggattggacattgtctcgcgaagatcttgctcaggatattgagtgtcgtgtgaaatctgcagcaatacaaaatgttactgtaactaagtttagcgtggatctacaagttcgcccaactagcattgacattaatggcgtaaaacatcacacagtacaaggcagcaaagtggttttaacatgtgacattcacggcgctcgaccggcagtaaatcttacttggtataatacaaccaccataataagctctggcgaaaatgaaataactgaagttcggtctaaatcgctcgaaaaaagcgatggcacctttcacactcaatccgaactaatttttaatgccactcggtttgaaaatgatcgcgtatttcgctgtgaagctgaaaatattgttctgcaaattaatcgcgaaaaaccaatttcatcagcgctcacgttggaagtcctatatccccccgtagtcaaagtcagtccatctgctataactgccaatacaagtgaaatagttcttcttaattgtgaatactttgcgaacccagcttctctgactcaagttgaatggtatcgcaatgatattttagtgaatgtcaatgacacgactcattataaaggtggtaattcggagaatgtggctcttgttataaaatctactgaaaaagaggacattggaaattattcatgtcaattgtcaaataatattggcaaaggaacttctgatcaaaaaataaatcttgacgtgcagtatgctccaactgttgaaattctaatgataccagagggaccggtaaaggaaagcgatgaatcaaatgttactcttttttgcaacgtgttggatgcaaatccgtctgttcttaccaaagtgaggtggtacgccaactctacgctccttaaggaacttccagactgcgaagaaacaagagaggacctgtgtcacatagaccccagtaaactcttgttggagagcattggtcgtggcttcttctacaattattcctgtgagggattcaatgctgcaggctggggtccacgaagcgaagataaagagctgttggtacattacgagccaggtcctgcggcactatctcatttcccgttagtcgccgttaagaaaaagagtgtgacattctcctgttccgtagatgatcccggatttccagaatcaaatagatttcgttggctacgcggcggtcggggtcctctgcaggacattgtgacgaaggactggacggtggagccagtgggtctcgatagccggacaaattattcttgctacgcatacaatgagggaggcaaaggtgtgatggccacggtaaacttagaggtacacgcacccccgttcttcatcaagaacttgccaccgtacacgggcattttgcattcttcaccaaatgcaactttgacttgtcgcatcgaatgcgtcccgcgatgcgacatatcttggcaaaaggatggtgtgccaatagaaaggaacgatagccgatattttattaaagaaaaatacatggatgcctcccccgcaacgggagattttgaaagcatgctatcagtgttgcacttcaatatgccaaattggcctgattcgaaattcaacatcgaggctgataatgcaaactactcatgcgtatcaacgggtaatatcgtcggcggaagcataagaagtcgcacctattttggcattgagtcacccgaaaatacgacggtttcggagaacattgtttatgtgcaggaagacacaataccaggacgagttatttgcaaatctcgagctaatccagagccttcatacaagtggattttcaaaaacgaaactattgccaatggcaatgcgttaattattaatactgctatgaacagaaacgacgatggaacatatacgtgtttagcttataacaagcacggcagcagcattgcgaaaaccgtaattaaagtacaatttaagccacgttgcgaaatcgagagacaggaaatcgatgaccaggacacgctcatttgtactgcatacggaaatcctatagaggcagatttttcttggtcaattaaaactgaaaatgaaacagacgaaaacttgggcagcggaaaaaaggaaaattcggtagaaaagagtttttacatattgcagacggactatgcaatatccaggacttacagatgtgtggcgaataatacagttggttatggcccattttgtgaaattgaagtagctgagcaactggcatggtggcaactctgggaaaagaacactcttatcatactggttgctgctatcttgggattattgctgaccgtaattgtaatatgttgcataattatatgtatttgccgtcgccgtcggcgccaggataaattacacgacaagtcgtcttcactaagggaaccgttgacggaacctggcgagtatgagaatctaccatttcatggtctgcaaacggcacctaacaaggtacaaaaaaacatatttataatctttcttagacttcatgtctacttttacgatcatatgacttattttaataacccaatgcattttaattatattgaccaaaattatcgtgtacataaaacgtttattatctaacagct

SEQ ID NO: 40803 - protein, 1079 aa, DROSOPHILA
MALRQSAKDVAKSNCVAVRSSISLSLVLVLCLALVDSSTAQVDTTISQQESQSVVLPCPVDAEKCGKLHSLNWFKGDDRIAAMLLGDSNVTSVNKEFDERVTVEQNPYRLVIKDLKIADEDIYLCDTTFFIPEETCDNFNGYRIELRVLVPPTEVVILDAKGDRIKNGSVVGPMQERQSLKATCTVRNTRPQPEVSWFRGTKRLTTYSPTHDLVDGLYTSTLELDWTLSREDLAQDIECRVKSAAIQNVTVTKFSVDLQVRPTSIDINGVKHHTVQGSKVVLTCDIHGARPAVNLTWYNTTTIISSGENEITEVRSKSLEKSDGTFHTQSELIFNATRFENDRVFRCEAENIVLQINREKPISSALTLEVLYPPVVKVSPSAITANTSEIVLLNCEYFANPASLTQVEWYRNDILVNVNDTTHYKGGNSENVALVIKSTEKEDIGNYSCQLSNNIGKGTSDQKINLDVQYAPTVEILMIPEGPVKESDESNVTLFCNVLDANPSVLTKVRWYANSTLLKELPDCEETREDLCHIDPSKLLLESIGRGFFYNYSCEGFNAAGWGPRSEDKELLVHYEPGPAALSHFPLVAVKKKSVTFSCSVDDPGFPESNRFRWLRGGRGPLQDIVTKDWTVEPVGLDSRTNYSCYAYNEGGKGVMATVNLEVHAPPFFIKNLPPYTGILHSSPNATLTCRIECVPRCDISWQKDGVPIERNDSRYFIKEKYMDASPATGDFESMLSVLHFNMPNWPDSKFNIEADNANYSCVSTGNIVGGSIRSRTYFGIESPENTTVSENIVYVQEDTIPGRVICKSRANPEPSYKWIFKNETIANGNALIINTAMNRNDDGTYTCLAYNKHGSSIAKTVIKVQFKPRCEIERQEIDDQDTLICTAYGNPIEADFSWSIKTENETDENLGSGKKENSVEKSFYILQTDYAISRTYRCVANNTVGYGPFCEIEVAEQLAWWQLWEKNTLIILVAAILGLLLTVIVICCIIICICRRRRRQDKLHDKSSSLREPLTEPGEYENLPFHGLQTAPNKVQKNIFIIFLRLHVYFYDHMTYFNNPMHFNYIDQNYRVHKTFII

SEQ ID NO: 40804 - DNA, 2887 bp, DROSOPHILA
tcactcccatttattattcatgcatctgtctctttaatattgttttgatgcgctcctactgtgctcacgtttgagtagagcatttttcaattcggatatgcccgcgctttgtttcttcctctctcttgatttcgctctttcaagctctcacgcacaccgacgctctcaagttcgaattaacggatcataccgcaggcaacaacaaatgtttctcctgtgggctgtgtgtctggattatgccgtcgtttaccgttccacccaaccgccaatggttgcagcggctatcaatttccagtggctgcaacttgagagccgcagatgaagcacatatcgcccattttagcgacaaacaaattgcgacgccctggaacaaaatcgcgatgcatccgagtgcattccggtacacgcactagcacactcaccatcagaattgtgatccaagtaccgccgtagagcggggactgggcgaggagctgcgggacttacagctggccagggacagcggcttgaaagggctgcgcaatgcaataacttcgatttttcgcaggcgacgacgtaccaacacttacacacggcacaacacagaagcacgcacacttattcgacaaagacacaccgacggggtctttccgggatgccaagtaatgtagcaacaatgaacaataacttaactacgtttccagcacttcgagcctcttttgtgcagcggaatttacttggtttcgcggtaggtaaataaataataattttcgcagttttccaacagcgtcgttgcgccagtgtgaccgctactcacaactctagcatcccctaaaacctagaattagtgtgctgggtggaaaactttgataggtacgcgctaaattttaaacatatatttccaaatatttggccaacattgatttcaagcgattaccacaggcaaatatttatttgatgtttgggagcattcccgtgtagaacattaactaagagagatttgacattcagcataaaaaaagccaattgtataattgttatgttgtatttattgagccatcgctttcgatgcgcgtgatctccagaagatgaatagtgtgtccgcccataaactccagcagatccactcccgactccttgccaatgtcctccatgctgatgggtaaagcctgcagcttccacttcttgagcagcgcctctatggaccagtcggcgctccgctcctggtatgtaaatataaatttggccccggcatttcgctccagcagaaaagcaactgtgaccacgatatcctcgaacacgctgggatcgtagaagcagtctgctgcaatgataaggtccagaggcggcagtcggaacacgctgttcagcagcaggccccaactcaggcccaccacatcgatatcaacgcccggctgcagttgattggccaggcaggactttcggatatgggccagtgacttgggcagaatgcagttgtcagtaagtaccacttgggcgcggcatttggccgccagaatgccgggcagggcggtgccgcttcccagctccaggatgcgcttgcccgccagtgtctgtcggcgctcccacaggaagtgggctaaaattggtgcgcaaggccatgtgtagaaggagtaggcaccctgaagcagctgtaggcggacactttagatactacacgaacacctggttctaaggattacctcaggtattttgatctccagtcgctcggcgggtgatccgctgaagacaaacttgcggatatgctcggcagtggctgtggccgccacaatgtcattgtcctcgctgccgctcttcatgtggaaacgcatcttagctcaagcatgcaggagtattactattttcactaaactaaagttatttttcagcgttttgtttacaacctgtttgattagcgatgtcacttcgttgcgataacttaatcgataaaaattgaggcgagtgaagcaaatagtgaccgaagggtgacttcagtagcagttgacattttaagccaccatttctaagcttcaattaaaaacgtttttgggtatcccaattcgtccagtttatttaaaggtatgcatcccaattgaaagtggctgcagctgagcgctcctctaaacaaaattctcgtgaccgcgattgctgctgaacgatgactagtgtataagcaatcgaatatcgcaaatcttgtatgatcactgtggtgttttgcttttccgattgccatggagggattcagattcttggaagaatgagctccgtaaataaaataaagcttaacgaaaacaacaagatgcactcttttgggaactgggagcggtgccggaatctgggagagggcggattcggcctagtgatccattggcgaaaccgaacaacgggccgtgaaattggtgagctataaacaccttatgggctaacactaatatacatatacatataaatattttaaggattttctttttcgcaaacacacattaccagcccccaaacaccctccccctttccagccttactcataaataaataaattttttgttgtattttgtatatatccaaataataaaaccataaaaacaacatacatatacatatgaacatgtttgttgtccaacaattcccagaaaccgagctgaggcatgcgtttccgggtggtccactgatagtgatagagggctcgagttttgcgcgtttggtgtggtctccgcattagatatgtcgcttatagcctttcggctgagttagccgatatggcagatattttaagcgtcagtcttaagtgtttatttattttccacatagccaccaagcacataaaggagatgggggccctgagtgccgatcagcaagtcaagctcagcgagcgttggaacaaggagctgaactggtctcgtcagtttaa

SEQ ID NO: 40805 - DNA, 836 bp, DROSOPHILA
acaggttgtaaacaaaacgctgaaaaataactttagtttagtgaaaatagtaatactcctgcatgcttgagctaagatgcgtttccacatgaagagcggcagcgaggacaatgacattgtggcggccacagccactgccgagcatatccgcaagtttgtcttcagcggatcacccgccgagcgactggagatcaaaatacctgagctgcttcagggtgcctactccttctacacatggccttgcgcaccaattttagcccacttcctgtgggagcgccgacagacactggcgggcaagcgcatcctggagctgggaagcggcaccgccctgcccggcattctggcggccaaatgccgcgcccaagtggtacttactgacaactgcattctgcccaagtcactggcccatatccgaaagtcctgcctggccaatcaactgcagccgggcgttgatatcgatgtggtgggcctgagttggggcctgctgctgaacagcgtgttccgactgccgcctctggaccttatcattgcagcagactgcttctacgatcccagcgtgttcgaggatatcgtggtcacagttgcttttctgctggagcgaaatgccggggccaaatttatatttacataccaggagcggagcgccgactggtccatagaggcgctgctcaagaagtggaagctgcaggctttacccatcagcatggaggacattggcaaggagtcgggagtggatctgctggagtttatgggcggacacactattcatcttctggagatcacgcgcatcgaaagcgatggctcaataaatacaacataacaattatacaattggc

SEQ ID NO: 40806 - protein, 247 aa, DROSOPHILA
MRFHMKSGSEDNDIVAATATAEHIRKFVFSGSPAERLEIKIPELLQGAYSFYTWPCAPILAHFLWERRQTLAGKRILELGSGTALPGILAAKCRAQVVLTDNCILPKSLAHIRKSCLANQLQPGVDIDVVGLSWGLLLNSVFRLPPLDLIIAADCFYDPSVFEDIVVTVAFLLERNAGAKFIFTYQERSADWSIEALLKKWKLQALPISMEDIGKESGVDLLEFMGGHTIHLLEITRIESDGSINTT

SEQ ID NO: 40807 - DNA, 5366 bp, DROSOPHILA
cgtatttcttcatttttagcttttctcctctctttatttctgtcctcacctgctgacaggtgccacttgatggggcgtttgacaatctcaattgggctcgagagctccggctcgaggcgtataaactggagtacggttggtctgggaatccaaggttccccgaattcgattttcactctgtgagttttgcacataccctcctgaccttcttcttcagatttcacggtcaatggatagattgtccaaccccgggcgaagatctgtgcgaatctccaaaggggccggaccggaaaagcaaacataggaacttgagtttaaatgggtttatttcctttaattattacaattggcttttaccttggcatattttttggaacaatgtttttcttattgtttgttattaatccagttaatccagattcgttacaaagtatgtaacaggtagacgaaaacgtttccgatcatatcaagtatatatccagatttatatgtccgtatgaacgtcgaggtcttagaaactataatatcttaagattaaggatgcagatttcagagacatagatgcagcgtatgtttgttgactgccacgccacagtatatgccaaaaagaatgtttaactttcttgttcgcactcccactagctaagcaacgagacttcgaagaaattagctatagcgttctatcttgttcagtttacattttcttatatttatttgttattaatttattccaatctagttgtcagtttttctaagctccaaccggatttgtaaacatttttttattttcacactgtttacattcccatttatgggaacagaaacaaaaaactttaatcatttttatatattattatttcggtagcgctttataaaattatcttgtaagtttcaaagagcatagaccataaattgattggcgtcaaatttgaattttataaaggccaacatccgaaatgctacggatttgaacttctggcacaactcacaagacaccagtatggctaagcaactgaaaaattgggccgtggatgccatggatcctccgaaaaaagggacatcctacaccatactacccaataggcatggatatttaaatcggaacgttgagctaccacatagtaatgacgcctcgcctccggttacaccacttaacgtgccctcaaaatctagaactcaagcccaaactggtaagggcaccgtacccaacttaagcccagtaaaagagtcgaaaaatgcggatagcgtacggcaaactacaccatatccaaaagttaaaggcatcgaactcttacgatctacgccacccaggcatatgagcttagaattgcccccaaatgtgggtatttacttgccgccaattaatccatataagaggaaccagaagcattgcgatgaccaacatcaaaatccaggcacacctgatttcaagccggggacctccaggcagggaagccatgttcagagcttccccagcagtaaagtgaaagttttaagttccagccaccttaggcttaaaaaaactattatcgagaaacggctacaactgaagaagttggcgtccatgcgatcgaggctcaatgtggaagaacagatgactcgattggaactggataacctggagcacatgtatcatcggtcgccaataggacgaattaagcgacagagcggtggtgctcacatcacattatcacgactagagtcgaaaatgcaaatcggaatatcaacggaggaaagcaggaaattacacagtgaggaaattcttgaagcccttctgaaagctctacgcgtagataattttgcatttctgaacgaatatcagaaatcactggacagtccgaagccatcagatagttgtcctctggtaacggaaacggaaaagggaagtgatgcagacaccgcgtttaaaagcgatttagtttcggaaacggaaacatatctagataacaacttatcgacggtttgtgaatctgcgaagactaacactattgatatacctattccttgtcagctgagaaacccccttgcatccccagacgatgtgagatactacaaaccctgtgaccattatcccaacaatttcgaagtatcgcagcccttggccaggtctcccaagatttgccatttagtgtcttcggcacaaagggcactttacgcttgctttgtcaaagatccgttggatacagtagggctaatccgaactatggacgaatcgacggaagtgtccttgaacgagcccacaactcagttctccaccatagcctgtgaggatatggaactgctgagtctgatagttgagaaaccctatgtgaccaggatggaaacagacaaggaactgtatgtttcccgagcaccaatccgttgccccgattacgactgccagcggatgtgctttgtctcggattttaatacccacatgtggcttaatcatcgatctttgaccatggagcatattaagccggcgcataccaagaccttcttcttggacaccaacataccgatgctggacaaaccgaagtgtcacatggtgtatatggtgcgggataagattatcgacagccaggccgaggctttgaaagatctgttgcccatactgctgatgagtggccgtacccactggtcgaattctttcggttatgcggaactttgggaggcccgagaactaagcaaaggaaatcccattctcgataaagagttccttgttatgtggctgacaggagttgttccccgtgatatgaaactactggctaccttttcggtatggtccactctgggtccccagatggccgattgcgttggcgttagcactggttatatctacgatattcgggaatccagcgatctgggccgaatcgtccgcagtcggagctccatgatcctgcccatgagcatgatctcgcaaatgaccgataatgggagcagattactgcccattcaggtgaaggtttattaaattgttcagtacgtttgtaacggaaatacaacttacatacatctttttatgaattaatttatgttgtttttgctgggcagagtgtaaaatggttagtactgtattcgagaactgtatattttgtacatagtacatagaaatgaatttttttcaagcaattgcatacttctaggctttgcgttgggtctcctctttatagtcggaaaaactagttgcctacttttctgaaatctctattgatgggcgttcaagaaaggaatagatacgatttattgaaggattttgccatttaatataaaaaaacgtttaaattttgttctcaagcttatccgctgctttttctgtctgtcataatacaaggcacacaaatatcactctcttagttgccaaaaggtatttaactttttgtgtgtcaactctttattcaggatataggaaaacaaaaatttagatttataaaaattatctcggccctaaattgtccgttcgacgaggaatttgcctttttttcgtttcaatcccaagatcagtgggatccgaccgaatcatgtcatcgcagtttcgtgagaagcgcggattagctagcagtgccaataatgaactgcccaccatggatcccaacgagagtgacttcgctctggagctgaagccagcacccaaacagacctgcattccgacgcaccaacgccagagattggccagctcggacaccaagtgagttttggtttgtaaatattctcgtcaggttgaaaatgaatcgatgaataaattggtgtaatcaacataaaacaaaacaaatttagccaaggaacagaatgattatgcgtatgcgttttcgacccattaaattttatatgtatatatatatattagaatcataggatcagccctataaatggttttttgattacccaatttttatctaaatgaaatatctccacagcaatgggtatctgatagtcgattttcgcgattaaagttttagttcgtgttttcaactcataaactacaaaataaaaatatataatttattattggtttaatatatgaagattattcctaatcgcttctttatttggataaatgctaagaattttaattatataatatataaaacctctcttcgttttagcgtctatcagcgtgagagcgtgtttgatataccggacaagtcctggtcagtcctgtactttggatccggcaaggacagttcctcgaaatagctgtactagaaagctagaaagctactagaacaacattccgttctgcgccactttaaatcgaatgtctgcccactgcccacgcctggcccactgattgactccttcgtcaccacatccatccaccacgccagtcatccatcagatgtcgcgaaatgttatatacaattaaaactcaccctcgtgccactgcatattgtatttttttgtttgggttttccttgtgatggctgcaattgatgatcgtgtggtttctggcgattctgattcgtacgattgtgattaatgggcgcgtcattgatcgcgatctgcggcgctccagacatactcatactatacgagtactatgatatttgcacacagatcgcagaacaattcatgatatcattcatgcccgccgccacattgagccatgatatctcttgagaagtgtcaaacgagcatttctatttaaagcggaaatgatggcttaatgaaataaatgatgcgatactgacacatctgacattttctctaaatacgtgtgagtttcatgaatttatgcatcgtttcaaagttatgataaatttgcaagtggtctttgtacgaaatgctaatctgtcaataaagaataaacatcgtttaggggaaccccccatgtaagctggttcgaagtattcactgattacagtttaaacttttaaacggagttaatgaacctcctggccacattgttaatttaaattaaaaatacttttggtccttggtcccatcctctacaccctgtttacagcagacctccctatcataccctcccgttacctcacagcagccacctatgcagatgacacggcgttccttgccaccgcaacaaaccctcaactagcatcagccatcatccagaggcaactggatgcattggatccatggctgaaacgctggaacatcgtgatcaacgctgataaatcctcccacaccaccttctctctgcgcagaggagaatgccccccggtctcactcgacggcgacacaatccctacctccagcacccccaaatacttagggctgaccctggacagaaggctgacttgtggcccccacatcaacagaaagcgtatccaggccaacatacgcctaaagcaactccactggctcatcggtaaaaagtccaagctgcgagagaaactaaagattctcgtctacaagactattct

SEQ ID NO: 40808 - DNA, 2374 bp, DROSOPHILA
atggctaagcaactgaaaaattgggccgtggatgccatggatcctccgaaaaaagggacatcctacaccatactacccaataggcatggatatttaaatcggaacgttgagctaccacatagtaatgacgcctcgcctccggttacaccacttaacgtgccctcaaaatctagaactcaagcccaaactggtaagggcaccgtacccaacttaagcccagtaaaagagtcgaaaaatgcggatagcgtacggcaaactacaccatatccaaaagttaaaggcatcgaactcttacgatctacgccacccaggcatatgagcttagaattgcccccaaatgtgggtatttacttgccgccaattaatccatataagaggaaccagaagcattgcgatgaccaacatcaaaatccaggcacacctgatttcaagccggggacctccaggcagggaagccatgttcagagcttccccagcagtaaagtgaaagttttaagttccagccaccttaggcttaaaaaaactattatcgagaaacggctacaactgaagaagttggcgtccatgcgatcgaggctcaatgtggaagaacagatgactcgattggaactggataacctggagcacatgtatcatcggtcgccaataggacgaattaagcgacagagcggtggtgctcacatcacattatcacgactagagtcgaaaatgcaaatcggaatatcaacggaggaaagcaggaaattacacagtgaggaaattcttgaagcccttctgaaagctctacgcgtagataattttgcatttctgaacgaatatcagaaatcactggacagtccgaagccatcagatagttgtcctctggtaacggaaacggaaaagggaagtgatgcagacaccgcgtttaaaagcgatttagtttcggaaacggaaacatatctagataacaacttatcgacggtttgtgaatctgcgaagactaacactattgatatacctattccttgtcagctgagaaacccccttgcatccccagacgatgtgagatactacaaaccctgtgaccattatcccaacaatttcgaagtatcgcagcccttggccaggtctcccaagatttgccatttagtgtcttcggcacaaagggcactttacgcttgctttgtcaaagatccgttggatacagtagggctaatccgaactatggacgaatcgacggaagtgtccttgaacgagcccacaactcagttctccaccatagcctgtgaggatatggaactgctgagtctgatagttgagaaaccctatgtgaccaggatggaaacagacaaggaactgtatgtttcccgagcaccaatccgttgccccgattacgactgccagcggatgtgctttgtctcggattttaatacccacatgtggcttaatcatcgatctttgaccatggagcatattaagccggcgcataccaagaccttcttcttggacaccaacataccgatgctggacaaaccgaagtgtcacatggtgtatatggtgcgggataagattatcgacagccaggccgaggctttgaaagatctgttgcccatactgctgatgagtggccgtacccactggtcgaattctttcggttatgcggaactttgggaggcccgagaactaagcaaaggaaatcccattctcgataaagagttccttgttatgtggctgacaggagttgttccccgtgatatgaaactactggctaccttttcggtatggtccactctgggtccccagatggccgattgcgttggcgttagcactggttatatctacgatattcgggaatccagcgatctgggccgaatcgtccgcagtcggagctccatgatcctgcccatgagcatgatctcgcaaatgaccgataatgggagcagattactgcccattcagtttcgtgagaagcgcggattagctagcagtgccaataatgaactgcccaccatggatcccaacgagagtgacttcgctctggagctgaagccagcacccaaacagacctgcattccgacgcaccaacgccagagattggccagctcggacaccaacgtctatcagcgtgagagcgtgtttgatataccggacaagtcctggtcagtcctgtactttggatccggcaaggacagttcctcgaaatagctgtactagaaagctagaaagctactagaacaacattccgttctgcgccactttaaatcgaatgtctgcccactgcccacgcctggcccactgattgactccttcgtcaccacatccatccaccacgccagtcatccatcagatgtcgcgaaatgttatatacaattaaaactcaccctcgtgccactgc

SEQ ID NO: 40809 - protein, 727 aa, DROSOPHILA
MAKQLKNWAVDAMDPPKKGTSYTILPNRHGYLNRNVELPHSNDASPPVTPLNVPSKSRTQAQTGKGTVPNLSPVKESKNADSVRQTTPYPKVKGIELLRSTPPRHMSLELPPNVGIYLPPINPYKRNQKHCDDQHQNPGTPDFKPGTSRQGSHVQSFPSSKVKVLSSSHLRLKKTIIEKRLQLKKLASMRSRLNVEEQMTRLELDNLEHMYHRSPIGRIKRQSGGAHITLSRLESKMQIGISTEESRKLHSEEILEALLKALRVDNFAFLNEYQKSLDSPKPSDSCPLVTETEKGSDADTAFKSDLVSETETYLDNNLSTVCESAKTNTIDIPIPCQLRNPLASPDDVRYYKPCDHYPNNFEVSQPLARSPKICHLVSSAQRALYACFVKDPLDTVGLIRTMDESTEVSLNEPTTQFSTIACEDMELLSLIVEKPYVTRMETDKELYVSRAPIRCPDYDCQRMCFVSDFNTHMWLNHRSLTMEHIKPAHTKTFFLDTNIPMLDKPKCHMVYMVRDKIIDSQAEALKDLLPILLMSGRTHWSNSFGYAELWEARELSKGNPILDKEFLVMWLTGVVPRDMKLLATFSVWSTLGPQMADCVGVSTGYIYDIRESSDLGRIVRSRSSMILPMSMISQMTDNGSRLLPIQFREKRGLASSANNELPTMDPNESDFALELKPAPKQTCIPTHQRQRLASSDTNVYQRESVFDIPDKSWSVLYFGSGKDSSSK

SEQ ID NO: 40810 - DNA, 8609 bp, DROSOPHILA
ttaattgttagaataaaaaccgtggcaaaaagaattttttttcttgcttactgtgtattgttttcttgtttacttgtcttcttcagcttagttgttttttaaaatttaagaaagcataactttccgttaagaaactctgcgctttaggcaatttgtttacaaacgacttttacattggcacatgtgcgacctctagcgttcataaaacctacagctgaagatgtatcatacataaatatttttcaattctggcaacgccatataacagtaacggtttttaagggcatgagttaatgaacttttgaaacaccttctaaatcaatccccacaattaaaagcggaagttcttttcttttgttacgtttttgtattttttctttttccatttgttttaatacaatatataaaaaccgataaaaaatcaaaaataaatataaatatgtaggtgtacacagtttagtttgaaatgcgtttgatggctggcaaaagtcagggctgtctacgaaagatacaaaattacaaaagccgtggctcggacgcttttctatggccatgttaacgtaaataagacttcagtttttaggtttatcagtagactacagttacaaattagttattgctcttcatttcggtgataattgaaattgtgtgctgtggcaatttgctggttacattacatatgcgcgtatgcataaatataatacaaattaaatatgtaggtgtaggtgtgtttttcgcttaggtctctaggggctaaagtgtttatagttaatttttgctaaacgatcacattgaacaggcactccgctcgcactcacactcggtaaaagcattcactccgcgacatacacgcactcacttctacattcattcactctctggcttacaaaatacaatttcgcacttagacttagagtgtgggggaacaggggcgtttgggggcttactaaactaaaatgggctcgttacgtattctctctcctccactaatttctttttctcctatcgggtctcattaaagaaccgctttagatcaggcattttctgatttttacaatatctggtagttttcaaaaattaaattttagatttagagtgagatttcatccaattcaaatttgaaaaaattcctgacgagagtaaaattcgaaaaattacctattttcttgattgcgttttgattgctactatcaaaagtttttataaaattttggactcgcatttcgtatataaggggtagcatgtagttctgctaataacattttgcttcacggatgaatgactgagaggtgtaggggatgcagccgtgctccatcttggctgcatttcgcacgttgagtaatcacagcaaatcggcgcagacgccaccgaaccacgccatataaaggggcagcagataaacaaccagagcgcgacgcagcgtcatcttttctggggcatcggatgatcgattgtcattggccccgtcatggcctgcatccgtgtcctcatcctcatccagctgcctatgatcctcatccagatcgttgtgatcttggtcgaagtgagtggtgtggatgagcggattcttgtcgtccactccgctcgtcggtcgagatgtgtgcgtgggcatgtgaccccgtccaccggcgtcctcgtcatcgtcgttgtctgcatccaccgaaggacgctccacgtccggcttatggctgggttcgaagggtcccaggccagagccctcgtcatcgtcctcgtcgtcttcggacccggatccagaaccagctccactacccgcatatggcagttcttctgtaaaacaaaaatgaaacaaagggttagtaagtatacataaaaagattgattcgatggtttataaacagactcattacaatcaccagcatatattaccttgttcgctccactcaacatcctggccgttgtaggcatttcgaaggtggacaatggcattcttcagatgacttagttgagaggccatttgagctgtttgcttagtactggcaggattgcctgtaaactccggattcgagccgtgttctgtggtgattgagtgcatgtatctgaaaaatataatatgtttaagatagctgtgctaattttatttagttttttccgcctacctatcaattgtgtgaccattccagcacatgccgtccacatcggaactggaggctatatcctcgttgctacaaaccgagtgcggcagattggaccagaactttttgtagtccttcactcgctggcgaatgtccctcacgatcctgtccagaatcggttcacgtccacctccgctctcattgtcatcgtcatcgttgtcgtcgcgattgttttgctgtttgcgtcgctgttgctgctgctttcgacgttgctgttgccgcctgttgttaccgccaccgcctcctcctccatttccactctttccaactccttgctcttgagactgttgcgccgatgtctcctgtgagccgggctcagcagctctgcgttctctcagcacaatcgcctcgtccaacgtttcatcaatgtccagagtatcggcctccacaggactccttgcgttgaggatttgaactccttgcagtttggggctgatggaccgtttcattttcttcaactttggcctaccgcatccttggaatacgcggttggtgatgtcctggccagaatcctgcaatgaattaatttgagagttacacactgttgatcagtacaaagggaaacaatgatctaataatcatgcaataactgattagaaatacaactagaaagtgtaagattaaacacaaataaagaagagtcagaacgacctgattgaccctcctgaatgtgttagcacataaacaattgatatttaatatttttaattttataaaaatttgaaagttttgagttaaaatgacttttgaaaccagtggcgcaagggaagtcacattatttcccatactcaacagcaattccattcacaccctactgagcttggcctcctaatggctatttatagctagtttttattgacccattcaatagataagaattgatttcagtcagctactcattatgggccactcgagcgatcagagacctcttcccgaagagtcaactctctacagaagctagcgcttcgtcagtcttatcggcactcctatatctcctgtgttatttctttcaatggcctcttctcggcagtttacagttaatataattacggaggttgggtcaggttggggtacggagtaccagaactttagacccaactccggttcatcataactgtcgacccaactgggagatggcaatcatcaaaagaggttcgtcggttcaacaagcttggagattgggtaaacgcctcggaaacaaatcagaattaaaattgaatactatttcgcattttgcatttttggccttttatggggccgtcgaccaacaacaacaaacaccggctaaagtaaacacattaaaagccaaatgccgaaacacaaacaacaaaagcaatagatccaaacaaaaacagcgaataagaagaatcagaggttgaaaaaagaaatgtataaattttaaatggaaatataaattaaattcatatgcgggccaaatgttgcgcaaataaatcgtaaaaatggcaaacaaaaacggtgctagagagggttaaaatattgcagtaatcaaaattcaataagttatggccatcctccatgtggaaattattctttagctttttgtgtaaatgtcgtgtataatatttgtgtcctttttaatagatttattgcttaattttaatggtagtaacatcttggcatttacataaatgtttagttgaaatggggggaagatgaataacagctatcaaaagaaatgattcattaaaaaatatacaacgactttctgtacttttgttatttggcaagatctcagaactggaatatcctacggtccataaatttccttagtcccacatatcaatcgccacgatcttctacggttttccccttgaattattttgcgactcgtttaaaatgtatgcgtattaactaaccacgcgtaaaccactctgacgcactgacagttttatgggagtataacttagagtcccactgcgaacggccaagagataaaaattaaccagcagctgcttggtccaaacgagttacaaattgcgattggtttatgcaaatgctaatgataatgacccaagcacatccaattattccgctgtagatctcacctggaagttcatgatggcctcggagatcttgatgttgagtggctccaccaccatcacaatgttgaaggatcccagcagtcgttccgccaccttgtccatggccatcgcaaagttctcccattcgctgtcgaactcgtgctgatagtgcaggcatcccttgatgacgttcacacagtagttggtacagggcttttccgtatatcccttgcaagcaccacagtgctgcatcttggtaagagccccagtacaatcggcattcagtcgcacctaaaagacaagcatatgatatgataagtatgaacggaatatccctatagttaacttacattgaggaccttcttcgccacctccgaagcggtggtcagagcctggccataggtgcgcgtggccacaaaggatcgcttgatttgcacggacagcttgtccggaacatctccgaaaggcttcagctccttcatgtgctcgctgacgcatcgcatgtagctggaaaataagattaaatcggtggaaaatgagtgcggaatgttgggaaaaatattttcattgggcgtactgatggcggcagaaatctgcacttgtaaatggcacggctcaacgccatcgcctccgctcccgacttcaccaacatcatcatcggcgcattctttgccgccgccgcacaactaaaaatttttatgcggaaaaatcataaaaatagttgctcgccatgtgctggctttgttgatgtttttgtttccccctgcagcacctctatgcagtaagtatgtgcctagtcctacagtttggccatcgagcatgacagtcattgcacttgtacggctgcattcaggccctcactgtcactgccttcgccattatggtcaagaagtcgctgggttccccgttttccttcttcacttttgctaaacaatttaggaattactgcaagtcgcattcacaaaggtgacagatcagtcaagcggcagcaccagcagctgcaaatcgctgatgggaggggagattgtggagttcggatgccctagatgtctaatcattcagaactccatcaatgtaatagtttgttctatgtatgttactgttaggtagcaaaagttggtaagaactaaattaattaaaaacatagagcgtgcttattagagtttaaacagccctttaccatcatttatctatggtttcactcctatttgtttctatatttgtcacgccatttgacttctcatccctaggacatattgcatatcagggttctatttaaacacccgttgacttcccatactttacttcactgttttggccaaaccccccaaagtctgccagacaaactaactgcttaagctaccccctcattaaatagccaggaggagaaccttagttcccaggtccagctctgtgttgtgcggggcatctgatccattctaagggcacaaccaacacagttcaagcgaccgaccaaccgcacagaacaaactacaaccacaaacaaataacagggggacaatacacaggaagaaaatgtgtagatcattaatattttaaagaagaatataaactgagaacttaaaccactttagccttaatgttggaatactcaacgtccatttcgtatcataaccatttgcgcgatgacaaaaatcctaatgactaaatgggcactatttttgggcagtgtagaaggggcaggcggctggcaagtgccggcaattacgcgacatcgttgttgtcgttgctgctgtccaatggcaataaacgacaacgtgccaaagcacgtacgacaaactaaaacgatgacaataaaagcgaatcgctggagttgagctaagagttggagacggagtttaagtcagcggcatcaattggaaagcgcgtgggtaacacgagcccttcgccaacgaggagtggccgtgcagggagcagaagtcatttggccaagtcgccggttaccggagaccagtggagaccgttccggggcaatgagccaagtgggcgcaattttcgctttttttttcctcctcctcaccattttggcggaaattcgagcagctgccacaggaactggcataaagtgcggtttttggttttggctgtgttatgggataggatgggaaatggtgcatactatacatacgtggtgggccggaatgagttggccgggatgaataaatcgcagtaggtagattggcagtgggacgtgatgtaatatcacccatgtgggagacaatctgtctgtagactaagaggaggtcggttcagatagtctgtatctgaatgctaaatctcaaccattggaaaatctaaaatttgtgcttttgctcatcatattgtaggatttctaaattacccgacaatttcctcattttctctttgctgtaagcgtttcaaccgcaatcgaaaaatctggcaaaaaccagagcaacttaaaactctaaagagcggagaaagaaaaaatccataggatactcatatcaggaatatcagctaactgaaatcgcacaccggccgtgtcaaagtttcgacgggccgtcaagtaagttagttgtcgtcggtcgacagcccgagacactttgcggtttcacacgtttggtttttgccaactaaaggcgtagtagtaggcctctaaaaatcggtctcgctttggagcatcgggttttggatttcgcagactactactcacttttcatcaaatgtgtactgggtgttcagcacggtgaacatcttctggtatagcgtattgaagaacttgtccatgacctccagcaagtccacgcgaccgttggcgaagtaggtttccaactccttgaacagatccgagaagacgtacgaatttctctcgtaaatgacgccgtatgttcggatgaacatactattgaactgcgttcgcgactctttgagcagggccgtgaaaatatctgcaagcggaaaatcaaattagtgaaaaatgtaacgagaatcgattgtgcggtgggaggggatcaatcagcgcacacatccgctctacccgactaaatgtttagatgttcgattttatttctagccagcatccgctggaaaatatagcatgccggcacatccgcattgtcgcctgccacttgacattgtcagtaactcgatgcccgcatcatcgtctctcaatggagatcatatatctatatatatagatcagggttctattctgtgtgggggcagaaccacttgacgcccgaaagatctctaatcggtggcttctgtggcattttcaagtggctccttgacgcaacgagttttaggctgaatcggtgacctacctttgaattttgtggccttgctgcccaggattccagacatacgagagatctggtccttggtgtgcccttcgagctgctggcgggattgcatcgccatgcgggtctccatgttgtaggtgcaacaagtgcccaccgaaggggactcgcaatatcgtaggactcgttctggaataaatagagaaatataatcatttaaatgctatgataatacagtgtaagtggtaccattttgttaatctcttaaatgtttcgtatcccctcaacggaatatttctcactgtttggtagcaattctcacatttctactgcttctattagctcagatctagttagttattctcaaggtatacaattctactgactgccacttgtttacccaaatattagaccgacttccagatgcataacgttgcattgttgcccgccacgaatgaaggtctatcaacattccaggaactagcaccgcagtcgagtgcattttgccacttgacatggtaaccaaataccaaataccgaaaagcaaagcctgaccagctaacagggattcgttggaaaaaataaagcaaacgaagcatagctactggtaagcgcaagtatttcgaagtagtacctaaaaccaaagtcggcctaaactacacacaaagaagaaaagtttgagtattcctactcgctgcctgttttatttacgcaagcatttaacacattttttgggagaaaattagaggaaaatatgcattagttccctgcaacgatgagttcatttcggtcgactacctattttccccccagctttatgcgatctttttttatagccgcgctgcggatcgatgtttatttagataattctcgggcagcagaagagaaggagatggtggatcggcgatccaaaagttcaacactaattgaaagcaaacaagttggaagttgtacttttttttttggttctcaatccaaatccgaatcggaatttgtatttatattccatttcgtttttgtgcgctcataaattcccgctgcccagttaaatgcatcatctgctgtgcacacatactagtgtgctagtatatggagtgctgcacagtttgtttatttcttttataaatttagat

SEQ ID NO: 40811 - DNA, 2796 bp, DROSOPHILA
atggagacccgcatggcgatgcaatcccgccagcagctcgaagggcacaccaaggaccagatctctcgtatgtctggaatcctgggcagcaaggccacaaaattcaaagatattttcacggccctgctcaaagagtcgcgaacgcagttcaatagtatgttcatccgaacatacggcgtcatttacgagagaaattcgtacgtcttctcggatctgttcaaggagttggaaacctacttcgccaacggtcgcgtggacttgctggaggtcatggacaagttcttcaatacgctataccagaagatgttcaccgtgctgaacacccagtacacatttgatgaaaaccaaaaccaaaaaccgcactttatgccagttcctgtggcagctgctcgaatttccgccaaaatggtgaggaggaggaaaaaaaaagcgaaaattgcgcccacttggctcattgccccggaacggtctccactggtctccgctcaactccagcgattcgcttttattgtcatcgttttagtttgtcgtacgtgctttggcacgttgtcgtttattgccattggacagcagcaacgacaacaacgatgtcgcgtaattgccggcacttgccagccgcctgccccttctacactgcccaaaaatagtgcccatttagtcattaggatttttgtcatcgcgcaaatgttgtgcggcggcggcaaagaatgcgccgatgatgatgttggtgaagtcgggagcggaggcgatggcgttgagccgtgccatttacaagtgcagatttctgccgccatcagtacgcccaatgaaaatatttttcccaacattccgcactcattttccaccgatttaatcttattttccagctacatgcgatgcgtcagcgagcacatgaaggagctgaagcctttcggagatgttccggacaagctgtccgtgcaaatcaagcgatcctttgtggccacgcgcacctatggccaggctctgaccaccgcttcggaggtggcgaagaaggtcctcaatgtgcgactgaatgccgattgtactggggctcttaccaagatgcagcactgtggtgcttgcaagggatatacggaaaagccctgtaccaactactgtgtgaacgtcatcaagggatgcctgcactatcagcacgagttcgacagcgaatgggagaactttgcgatggccatggacaaggtggcggaacgactgctgggatccttcaacattgtgatggtggtggagccactcaacatcaagatctccgaggccatcatgaacttccaggattctggccaggacatcaccaaccgcgtattccaaggatgcggtaggccaaagttgaagaaaatgaaacggtccatcagccccaaactgcaaggagttcaaatcctcaacgcaaggagtcctgtggaggccgatactctggacattgatgaaacgttggacgaggcgattgtgctgagagaacgcagagctgctgagcccggctcacaggagacatcggcgcaacagtctcaagagcaaggagttggaaagagtggaaatggaggaggaggcggtggcggtaacaacaggcggcaacagcaacgtcgaaagcagcagcaacagcgacgcaaacagcaaaacaatcgcgacgacaacgatgacgatgacaatgagagcggaggtggacgtgaaccgattctggacaggatcgtgagggacattcgccagcgagtgaaggactacaaaaagttctggtccaatctgccgcactcggtttgtagcaacgaggatatagcctccagttccgatgtggacggcatgtgctggaatggtcacacaattgatagatacatgcactcaatcaccacagaacacggctcgaatccggagtttacaggcaatcctgccagtactaagcaaacagctcaaatggcctctcaactaagtcatctgaagaatgccattgtccaccttcgaaatgcctacaacggccaggatgttgagtggagcgaacaagaagaactgccatatgcgggtagtggagctggttctggatccgggtccgaagacgacgaggacgatgacgagggctctggcctgggacccttcgaacccagccataagccggacgtggagcgtccttcggtggatgcagacaacgacgatgacgaggacgccggtggacggggtcacatgcccacgcacacatctcgaccgacgagcggagtggacgacaagaatccgctcatccacaccactcacttcgaccaagatcacaacgatctggatgaggatcataggcagctggatgaggatgaggacacggatgcaggccatgacggggccaatgacaatcgatcatccgatgccccagaaaagatgacgctgcgtcgcgctctggttgtttatctgctgcccctttatatggcgtggttcggtggcgtctgcgccgatttgctgtgattactcaacgtgcgaaatgcagccaagatggagcacggctgcatcccctacacctctcagtcattcatccgtgaagcaaaatgttattagcagaactacatgctaccccttatatacgaaatgcgagtccaaaattttataaaaacttttgatagtagcaatcaaaacgcaatcaagaaaataggtaatttttcgaattttactctcgtcaggaattttttcaaatttgaattggatgaaatctcactctaaatctaaaatttaatttttgaaaactaccagatattgtaaaaatcagaaaatgcctgatctaaagcggttctttaatgagacccgatagga

SEQ ID NO: 40812 - protein, 817 aa, DROSOPHILA
METRMAMQSRQQLEGHTKDQISRMSGILGSKATKFKDIFTALLKESRTQFNSMFIRTYGVIYERNSYVFSDLFKELETYFANGRVDLLEVMDKFFNTLYQKMFTVLNTQYTFDENQNQKPHFMPVPVAAARISAKMVRRRKKKAKIAPTWLIAPERSPLVSAQLQRFAFIVIVLVCRTCFGTLSFIAIGQQQRQQRCRVIAGTCQPPAPSTLPKNSAHLVIRIFVIAQMLCGGGKECADDDVGEVGSGGDGVEPCHLQVQISAAISTPNENIFPNIPHSFSTDLILFSSYMRCVSEHMKELKPFGDVPDKLSVQIKRSFVATRTYGQALTTASEVAKKVLNVRLNADCTGALTKMQHCGACKGYTEKPCTNYCVNVIKGCLHYQHEFDSEWENFAMAMDKVAERLLGSFNIVMVVEPLNIKISEAIMNFQDSGQDITNRVFQGCGRPKLKKMKRSISPKLQGVQILNARSPVEADTLDIDETLDEAIVLRERRAAEPGSQETSAQQSQEQGVGKSGNGGGGGGGNNRRQQQRRKQQQQRRKQQNNRDDNDDDDNESGGGREPILDRIVRDIRQRVKDYKKFWSNLPHSVCSNEDIASSSDVDGMCWNGHTIDRYMHSITTEHGSNPEFTGNPASTKQTAQMASQLSHLKNAIVHLRNAYNGQDVEWSEQEELPYAGSGAGSGSGSEDDEDDDEGSGLGPFEPSHKPDVERPSVDADNDDDEDAGGRGHMPTHTSRPTSGVDDKNPLIHTTHFDQDHNDLDEDHRQLDEDEDTDAGHDGANDNRSSDAPEKMTLRRALVVYLLPLYMAWFGGVCADLL

SEQ ID NO: 40813 - DNA, 3145 bp, DROSOPHILA
agcacgatgatggtggcgatcagccgtgtttccgcaaacattttcttgatctgcttgaagggacccatgagaaagcaggtactgaaaccggagaagagagactcattagccggcttgtgtgaagtacgagtggaacggaaccagcaactcgctcacctggccatcgagatgacgtttcctagagtgtagaagaccgcaaagaccacaatgcccctgtgcagaaatagggcgaccgagccgagtagggaaagtaagatgcccaaggcaaagcagatgacgaatcccttgatccgagtggaccagctcaaagtggacatgtcgttgatctgcgtatgtaattgattgatattaactaaatactttgataagcgttgggtcacacggcttggggcgccatgtgatcgcggggcgttgccagcggctagctcctaagccacgccataatcataattcctccagccagaatatgttaagggatctaatgagatctgtaccattagaaaatttcttcacctgcgtaatgatactgctctcctcctccggagtgggctcatctccactcagaacgcggcgcaacttgtccattatgcggcgattgaataatgttcaacaggtggctgacttggaattaccggcactcctctcggggggttttgcacatacaagggtctcttctgtttttatgctccggaattttcacaccaaaataaatccaagatcatacctagtgtgaccgtggtggtaaccgttaacatataccgtccgattaaaaattataccaacaatttgcaattttatatatatcttcataaaaaaactaaagaaatcagatattagtagtgcatttttgttcaagaatatccatttaaaaacaaatatgtttttatatcaaaatcatattcaaaatataattttagctttttctagctagcatgccatatttagaaactttggcagccaactgctggtcacattcgcgacatctggcaacgcctccagcatgttttgttcagctctacgtaacattttgaggaattcacaaaatgcggctaaaaacgcaacaattacctcacaaatacgaaatctgcgaggacaacaaagtgtccaccatgaggtagaagtgttaacatcaccgggtataaccaccaaacagaatgacaagaagaccgagcctgcggaatgtgaaggctccaaagaagtggctctggacttccgaaatcgggaggcccatgtgccttccttcaatttggcggcctatgtgaacaactcgagtaccctgcagcaatttctcagcttgggagtggatctgcacagtattgaacggcgaaagggattgggagactttgtactgaagctggatttcgagaaaaatgtgaagccctacataacgttcctggtggatcagggcgtatcacccgatgacttcggcaggatgttcaccaagaacccgctgctgttcaaggaggacttggacgatctgcagaccagagtgaactatctaaaaagcaagagattctcggacgaagccaggcaaagaattctcacccagaatccttattggctgatgttctccaccaggcgagtggatcgtcgattgggttacttccaaaaggagttcaaattgagtggtcatgatctgcgactgttggccaccagagaacccaatgccattacctacaatatggaacacctccgcaagtctgtgttcacccttaaggaggaaatgggattcaatgccaaggagctaagtgacctggtggtacgaaagccgcgcctcttgatgattcgtaagtctatctacattcaaaattaaggacatttgtaattaaacaacttatccttgcagctccggatgatcttgtcgagcgatttagttacattcaccaggatatgggccttccacatgcccagattgtccagtgcccggagcttttggcctcacgcgaatttagactgcgggaacgtcatgagttcctgaaattgcttggaagagcgcaatatgatccgcaaaaagacctgtatatatcgccaaaaactatagtggaaggcaataacttttatttcgtccgaaatgtggctaaaagtgatttggaaacatttgatttgtttttgaaaacgagataagaataaaataaaagtaaatgtatatatacttttcatattcatatatgcatatgcatatattttcaaaagtcaacagaaaccaagttttatcattttaaaaataaccaccaataaatttacttgatacaagggatgccagatgtaggaaaacatagacacgcacctggattgctaccgtttctccatctggtcacactggacagcaacaaaagatttaaactacgcattaagcttgtgcgtagaaacgaatcgtgtttaattttagttacaagacagtcgcttcgggagaagcattaaacaaagttgcaatatttcggagctccagcggttggcttcagtccgaaaccagtagttatagtcaaatcgagtgcagcggcggagaaacagcgccaaacgaaaagtaaaacgcattttcctacgcatacataaacagcaaaagcgaatacacaaacacaggcagacatacggaagggccaaaaaaaacttggtcaaactcacgaaagaataatagaaatagtttaactttaaagcgagttaataataagcaataaacccaagttatctttggtgttgacgtgttgaacacacataccgataaacaaaaacaaaatgtctacgacaccaaaatcgagcgaagatttgctgggcggtaagttgtttgttttcgtctgctttgctctttcattcgtgtttttttgcgtctcccctttttacaatcataacaataacatggtaacccgttatgccgcattgttgttgttgcgagagtatctagacatgtgtatgtatttatggagttgtttgcaatttgttagtatccgcatcccatattttttcaaggctttgcgttgtctgctttttgatttctttctgcttttatttgtttactttgcacttgttcttgctccgcagagggggcgagaaagaaagagagacaacaaagaatccgcaaaactccgtatgaaaacaaagacaaagaagctgccaacgcactctttctccctccgctctttcattcatg

SEQ ID NO: 40814 - DNA, 1086 bp, DROSOPHILA
atgttttgttcagctctacgtaacattttgaggaattcacaaaatgcggctaaaaacgcaacaattacctcacaaatacgaaatctgcgaggacaacaaagtgtccaccatgaggtagaagtgttaacatcaccgggtataaccaccaaacagaatgacaagaagaccgagcctgcggaatgtgaaggctccaaagaagtggctctggacttccgaaatcgggaggcccatgtgccttccttcaatttggcggcctatgtgaacaactcgagtaccctgcagcaatttctcagcttgggagtggatctgcacagtattgaacggcgaaagggattgggagactttgtactgaagctggatttcgagaaaaatgtgaagccctacataacgttcctggtggatcagggcgtatcacccgatgacttcggcaggatgttcaccaagaacccgctgctgttcaaggaggacttggacgatctgcagaccagagtgaactatctaaaaagcaagagattctcggacgaagccaggcaaagaattctcacccagaatccttattggctgatgttctccaccaggcgagtggatcgtcgattgggttacttccaaaaggagttcaaattgagtggtcatgatctgcgactgttggccaccagagaacccaatgccattacctacaatatggaacacctccgcaagtctgtgttcacccttaaggaggaaatgggattcaatgccaaggagctaagtgacctggtggtacgaaagccgcgcctcttgatgattcctccggatgatcttgtcgagcgatttagttacattcaccaggatatgggccttccacatgcccagattgtccagtgcccggagcttttggcctcacgcgaatttagactgcgggaacgtcatgagttcctgaaattgcttggaagagcgcaatatgatccgcaaaaagacctgtatatatcgccaaaaactatagtggaaggcaataacttttatttcgtccgaaatgtggctaaaagtgatttggaaacatttgatttgtttttgaaaacgagataagaataaaataaaagtaaatgt

SEQ ID NO: 40815 - protein, 354 aa, DROSOPHILA
MFCSALRNILRNSQNAAKNATITSQIRNLRGQQSVHHEVEVLTSPGITTKQNDKKTEPAECEGSKEVALDFRNREAHVPSFNLAAYVNNSSTLQQFLSLGVDLHSIERRKGLGDFVLKLDFEKNVKPYITFLVDQGVSPDDFGRMFTKNPLLFKEDLDDLQTRVNYLKSKRFSDEARQRILTQNPYWLMFSTRRVDRRLGYFQKEFKLSGHDLRLLATREPNAITYNMEHLRKSVFTLKEEMGFNAKELSDLVVRKPRLLMIPPDDLVERFSYIHQDMGLPHAQIVQCPELLASREFRLRERHEFLKLLGRAQYDPQKDLYISPKTIVEGNNFYFVRNVAKSDLETFDLFLKTR

SEQ ID NO: 40816 - DNA, 2921 bp, DROSOPHILA
gacagccgagtccttgtcagatgatttatcatcatagtcctgtggaaaactttcaacagggaaaagaagcagaaagcaaaaggtcttcaacaccccaaaacccctcattctcagatagttcgccaggcgaggcacgcacttccagctgcccaaaacttgtgagtttttatcttcttttttccgatttttgtgtgcctgtgtgaactttagcttacatatatatttttttggtgagcaggatgacactttatcatgtctgggacggtgaccgggatggccaaaattcggatcccaggctgcccggagcgcacaaattgaaatgtgcctgtgtcagtcagagtaaatgaggcaaaacataaccgcagacccagcgggaagtaattgtaggtggcccgaagcctacaagtaccgccactcatggcctattaggtcgaacaagtatgaaaaatctcgattttgaagttttccttttgggcttctcactttttctttttttttcgttatgttgtatttgacttttgtgtgtgtctgcccttgacaaatatttagccaaattgatttttgacagcatcataataaaggctgcccgagtgcccaaggaatacttcatgcttcgtttaagcgtaattttcgattgacccgacatcaaggcccatgcggcgtatgcgcaatttggtagcaaaacaagcctaagtgccggcaattgaattggaattgcggaaaattcgaatcctctagcgtcaaaatatttggttgggatttgacagtaacgcatctaaatgtcattagattatggtttatctgctggtggttaagaatgttttaattcctgatacacaaagtaaatggccatataatattaaaagacatacatcttgtatctaagcaaacgatgcaaacaaatttttcagacacactaaaattttgagactataatttatactgtgtgttcctattgtgtaatatgaaagcaattaaaaattaattatttagtccgtttttaaaaattaacatagtctagttcgcgctgcaggcgcagagtgagccgtagtttcttcagctcactatcgtattttgcatgacaacgatcaacattgacgggatggggaagcggtaagcgtaagcggtacaaacatgtacccaaatccaattcagtttcctgcaagctgagcgacattttgtcagcagtcatttcctcgtccggcagggaaacctccaaaatgaggtcctcacagctggccgaggatccagtgcgattgcccatctaaaatatatatttcgtatgttgttaatctattctattgaaagtaaggactatccaacctgcaagaagacatcctcagtgcccactgcttggcgataggtcatcgtatactcgggagtcttccgcgattcaagtatatccatgtcttccttctcctgctgatcttgccattcttccagactctcgggctgttttttctcttcctccaccaagggagtgcacaaagggttgggcttctttttcttcttacccttagcggttccatcctccccattaggacgtccaattgttccagggtctatgcagggaatttatgattgaccaatctaatacaaataccttttacttactcatcttattgacaaccattgactcctcctcatcctcgctactgctgtagtcaatgccgcctcttctctgattgggattcagaaggccctgcagcattttcagctgttcgggatggtcaaagatcgacattttcactatgtggcttgaaggcactttatggacggactatcactggatctcacactttttcacaagttataaatatatttgtagctttagcttttagacaggttgagcactgctaggctaagctcgaccgaatgaagaaaatcgacaacccaagcttggcaactatatttcaggctactacattgatgtataaaagtatttcacattacttggaaaaatatatgcgaacttcttacctaaacgtaaaacaattctagacaatacaatgtaacattttatttattttccaagtgtagtagccttcgagattgtttatttagtttcccgggcaacgtgatttgaaatttcctggcaacgcggaaaattcgagaattgttcgtttccaaacaagccaaaaattaacaaagggttatagggtccccagttaccctattcaacaacagtttcccgccgttagcgacatttcactttcaactggctgccgaaactatgggacccactttaggcatttcaattaaaaacttgggcggcccatttagtggcaaactttttgccagagagccgccaactgtgctctgtgctcgaacaaaaatatttcacttgtcgaaaacaattgttttgtgaattataaattgtgtaattattgttccaggcttgaccttctgccttggtcatggccagtacaaattatgaacagcaaaacaaaacagaaatttgcatttttcacgctcgcccctcgagtggcgaagggaaacgctaatttgactttcaggcaaatcgtagggtggtcgacacgaaaacgtggccaagttaacaacacgattctggccaacagtgtggctcttctacaatggcaccgaccgcagcggggcacccagtttggtattcgacaaaaaggattctcgcctgtgggctgcttctgtcctcggtacgtgtttaatttgtttaacacgacctgtcgccgaaagtgtccccattctgtagggattttgcttcttgttctggttcaatggcgaccacttgacagttctggccgggcttaagccgaccatggtccacggaccatggctttgtcatttgcagcttgggtaagcgtggcactaacccggcttacagggctgttggctcaaaggacgaaggacggcaccggaaaagggacagaacactcttaaactgc

SEQ ID NO: 40817 - DNA, 810 bp, DROSOPHILA
tagcctgaaatatagttgccaagcttgggttgtcgattttcttcattcggtcgagcttagcctagcagtgctcaacctgtctaaaagctaaagctacaaatatatttataacttgtgaaaaagtgtgagatccagtgatagtccgtccataaagtgccttcaagccacatagtgaaaatgtcgatctttgaccatcccgaacagctgaaaatgctgcagggccttctgaatcccaatcagagaagaggcggcattgactacagcagtagcgaggatgaggaggagtcaatggttgtcaataagatgaaccctggaacaattggacgtcctaatggggaggatggaaccgctaagggtaagaagaaaaagaagcccaaccctttgtgcactcccttggtggaggaagagaaaaaacagcccgagagtctggaagaatggcaagatcagcaggagaaggaagacatggatatacttgaatcgcggaagactcccgagtatacgatgacctatcgccaagcagtgggcactgaggatgtcttcttgcagatgggcaatcgcactggatcctcggccagctgtgaggacctcattttggaggtttccctgccggacgaggaaatgactgctgacaaaatgtcgctcagcttgcaggaaactgaattggatttgggtacatgtttgtaccgcttacgcttaccgcttccccatcccgtcaatgttgatcgttgtcatgcaaaatacgatagtgagctgaagaaactacggctcactctgcgcctgcagcgcgaactagactatgttaatttttaa

SEQ ID NO: 40818 - protein, 210 aa, DROSOPHILA
MSIFDHPEQLKMLQGLLNPNQRRGGIDYSSSEDEEESMVVNKMNPGTIGRPNGEDGTAKGKKKKKPNPLCTPLVEEEKKQPESLEEWQDQQEKEDMDILESRKTPEYTMTYRQAVGTEDVFLQMGNRTGSSASCEDLILEVSLPDEEMTADKMSLSLQETELDLGTCLYRLRLPLPHPVNVDRCHAKYDSELKKLRLTLRLQRELDYVNF

SEQ ID NO: 40819 - DNA, 6009 bp, DROSOPHILA
atcagggcgtatcacccgatgacttcggcaggatgttcaccaagaacccgctgctgttcaaggaggacttggacgatctgcagaccagagtgaactatctaaaaagcaagagattctcggacgaagccaggcaaagaattctcacccagaatccttattggctgatgttctccaccaggcgagtggatcgtcgattgggttacttccaaaaggagttcaaattgagtggtcatgatctgcgactgttggccaccagagaacccaatgccattacctacaatatggaacacctccgcaagtctgtgttcacccttaaggaggaaatgggattcaatgccaaggagctaagtgacctggtggtacgaaagccgcgcctcttgatgattcgtaagtctatctacattcaaaattaaggacatttgtaattaaacaacttatccttgcagctccggatgatcttgtcgagcgatttagttacattcaccaggatatgggccttccacatgcccagattgtccagtgcccggagcttttggcctcacgcgaatttagactgcgggaacgtcatgagttcctgaaattgcttggaagagcgcaatatgatccgcaaaaagacctgtatatatcgccaaaaactatagtggaaggcaataacttttatttcgtccgaaatgtggctaaaagtgatttggaaacatttgatttgtttttgaaaacgagataagaataaaataaaagtaaatgtatatatacttttcatattcatatatgcatatgcatatattttcaaaagtcaacagaaaccaagttttatcattttaaaaataaccaccaataaatttacttgatacaagggatgccagatgtaggaaaacatagacacgcacctggattgctaccgtttctccatctggtcacactggacagcaacaaaagatttaaactacgcattaagcttgtgcgtagaaacgaatcgtgtttaattttagttacaagacagtcgcttcgggagaagcattaaacaaagttgcaatatttcggagctccagcggttggcttcagtccgaaaccagtagttatagtcaaatcgagtgcagcggcggagaaacagcgccaaacgaaaagtaaaacgcattttcctacgcatacataaacagcaaaagcgaatacacaaacacaggcagacatacggaagggccaaaaaaaacttggtcaaactcacgaaagaataatagaaatagtttaactttaaagcgagttaataataagcaataaacccaagttatctttggtgttgacgtgttgaacacacataccgataaacaaaaacaaaatgtctacgacaccaaaatcgagcgaagatttgctgggcggtaagttgtttgttttcgtctgctttgctctttcattcgtgtttttttgcgtctcccctttttacaatcataacaataacatggtaacccgttatgccgcattgttgttgttgcgagagtatctagacatgtgtatgtatttatggagttgtttgcaatttgttagtatccgcatcccatattttttcaaggctttgcgttgtctgctttttgatttctttctgcttttatttgtttactttgcacttgttcttgctccgcagagggggcgagaaagaaagagagacaacaaagaatccgcaaaactccgtatgaaaacaaagacaaagaagctgccaacgcactctttctccctccgctctttcattcatgtcatgtcttgttcctttactttgcacttagcacgcttgacgtcagttgtggtttactttttgcgctccccatttccccgacccggtcttcttcttccgtctggcttgctaaaataattcgtaaataaatacattttgtgggagggcatttccctatcggtcgtttccagaaattgcgcctttggcatattcgcttcaattgtatttcggctgcccactttatcaacatccacgtttacactcgcggaaaaactaggttatataaatttatactcatcaacgtacttgaatgtgtttttcaaaatctcttaattttatgaaaatcgtatgatggacaatattcaataaattttcttaggaattgcacgaaatgttgaaatattttgttgacataaagtataatctttttggttgactgcttgaaagcactttgtttgtttgtcgaaaaggttgttgactaccacagaaattatactacaattctgcaaagtcactcacaaaagtaatgccggacgaaaaatttgtttttcaatttactaccatccaagcagtattaatctaatcagttttagcccaaatcgaaccatatgttatgaaatacatcacttttgaaaggtttgacacagtttggatgtggaattccgttatcaatgatagcatataaatattattcatatgtatttctatacgtttgaatgaatctgatattaatcttttaaagctaagtatgtacatatgtatatgaaataagtgtgtaagtaatgcgccggcttgatctgtttcttgaccttaaaacacgtgcgaaatgaatgaccaacttagagaaacattttttctttgtgcactgtgccatatactacgcaagaaatcgtatcatgataccgaggagtcatccatccaataataaaggcggttcaatgggcccaactcagggtcttttggacagctgcgcatcaagatgcacacccgacaaagcccgaagagggtagggtagaaagagagagagagagggggagtgattgttagagagagacggagggtggttggccgaaagagagggagagaggcctacgtgccgtgagtcacaaagccattgtttttgtttttgccacccttctgtgcacttttgcttttgtttttgtttccattttcgtacctgtaacccggattcccgataatgctccaaatattgtttacctgtgcaaaacttctgcgtctacctgacatacgggcatttccattttctattttcgcaacatttccatcataaatgcatcatccttttcgtctagacgatgcatttagtattcaattgtcagcatgattggtgtgccacgtgagtgatctgaattattctgtaactgattccatcgcgaaagtgtctaaattagatgattgtacagtgataactcgagagaaagcaataccaggaagattttaaatttataatgtgacattacaaaattatagaaaaaattaattttaattaattagaaagtgaataatagatgatataagaggcgttgggtgtgatcgtatgtgtgattatatatatgcgtatacatgtaatcagttggttgtattattaggtagtttttaggaacgctacactgtactccttatcaagtaacttgcacgcttctcgtgcccatattgcatcgccagtttgtcttttttctcgatttgttttgaaaatgaaattttctccgtagagcattgataagcatcggcttgtatagactataaacaaaacatgtgtgctgctttatatacacagtatgccgaaaagaaacggaaattatgcgagtggtggggtttttagcgttatcaatggggcacgagcactcgaacagatatatacaagcacatacattgcagatccggctaacgaatcgaacgtatgtatggttaaaatgtttttacgtgtaaacaaaaacgaagacaaacgctgaaagggtgacgatggcacatttttagagccgctgccgccgcacagtggctctcaaactgcacgcctttctgagtaaacaagtgaaactactttattttgtcagcaagtgtaattttagacaagggattactttaaactgacgtttatcagcttagaaataaataaactgtttcataaataaacagttaaatagggttaaaccattcaaaacttaaacatcgtaaaatattgatatgttctgtatgaaaatttctaaaattaaattaaaaattgttgttaacgaacctagaacgttttcgtttgtataaattcaataaagaacgtcataacgcacgtctgtgtttggacttctcatgtttattcaacacgccccaaaaggtttcgaccctcgagcctgtgctatatttaaccacctccaaatgcaaccaactaaatatttaatttcaccccatttggctttagctttcacccactttgttcgccagtctatcatgctaatgatctactttccagaatcttggatcgaactcagcacaacagctgcgatggctggcatcaagagccccgacagaatcactccgttgccattcaacaatggcgaggagtacctgagacttctgcgcgaggcccagcgcgagtcgaaccagtcgagccgtgtcgtctccttggccagctcccgtcgtgatacgccccgtgatagccccaagagtccaccgaacagtccccagtcggagctctgtccggatgatgagctcagaaacgtgtacatcaactactggaccaaggtaagagatgagaatcgaggcggaaccgaggtgatcttgctaacaatgccagtctctgtttttgcttttgccagggaggagacaaacagaatgcaggcaatgaagattggctgaagaactggaatcagccacccaggtatgaaagtttatttagctaagtttctagaatctagaactaagtttggagcattgcggccttttaccacaaatggtcattcattgaattattatttacagtagctggaacattgaggattcaagtcgggatgccggcgacgagggcgagaaaaagaagactaacacaggctactccatccgtttgaagcgactgggctccaactcgttgttctcccgcgaaattctgtactcgctgctggtgaccaacgtcctgtccctgctgctgggagctggattcgggtaagggtctctagcaatcttcaccagattcacatttcatgtaatggtatttatttataggctatggttgagcaagcgtggcatactccttacccgtgtggtcattgactgaaagatgccataaacaaaaaggagaaagaggaaatatatataatcgttttcaatctatcaatatgcacatcaatcgaaaacagaacacgatgcgttccatataagaaaacgaagtatacacatctatacagccaaccgtattccaactcatttgtatttttatcggaagtctatattttcgacaccttctcattcagtacatacctataaaaatgtaatttctaattactaagccagcaaactaaaacaggcctttgggcaatggttgaaactaagcgttttcatattttatataattttatatatttaacattatatcaaggcagcaaatctaatgatacagaaaagcatttatagatgctccatatattttgctttagccgtatgtcttagcacccaaccgtgcattatatccaatacaaatgtacgccgaacttcgtgttaagaatttcaatttcatcatcatacatcatatagaacaaccataaacatttgtagacatattatagttgaatcgtattgtatcctgattgtactttttgttgaacaatcgtcaaatgtttcgatacaataagcatataagaaaaacgatacaaaaggagaaaaaaaaacaatatggcacacataagattatatctttaatgtgagggaagggttatcccccacacaaaaaaaacagaatagttgtaatgattttttatattaaaatatttttcaatatctatttaaaagagcatctgcaaacatttttctttggtgggttttacggaattgcaagagatggcttagaaagttttgagaattttataatcttggaaagacggattagtgagatgaaagggattttcagggaagtgctgcaaggtattttgagatgccttttgtctaaaaggcattcccggtgcttgttgttgaataagtcgcctgttgttttgaaaatcgctagacgtgtacctgttcgcattatcaaactgtttcacataagtgagggcttggattac

SEQ ID NO: 40820 - DNA, 939 bp, DROSOPHILA
tcgcttcgggagaagcattaaacaaagttgcaatatttcggagctccagcggttggcttcagtccgaaaccagtagttatagtcaaatcgagtgcagcggcggagaaacagcgccaaacgaaaagtaaaacgcattttcctacgcatacataaacagcaaaagcgaatacacaaacacaggcagacatacggaagggccaaaaaaaacttggtcaaactcacgaaagaataatagaaatagtttaactttaaagcgagttaataataagcaataaacccaagttatctttggtgttgacgtgttgaacacacataccgataaacaaaaacaaaatgtctacgacaccaaaatcgagcgaagatttgctgggcgaatcttggatcgaactcagcacaacagctgcgatggctggcatcaagagccccgacagaatcactccgttgccattcaacaatggcgaggagtacctgagacttctgcgcgaggcccagcgcgagtcgaaccagtcgagccgtgtcgtctccttggccagctcccgtcgtgatacgccccgtgatagccccaagagtccaccgaacagtccccagtcggagctctgtccggatgatgagctcagaaacgtgtacatcaactactggaccaagggaggagacaaacagaatgcaggcaatgaagattggctgaagaactggaatcagccacccagtagctggaacattgaggattcaagtcgggatgccggcgacgagggcgagaaaaagaagactaacacaggctactccatccgtttgaagcgactgggctccaactcgttgttctcccgcgaaattctgtactcgctgctggtgaccaacgtcctgtccctgctgctgggagctggattcgggctatggttgagcaagcgtggcatactccttacccgtgtggtcattgactga

SEQ ID NO: 40821 - protein, 201 aa, DROSOPHILA
MSTTPKSSEDLLGESWIELSTTAAMAGIKSPDRITPLPFNNGEEYLRLLREAQRESNQSSRVVSLASSRRDTPRDSPKSPPNSPQSELCPDDELRNVYINYWTKGGDKQNAGNEDWLKNWNQPPSSWNIEDSSRDAGDEGEKKKTNTGYSIRLKRLGSNSLFSREILYSLLVTNVLSLLLGAGFGLWLSKRGILLTRVVID

SEQ ID NO: 40822 - DNA, 23620 bp, DROSOPHILA; identical to SEQ ID NO: 25894

SEQ ID NO: 40823 - DNA, 5121 bp, DROSOPHILA
atggcgcatccgcgtcgtcgtcgtcagccggagcgcgtatggctggtgcaccgcggtggtttcactgccgccatccgtctgccgactgcgtcttctggccgggatgaggagaacaagctaagcctgcgcctcctgcataatggggagcagctgaccgtcgacgaggacgatgtcgagaagcagaacagccccgccctggaccttgtcgaggacatctgcgagctgaagtatctgaacgaggcgtccgtgctccattgcctgcgtcagcgatacgccagcaatctcatccacaccaaggcggggcccacgctgctcgtggtcaatcccatggcaccgctgtccctgtactccgagaaggttgtctccatgttccgcggctgcaagacggaggatatgccgccccacgtctattcactggcccagaccgcctacaggagcctggtcgagacgcggcgcgaccagagcttgatattcatgggccgatctggttctggcaaatccactagcttcaagcatgcactcaactacctggcgttggcagctggtgcctataataattttataaacgcggagaaggtcaatgccctgtgcaccattctggaggcttttggaaatacgaaaacttgcctaaactcgaatgccacgcggatgacgcagctgttaagcctggatttcgatcaaaccggccagattgcatctgcctcattgcaagttctcctcccagaaagacaacgagctggccgacgacttggtcatgaacatagcttccacatcatgacgagacttttggctggcgctgctggcttgctacagaaggagctgcacctggagaacataacctctgaggacagccatccttttatatcgttatcccaaaagctggaagatcggcatcgagctgccaatgactttatgcgcactgttcaggcctttgagacgctgaacattgatgcgaaggcggtacgtgggatctggagcattttggcggccatttaccatctgggcattgctggcgtcacaaaactgggcactggctccacagcccgaactcagtttgccaatcccacggccgcccgaaaggcctcgggcttgttgggcgtgaatctggaggatctgtcatcagctgcctttggtcttacccaaccaaacgcccccaatggcggtctgagtccatcgaaatcgcccacctcggacactggacacgaatgggcctgggaatgtctcgaggcgttggtcattggtctatattcggaggccttggctgcagtggtggcattgatcaatcgtcagatctgcacatcgtcccacaccatagcctcaattatgctaattgacacgcccggcttccaaaatccagccagctgtggccagcaagtgggtgctactctagcggatctgcgtcacaactatctacaggagcgtctacagatgctcttccatcacaccacactggtggctccccgcgatcgctacgcccaggagctggtagaaatcgagatggacctggcatcggagtgtcatccgggaccgttgatctcgcttatcgacaaggcacctcagaatcatgtagtgcgctcgtcccagcgagatttgcgagagcatgatcgtcgaggaatgttgtggctactggatgaggaagctatctaccccaactccaacgatgacacattccttgaacgtttgttctcccactacggtgaccgggaacatcatagcctgctgcgcaaatgtgcaggtccgcgacaatttgtactccaccatctgcaaggcaccaatcccgttctctacgctgtcgatggatgggtgcgtcatagccgggagcacccaggtattcggaatgctgtatccctactacaggacagcagtcgggaggagatcaatcgcctatatatcggctcactgactcgaggatcgggagcaatggtgttttgtggctcttttgctggactggaaggcactcagtcacttcgtcgcgtgtccagtattcgccgctccttcacaacggccggagtaaagcgaaactccataatgctgcaggtgaagttcacagtggatggaattatcgacactttgcgccgcactggaactcactttgtgcactgctatctgctgcaacataacgcaggcaaacataccaagtacaccgccaatggatcgcccagctcagctgccggtcaggtgtccagcgaggaggaaatggtcaacgtgccactgttaaggagtcagctacgtggttcacaagtcctagaagcggctcgcttgcatcgccttggttttcccgaatcagtgccattgttggaatttgtcaggcgtttcgggcttttggccggggatttggctagcaataaggatgtgagcgtggagcagatattagctgtcaatgaactggatgtggccagctatcgcataggacccagccagatgtggtcggataaaagtgcagtttgtttgccgttgagtggcaacgcgagtgtcgccgcatcatttcgcaacagtgctcaaatcctgaacctattctatggcgaggggcatgaggattttgtggtgccgcagccaatcctgggactgctgaccatcggctgtgctatcgcctgcgtccgtataatcctcttccgctcaggagttcttagtgaactggaagccaagcgcgatgtcctgctctcagatcgcattatacagctgcaagcattttgccgcggctacttggcacgcaagaagatgtcccaacgaagggtccaggaactggcagtgcgttgcattcaacgcaatgtgaaggcattccttgccgttcgcgactggccgtggtggcgtctcctggtgcgggtcactcccctgctcaacgttcatcgcaccgaggagcagctgaagacggctaacgaggagctcctaatgctgcgagccaagctggagaagatcgagtgtgatcgcagtgaggtcaaggcagaaaaccaaaagctggaagccaagctatccgagctgacggtggacctggccgaggagcgatccacggctcatatagctaccgagcggctggaggcggaaaccgccgaacgcttgaagctggagaaggagctgggcgatcaaaccaacaaggtgaagaaccttcaggagacgacggagaagctggaaatggagctgatatgcgccaagtccgatctgaatggcatctctgaggacgaggatgcagagaacgaggatggggtcggcggcggcgtctacaagcttaagtacgagcgggtggccagggagctggagttcaccaaaaggcggttacacacgcagcatgagcacgatctggaacagctggtcgcgctcaagaagcatttggagatgaagctttccgatgcctacgaagaagttgtggaacaacgtcaggttgtgggccaatggaagcgcaaggcacagaagatgaccaacgagatgaacgatctgcgcatgctgctcgaggagcaaaatgcgcgcaacaatttgctcgagaagaagcagcgcaagttcgacgccgagtgccagtccctgcaggatgcagtgcgtcaggagcgacaggccaaagagcgctacggtcgcgaaaaggacgtcctgcaggccgagaagttcacactggagcaaacgctggcggacacccgtctggatcttgaattcaaggaggagaaacttgcatcgctacagcgcgagctggaggagatgacctttggtggcggcaccgaggaggagttcgcccaactgcggcgctccaaaaatgaaacagagcgtcgggccaaggaacaggaggaagaactggacgagatggccggtcagatacagctgctcgaacaagccaagcttcgcctggagatgaccctggaaacaatgcgcaaagaagcgcgccgtgagtcccagcagcgcgacgaagagctggaagaagtacgcggtaacggctacaagaagattaaagcccttgaatgccagctggaaactgagcacgaggagcggactctgctgctgcgcgagaagcacgagctagagcgacgtctctcctccatggaggatcgcgatcgtgccctgctcaaggacgcccagacacagttggagcggcttaaggctgacacgcctggcaagacgcttataagacaactgcgtaatcaactggaggatgccgaatctgctcgttcgctggctatgaaagcgcgacaaactgcggaagccgaacttactgaagtgcaggccatgttcgatgagtcgcatcgagctaggaatgacgcggaggagcgagccaatgccgcacacagagatcgggctgagctgcaggcccagatcgaggagaacgaggaggagctgggcgagctgatgaagaagtacagcgccacggtaaagcaactaaatacagagcaaatcaacgtatccgaggctgagtttaaactcaatgaaatggaagcagagcgcaataacctcaaggagcaggtggccgagctgcagcaccgactggacaacgttgagaacttgggggatccatctatggccatgatgtccaagcgactggagctgcgcaccaaggaattagagtctcgactggaactagagcaggccactcgggctcgccttgaagtgcaggtgaaccgtcacaaagaggctctggaaaaactgcagaacgaggtgacgcagtcaaagatgcgtgagatgcaggcccaggatgtaatcaaaaaatcgcaaaagagtctgcgcgacatgcgcgaagagttccacgctgtctccagccgcgagcaggagtcgctcacaaggcgcaaggacctggagaagaaggtggagcaaatggagtcggagggagcggcgcttaaaaacgatctacgactggctttacagcgaatagctgatctacagcaggcaatggaggaagagggcgaggaggagctgagcgaaagtgatgaaagcctcagttcggtgggctctatcagtgatctggaagatcgacttcggccagttcatgtaaaacgcagctcacagcagtccttgaacggcagcatcggcggcggaggcggaagcgttgtcagctccacccgcaccgtggtgttcgaaaaggacgacaacagcccgaggtacgctgataacgaagtcaactcgaacagcagaaagcagcacaagcattaa

SEQ ID NO: 40824 - protein, 1706 aa, DROSOPHILA
MAHPRRRRQPERVWLVHRGGFTAAIRLPTASSGRDEENKLSLRLLHNGEQLTVDEDDVEKQNSPALDLVEDICELKYLNEASVLHCLRQRYASNLIHTKAGPTLLVVNPMAPLSLYSEKVVSMFRGCKTEDMPPHVYSLAQTAYRSLVETRRDQSLIFMGRSGSGKSTSFKHALNYLALAAGAYNNFINAEKVNALCTILEAFGNTKTCLNSNATRMTQLLSLDFDQTGQIASASLQVLLPERQRAGRRLGHEHSFHIMTRLLAGAAGLLQKELHLENITSEDSHPFISLSQKLEDRHRAANDFMRTVQAFETLNIDAKAVRGIWSILAAIYHLGIAGVTKLGTGSTARTQFANPTAARKASGLLGVNLEDLSSAAFGLTQPNAPNGGLSPSKSPTSDTGHEWAWECLEALVIGLYSEALAAVVALINRQICTSSHTIASIMLIDTPGFQNPASCGQQVGATLADLRHNYLQERLQMLFHHTTLVAPRDRYAQELVEIEMDLASECHPGPLISLIDKAPQNHVVRSSQRDLREHDRRGMLWLLDEEAIYPNSNDDTFLERLFSHYGDREHHSLLRKCAGPRQFVLHHLQGTNPVLYAVDGWVRHSREHPGIRNAVSLLQDSSREEINRLYIGSLTRGSGAMVFCGSFAGLEGTQSLRRVSSIRRSFTTAGVKRNSIMLQVKFTVDGIIDTLRRTGTHFVHCYLLQHNAGKHTKYTANGSPSSAAGQVSSEEEMVNVPLLRSQLRGSQVLEAARLHRLGFPESVPLLEFVRRFGLLAGDLASNKDVSVEQILAVNELDVASYRIGPSQMWSDKSAVCLPLSGNASVAASFRNSAQILNLFYGEGHEDFVVPQPILGLLTIGCAIACVRIILFRSGVLSELEAKRDVLLSDRIIQLQAFCRGYLARKKMSQRRVQELAVRCIQRNVKAFLAVRDWPWWRLLVRVTPLLNVHRTEEQLKTANEELLMLRAKLEKIECDRSEVKAENQKLEAKLSELTVDLAEERSTAHIATERLEAETAERLKLEKELGDQTNKVKNLQETTEKLEMELICAKSDLNGISEDEDAENEDGVGGGVYKLKYERVARELEFTKRRLHTQHEHDLEQLVALKKHLEMKLSDAYEEVVEQRQVVGQWKRKAQKMTNEMNDLRMLLEEQNARNNLLEKKQRKFDAECQSLQDAVRQERQAKERYGREKDVLQAEKFTLEQTLADTRLDLEFKEEKLASLQRELEEMTFGGGTEEEFAQLRRSKNETERRAKEQEEELDEMAGQIQLLEQAKLRLEMTLETMRKEARRESQQRDEELEEVRGNGYKKIKALECQLETEHEERTLLLREKHELERRLSSMEDRDRALLKDAQTQLERLKADTPGKTLIRQLRNQLEDAESARSLAMKARQTAEAELTEVQAMFDESHRARNDAEERANAAHRDRAELQAQIEENEEELGELMKKYSATVKQLNTEQINVSEAEFKLNEMEAERNNLKEQVAELQHRLDNVENLGDPSMAMMSKRLELRTKELESRLELEQATRARLEVQVNRHKEALEKLQNEVTQSKMREMQAQDVIKKSQKSLRDMREEFHAVSSREQESLTRRKDLEKKVEQMESEGAALKNDLRLALQRIADLQQAMEEEGEEELSESDESLSSVGSISDLEDRLRPVHVKRSSQQSLNGSIGGGGGSVVSSTRTVVFEKDDNSPRYADNEVNSNSRKQHKH

SEQ ID NO: 40825 - DNA, 2727 bp, DROSOPHILA
tatatatatatatatagattaatatatctgcacttatgtgagcgacttgtttaagcatatattatcgctagaaataatatgaagcagccagtggtgaagtgattaagttcgagaaagaaagcaagacaaaagcaagagagtacgaaaataccagaaggcggcagtggaaaatcgatcagaaatccgccggaatcgccgccatgcatacgttattcagcgaccagaactcctttacgcgccactatgcccagaccgcagccggttacggatccgcatccgcggtggcggcggccagcagcgcctccgctgcagcagcggcacattacgcatacgaccagtactcccgctatccgtactcggccagcgcctacggcctgggtgccccgcaccagaacaaggagattgtaaagccaccttactcgtacatcgccctgatagccatggccatccagaatgcggcggacaagaaggtgaccctgaacgggatctatcagtacatcatggagcgatttccctactatcgcgacaacaagcagggctggcagaactccattcggcacaatcttagcctcaacgagtgcttcgtgaaggtggcccgcgatgacaagaagcccggcaagggctcctactggactctggatccggactcctacaacatgttcgacaacggctccttccttcgccggcgtcgccgcttcaagaagaaggatgtgatgcgggagaaggaggaggccatcaagcggcaggccatgatgaacgagaagctggccgagatgaagcccctcaagctgatgaccaacggcatactggaggccaagcacatggccgcccatgctgcccacttcaaaaaggagcccctaatggacttgggttgtctaagtggcaaggaggtctcccatgccgcaatgctcaactcctgccacgacagcttggcccaaatgaaccacttggctggcggcggagtggagcatcccggcttcaccgtggactcactcatgaatgtgtacaacccgcggatccatcacagcgcctatccctaccacttgaacgaggacaacttggccacggtggccagcagtcagatgcatcatgtccaccacgctgcggcggcccatcatgcccagcaactgcagcgtcatgtggcgcacgtggcccatcctctgacccccggcggccaaggagcgggaggccaatcgtccggacactcgcccaccacgatctcaactccgcatggtcccgcgcacgggggttggtataccccggaaacgccaccatcggaacccgttcctcacaatgggcagcagggcacacccacccacccgggacataataacaacaacagcagcagcgtactcaaccacaatggagtgggcaacggtggcggaggcggcggcggtggcggtggaggatcctccagcgtgctgaccagcagtcccacatcggcactgggtttccgcgacatgatcttcgagcagaaccaatcctgccaactggacaccggtagtcccaccggcagcctacaatccgccagtccacctgcctccgcatccgtggcagcggcatcagcggcagcagcggcggcggtgatcagtagccaccaccaccaccatcatcaccatgcggcgcttagcgggaacctgggccagctgggtcagctgagcaatctgagccactaccgaccgcatgtgggccactaccaggagtacggcatcaagtacggggtgtaagcctgtgggctggattctcggcgactgggctgggctctcttgtatattcctgtaaatacatacaccatataatatacccaagaacgagtctacacagcctgggggtggtgatccctcggggtccagagtctgctatctcagatctttttgtttccaacttgttttcgatttatccgtatacgaaataatgggggacatagctgttaagcaaccgcattaacgtattgtattgtattaactgtatttgtaattgtagctcgtaattgttatcgaatttaggcatagtcccaattgtctgctacgcaatttgtgatggggttttgctacacagaacataaacttaaattagagcattttgtcaataactaaaactaccgcatcggatcgatctatcatcgcctagtacactagcctagcccacgtaagcaataataaattatacaactaaatcgtagctataacataactatcaaaactagcgtaccaccaatatgagccgaacaaaaagtgtattgaaaatatgttaaaatatctcaaatcgtgtgttttatttggccccttcatattcggagcgactttcgctattccatctggccattgagcatttggctggcaaaacagactttttaccccgaaactggatagcccgcacgcagaattcctagataaataattattcaaggcgtgtccgtttcgagccccgaatgcatgactcaactggccaattgtcactggaagatggctttctgggtagccgtatcatatcatttggactcactcgatcagttggctgcagttccgatggacttgcaaacgtggacatatgtcgtttgtcaagcgatcggatagaaaacacttcccccctttcagtggaaataattatgcattcgaccttttggaataataaatgaaaatttccaggaaattgtatgcttcatatgcacgactagctatcgaaaggtatttacaaaaaagggtaactttagtatttataatatta

SEQ ID NO: 40826 - DNA, 1527 bp, DROSOPHILA
atgcatacgttattcagcgaccagaactcctttacgcgccactatgcccagaccgcagccggttacggatccgcatccgcggtggcggcggccagcagcgcctccgctgcagcagcggcacattacgcatacgaccagtactcccgctatccgtactcggccagcgcctacggcctgggtgccccgcaccagaacaaggagattgtaaagccaccttactcgtacatcgccctgatagccatggccatccagaatgcggcggacaagaaggtgaccctgaacgggatctatcagtacatcatggagcgatttccctactatcgcgacaacaagcagggctggcagaactccattcggcacaatcttagcctcaacgagtgcttcgtgaaggtggcccgcgatgacaagaagcccggcaagggctcctactggactctggatccggactcctacaacatgttcgacaacggctccttccttcgccggcgtcgccgcttcaagaagaaggatgtgatgcgggagaaggaggaggccatcaagcggcaggccatgatgaacgagaagctggccgagatgaagcccctcaagctgatgaccaacggcatactggaggccaagcacatggccgcccatgctgcccacttcaaaaaggagcccctaatggacttgggttgtctaagtggcaaggaggtctcccatgccgcaatgctcaactcctgccacgacagcttggcccaaatgaaccacttggctggcggcggagtggagcatcccggcttcaccgtggactcactcatgaatgtgtacaacccgcggatccatcacagcgcctatccctaccacttgaacgaggacaacttggccacggtggccagcagtcagatgcatcatgtccaccacgctgcggcggcccatcatgcccagcaactgcagcgtcatgtggcgcacgtggcccatcctctgacccccggcggccaaggagcgggaggccaatcgtccggacactcgcccaccacgatctcaactccgcatggtcccgcgcacgggggttggtataccccggaaacgccaccatcggaacccgttcctcacaatgggcagcagggcacacccacccacccgggacataataacaacaacagcagcagcgtactcaaccacaatggagtgggcaacggtggcggaggcggcggcggtggcggtggaggatcctccagcgtgctgaccagcagtcccacatcggcactgggtttccgcgacatgatcttcgagcagaaccaatcctgccaactggacaccggtagtcccaccggcagcctacaatccgccagtccacctgcctccgcatccgtggcagcggcatcagcggcagcagcggcggcggtgatcagtagccaccaccaccaccatcatcaccatgcggcgcttagcgggaacctgggccagctgggtcagctgagcaatctgagccactaccgaccgcatgtgggccactaccaggagtacggcatcaagtacggggtgtaa

SEQ ID NO: 40827 - protein, 508 aa, DROSOPHILA
MHTLFSDQNSFTRHYAQTAAGYGSASAVAAASSASAAAAAHYAYDQYSRYPYSASAYGLGAPHQNKEIVKPPYSYIALIAMAIQNAADKKVTLNGIYQYIMERFPYYRDNKQGWQNSIRHNLSLNECFVKVARDDKKPGKGSYWTLDPDSYNMFDNGSFLRRRRRFKKKDVMREKEEAIKRQAMMNEKLAEMKPLKLMTNGILEAKHMAAHAAHFKKEPLMDLGCLSGKEVSHAAMLNSCHDSLAQMNHLAGGGVEHPGFTVDSLMNVYNPRIHHSAYPYHLNEDNLATVASSQMHHVHHAAAAHHAQQLQRHVAHVAHPLTPGGQGAGGQSSGHSPTTISTPHGPAHGGWYTPETPPSEPVPHNGQQGTPTHPGHNNNNSSSVLNHNGVGNGGGGGGGGGGGSSSVLTSSPTSALGFRDMIFEQNQSCQLDTGSPTGSLQSASPPASASVAAASAAAAAAVISSHHHHHHHHAALSGNLGQLGQLSNLSHYRPHVGHYQEYGIKYGV

SEQ ID NO: 40828 - DNA, 3218 bp, DROSOPHILA
acgagataattgaaataattacccaacgagttacatagtatctgttatattacaaaattttacctttggacacacccagttcagcaccccaatccaattgaatccgcccctgcatcacacttaaataatatttacccagtcgacgccagtgagactctcacttctcatgttctccccatattttcatgtccctaagagagtaagagaatcggttttgcatgcacgtgtttcagtataatcacactattttctcaactttatggctctttacatacataggcatacgtacatacgtacaaatttaatgggatactcgctttttcaaatggaaagttttcggctttgcctgtgtttgaacaaaaccaaaaaataaaaaaaataagggaatacatctgccaaacaggaacgctcgtttgcgaagagatggggaaatatacatacatacatacataggacagcttggtctatttatgggtttctgcaattgttgttaataaattatctattgtcaatttcttttgctaccgattgcaccatgctgacgggcacaacaaacaaaaggccagactgttgcgtaagagtcaacaaactgttgttaattttcagcttctaaacaaataagaagagcaaaatgaaaatttataaataaatagcagggaaatgccaaggaaattggaaaacaaaaaccaaaataaacagacgcggtcgtcgactgagaggcagtgctaaagtggctgattaaatgaagacaacgaccgacatagcgtctaaatcttaacccactaaagcacaattttcattatcgcgaaacgcaaacaaaatgcaagcaattaaatgcaattaaaaatgacctttcgcaccctttttagttaacgcttaattaagtttatattttgattttctactgaaaatgtttcttatttttaaatactattgcttctgacctcgtgtaaacccatatagtgaactaaacaagctatctaaataaagatttgtaaaactatattgttgtcgcctcctccatttcaataatatacttcagtgcggaaaattcctctctccttcccctggaaaccttttcatctgggatatatgacgccaacagaatgccgataaacacagagatagctccaatcataaagggattggtcacagtgcgatctccacttacactgcctatcaaaattcgatttttatccaaatccatgtcggataggtagaatacgataccgaacagagcgggtccaagtccactacacaatcccgacattcccgtgatcattccctgaactgctccttgagtttcaacatccgtgtagagggatacgtaggcactcacggccggaaaggtgatggaactcagggcagctacatttccggctagccacatttgccacttttcgtatcctatggcgaagagtatgagttgcaacagttccaggagcaatccaagtattatagcattcttggcacccaatgtcttcactattgatcccaaggtcacgtttatcgaaatgcctaatatggccatgaacgccaccagcgtggagagttccgtgaaatcaaaccccattgttagtttcagataggctggcacactggaatattccccagcttcgggaagtagaaacgtgaacatcactacgcacagtagcagaacattaggatccgagcccactcttcgcagggatagaaaaggatccgcttgtttccagctcaatccagtggatctaacgttttgttgtaatgtttcgggcacagccagcagtacaaacatcacgttcgttgtggagaccaaagttgctactaacaccacagtattaattccgtaacgatccattatgagattacccattgctggggcgatcaccaagctggcagcaaaggtggccgatacaagttcataggatctagagcgctcttcctttgtggtaacatccgccacataggcgaaagccactgagaagctaacacccaatactccactgatcgaacttatcacaaagaaccaccagttatccatggtcatcatggggatcggtaaggaagtgaagatcactgttataaggagcagcactttccgcccatatatatccgataaagctccgatcaggggcgacgacagaaacgagagtattcccttgactcccatgaccaatccgttcattaggaacgtgtggtctgggaaggtctcctttagagtggctatcatgggcattgttagcaggccccatgcgaagtattccagaaaaacaactactagtatgtgcccaacacttggctttccaattcccgaagtagaggccaacgatacgagtaactttttcagaccgaacttggacatatgtatataatgggagttcaacatggagaatactaaactttcgagtttggaaattcaactgaactgaaataacaatttgtatggtctttcagcgtagctaataccttttggtgattagttagttaggtgagtccgaaaatggtataagaacttgaagttttctacacgtttaaacagtcgatatttgtcgcaaatccaaaagtttcgagttgaagacttttaattaagttaaaaattatttaaattacagatacgtaagtctacattctttaaatccaaaccaaagtagcagtcattaatatctacttataaatatccttatttttcgcctttaaggaatgttttcgttggcgactctagtttcttcatttccaagagtatccttcttaatgaaactgctcaagacgatggccacaaaaacactgatggcacttatgacgaagggcattgaaattggagaattgaccttaagatcagtctccgaatcatcctgaaaaatgaagaagagtaatccgaaaaaggcaggtcccacaccctcgctcaagcactcaattccagagataatgcccaggacagcaccccgattatcgggactggcgtagatggaagccaccgcattattggcagcgggtataattgttgccagtgcggccaagatactgcttaaccagtacatccaatgatgggttccaaagccgaagaaaagcatttgcaagaacaatagtaaaagtcccagacggatcgaccacttggcccctactatattcataatataaccgagtagtatattggatgtgatcgccagcacagatagtaatcccaacatcatggacacctcctcgtactcaaatcccatattagttttgagataaac

SEQ ID NO: 40829 - DNA, 1218 bp, DROSOPHILA
atgcccatgatagccactctaaaggagaccttcccagaccacacgttcctaatgaacggattggtcatgggagtcaagggaatactctcgtttctgtcgtcgcccctgatcggagctttatcggatatatatgggcggaaagtgctgctccttataacagtgatcttcacttccttaccgatccccatgatgaccatggataactggtggttctttgtgataagttcgatcagtggagtattgggtgttagcttctcagtggctttcgcctatgtggcggatgttaccacaaaggaagagcgctctagatcctatgaacttgtatcggccacctttgctgccagcttggtgatcgccccagcaatgggtaatctcataatggatcgttacggaattaatactgtggtgttagtagcaactttggtctccacaacgaacgtgatgtttgtactgctggctgtgcccgaaacattacaacaaaacgttagatccactggattgagctggaaacaagcggatccttttctatccctgcgaagagtgggctcggatcctaatgttctgctactgtgcgtagtgatgttcacgtttctacttcccgaagctggggaatattccagtgtgccagcctatctgaaactaacaatggggtttgatttcacggaactctccacgctggtggcgttcatggccatattaggcatttcgataaacgtgaccttgggatcaatagtgaagacattgggtgccaagaatgctataatacttggattgctcctggaactgttgcaactcatactcttcgccataggatacgaaaagtggcaaatgtggctagccggaaatgtagctgccctgagttccatcacctttccggccgtgagtgcctacgtatccctctacacggatgttgaaactcaaggagcagttcagggaatgatcacgggaatgtcgggattgtgtagtggacttggacccgctctgttcggtatcgtattctacctatccgacatggatttggataaaaatcgaattttgataggcagtgtaagtggagatcgcactgtgaccaatccctttatgattggagctatctctgtgtttatcggcattctgttggcgtcatatatcccagatgaaaaggtttccaggggaaggagagaggaattttccgcactgaagtatattattgaaatggaggaggcgacaacaatatag

SEQ ID NO: 40830 - protein, 403 aa, DROSOPHILA
MIATLKETFPDHTFLMNGLVMGVKGILSFLSSPLIGALSDIYGRKVLLLITVIFTSLPIPMMTMDNWWFFVISSISGVLGVSFSVAFAYVADVTTKEERSRSYELVSATFAASLVIAPAMGNLIMDRYGINTVVLVATLVSTTNVMFVLLAVPETLQQNVRSTGLSWKQADPFLSLRRVGSDPNVLLLCVVMFTFLLPEAGEYSSVPAYLKLTMGFDFTELSTLVAFMAILGISINVTLGSIVKTLGAKNAIILGLLLELLQLILFAIGYEKWQMWLAGNVAALSSITFPAVSAYVSLYTDVETQGAVQGMITGMSGLCSGLGPALFGIVFYLSDMDLDKNRILIGSVSGDRTVTNPFMIGAISVFIGILLASYIPDEKVSRGRREEFSALKYIIEMEEATTI

SEQ ID NO: 40831 - DNA, 3796 bp, DROSOPHILA
accactcgatgccaacaagtggataagaagccaccacacaaatgatgcccaaacgaactatcaatgtcagtgaattggcaaaaaatttaaactcaatttgtatgcaggcctgcggagctggaatttcaaatgtggaggaagatggggtccggcgacgaggaaaccctttagccccggctgacacacctcaacgatgcagcaagctgaagtgggtccaccgcatccaggtctgtcgcggcattaatgtgccatcggagagtgtgcgctcgctgaacacatagtcggattggtaccaatgttttgggatcgagatcgggttgggagtcgggagatgggagctcctaagccgctaaagcatgcgtaacaatggccaacacgaaatcttaatgatcgctaagccaaggaggagtcgatgaccatgcacttctccgaatgcccagaagagctggcgagttccattcattgattcattcaggtcgggccctaaatgaagtgctccaagtgttttcaacgcacgcaggatcgattttcatgtttattatttcatttttcgtacatgtgtgtatgccatcgcatatatggcttcctctgcctcttaactctaaatacaatacaatacaatacaaagcgctggcgaatgagtttcggaacataattagaatttgaagccaacagttgttaatcaatactaataatcaatatacagggtgcgtaataataaaagtagtacacataaaatataaaattgtttttaaagcaaatataacagatgcacgtgccggtgaatactcctcaaaacactatatcttcgtctacgagtcgcagttttcgatttcagccagtattggaagttggattaaggattaaagccataatctcgcctaaggtccaaaggattgggtggggaattacggggtttaggggcctgcatgcggcaactcttgtcttttcacaacaatttactagtttggtttgaatcattcggagatgccggaaggctctaattcttgaactgaaaaacgagtatcaagatgatggccagcagcacggcgctcaggatgcccaccaaaataagcttcttcttgcgcactttgttctaataaacaacatatttaaattatttaaaataataaccttgtaggggcggcacttaccctgtaagagctcgccttgcgcagattttccgtgccctgcgagacaaaaatgctagtctgttccacctgcgactcgatggagtccaccgtcagtccctgctcgtagaccagggcgccaagcttcttgtatatctcgttcacgcccacgatgttgttctccaactcccgtatgacctgctcctgttcctcgagggcctgcaggtccgcctgctcctccatctgagtctgcatctgttgctggtttgatttgcgattgaagaagttgtcctcgaagaaggagttgttgtcctgctggctggcgctactgttggagctgccggtacgcgatgagccgggtggacgggcgatgttgtagctatctccgcgcgcctgccgcaacgccgtcttctctatgtccgccgtcttgcgctgaacagactaaaaataccaatgataaacaatcagcatgactcacaaaaccatttgcttatctgggagaacaaaaacaaacctggaaggcggtcagtgccgccgtgaactcgtccacgagcctatcccgctggatcttcaggtggcgctccttgcacttgtccacctcgttgatttgattgtttgtgtcggtcaccagctggttggtgtaggtcattatttggtggctgtggagtaagggattgttatttttatcgtgcgttatacattgatttgatttgtgaatcacactgtgctgatacgtttaaactttcaaaaccaatgactgactacaatgttattttgctgttggtttatgtggtcggttgatgtgcgcaaaatgtattaaaaggctgtattggcttaagaagatttttagacattgtgagtaaacacccaatagagatcttcactatgtctttagaatttatgatttgtctgagagatattcgaataatcgatgtatatctgcaatgggttctatctatggggacagtttaaattccaaacgaagagatcgtaatgataatcatcttacagctgcttcttgagctccggagaatcttggggcgtgttcagttgattgaccatgcgctgcatcgtggacactgcgaaagagacagaaacctagattagtcataggcgaaagttggcaagtgcttcgacgccactcaccattctgctgcaccttctggatgctggtggctataatctgggccagcctttggaaatctatttcgcttaggccacctcctcccccgccgcttagaccattctccatatgctgtaagtccatgctttcgtaggcagacactttgatgaccttcgagttatcgctggagacaagttgttcctggagagacagacaatcgaattagccccgtggcccacttatatcacattcgcttttatgcgtctcagccaggttcttgattctatattctatattcgtgcttgtttgttagtttgtctgtttgtcggaatgtttgcaattcgcattccctttgtttgctgcacagccacacaccttttgtggttgccctagctgtcgttggtgaccttcgccggtgaccttgatcttagagcatttccttcgcactttttacgcgtttcgcaatctgaaatttgttgatttaagtaggcggaatgttcgcaaaactgaaattttagctaggtttttacaacaattggaatggaactgccaacttgtgagaaagtcactttcgactaatacccaaaagtgccttagcgcgtgatgcgtttagcatcacttccttgctacgctttacagcacttcaattatatcgatatctggcgcggcattcaaatagcagatatatagaactgcattttaattatattcttccccctatattttgtctcgaaaatgtatataagtcctgagatttattattgaaaatcgatccatgtctaaaatgaactgcttaatgttattattcaaaattataaattattattttgcactttttctccaaaattaaaatgttagattaggaaaatgtcgtatagaaatgaaaatgaccaacaatgatgccttataaaacaaataagtcgaattttagacagttttccttccgttcaataaatatgttcataccaaatttaataataatgtaggtatacaaaactattttgcttacccagaatgttattcaaaacttaaaatttaacattgtacaactcagggtatttgaaacctgtttagcagaaataaaattgaagattattacttttcttaaaaaagtcaaataactggtagacaaaataagtgcaactcgtttataaaaaaaatcaaaagcaacttaattcaaattaacgttacaaattagtgtattggagatatttatcagtatccggtgtttggcacggttaatgaactttagatcgcagaatgaattaggctgcttcgatgcatccactaattacatcatctcctactgcgatgcaagatattatgcaaatgaccaatgcaacgaacctgatttttggagaacatcattttaatctaagctgtgctggctgcataatttgaataagggcataaatgcctttctttcatcccgaaattccggttggtaggtgtatttagaagctttataatacagggacgggttttaatttattgtctcagtgtttttttataattcgactcgcattttcggtccctgtcttac

SEQ ID NO: 40832 - DNA, 1074 bp, DROSOPHILA
cattccaattgttgtaaaaacctagctaaaatttcagttttgcgaacattccgcctacttaaatcaacaaatttcagattgcgaaacgcgtaaaaagtgcgaaggaaatgctctaagatcaaggtcaccggcgaaggtcaccaacgacagctagggcaaccacaaaaggaacaacttgtctccagcgataactcgaaggtcatcaaagtgtctgcctacgaaagcatggacttacagcatatggagaatggtctaagcggcgggggaggaggtggcctaagcgaaatagatttccaaaggctggcccagattatagccaccagcatccagaaggtgcagcagaatgtgtccacgatgcagcgcatggtcaatcaactgaacacgccccaagattctccggagctcaagaagcagctccaccaaataatgacctacaccaaccagctggtgaccgacacaaacaatcaaatcaacgaggtggacaagtgcaaggagcgccacctgaagatccagcgggataggctcgtggacgagttcacggcggcactgaccgccttccagtctgttcagcgcaagacggcggacatagagaagacggcgttgcggcaggcgcgcggagatagctacaacatcgcccgtccacccggctcatcgcgtaccggcagctccaacagtagcgccagccagcaggacaacaactccttcttcgaggacaacttcttcaatcgcaaatcaaaccagcaacagatgcagactcagatggaggagcaggcggacctgcaggccctcgaggaacaggagcaggtcatacgggagttggagaacaacatcgtgggcgtgaacgagatatacaagaagcttggcgccctggtctacgagcagggactgacggtggactccatcgagtcgcaggtggaacagactagcatttttgtctcgcagggcacggaaaatctgcgcaaggcgagctcttacaggaacaaagtgcgcaagaagaagcttattttggtgggcatcctgagcgccgtgctgctggccatcatcttgatactcgtttttcagttcaagaattag

SEQ ID NO: 40833 - protein, 282 aa, DROSOPHILA
MDLQHMENGLSGGGGGGLSEIDFQRLAQIIATSIQKVQQNVSTMQRMVNQLNTPQDSPELKKQLHQIMTYTNQLVTDTNNQINEVDKCKERHLKIQRDRLVDEFTAALTAFQSVQRKTADIEKTALRQARGDSYNIARPPGSSRTGSSNSSASQQDNNSFFEDNFFNRKSNQQQMQTQMEEQADLQALEEQEQVIRELENNIVGVNEIYKKLGALVYEQGLTVDSIESQVEQTSIFVSQGTENLRKASSYRNKVRKKKLILVGILSAVLLAIILILVFQFKN

SEQ ID NO: 40834 - DNA, 2862 bp, DROSOPHILA
gcaactcttgtcttttcacaacaatttactagtttggtttgaatcattcggagatgccggaaggctctaattcttgaactgaaaaacgagtatcaagatgatggccagcagcacggcgctcaggatgcccaccaaaataagcttcttcttgcgcactttgttctaataaacaacatatttaaattatttaaaataataaccttgtaggggcggcacttaccctgtaagagctcgccttgcgcagattttccgtgccctgcgagacaaaaatgctagtctgttccacctgcgactcgatggagtccaccgtcagtccctgctcgtagaccagggcgccaagcttcttgtatatctcgttcacgcccacgatgttgttctccaactcccgtatgacctgctcctgttcctcgagggcctgcaggtccgcctgctcctccatctgagtctgcatctgttgctggtttgatttgcgattgaagaagttgtcctcgaagaaggagttgttgtcctgctggctggcgctactgttggagctgccggtacgcgatgagccgggtggacgggcgatgttgtagctatctccgcgcgcctgccgcaacgccgtcttctctatgtccgccgtcttgcgctgaacagactaaaaataccaatgataaacaatcagcatgactcacaaaaccatttgcttatctgggagaacaaaaacaaacctggaaggcggtcagtgccgccgtgaactcgtccacgagcctatcccgctggatcttcaggtggcgctccttgcacttgtccacctcgttgatttgattgtttgtgtcggtcaccagctggttggtgtaggtcattatttggtggctgtggagtaagggattgttatttttatcgtgcgttatacattgatttgatttgtgaatcacactgtgctgatacgtttaaactttcaaaaccaatgactgactacaatgttattttgctgttggtttatgtggtcggttgatgtgcgcaaaatgtattaaaaggctgtattggcttaagaagatttttagacattgtgagtaaacacccaatagagatcttcactatgtctttagaatttatgatttgtctgagagatattcgaataatcgatgtatatctgcaatgggttctatctatggggacagtttaaattccaaacgaagagatcgtaatgataatcatcttacagctgcttcttgagctccggagaatcttggggcgtgttcagttgattgaccatgcgctgcatcgtggacactgcgaaagagacagaaacctagattagtcataggcgaaagttggcaagtgcttcgacgccactcaccattctgctgcaccttctggatgctggtggctataatctgggccagcctttggaaatctatttcgcttaggccacctcctcccccgccgcttagaccattctccatatgctgtaagtccatgctttcgtaggcagacactttgatgaccttcgagttatcgctggagacaagttgttcctggagagacagacaatcgaattagccccgtggcccacttatatcacattcgcttttatgcgtctcagccaggttcttgattctatattctatattcgtgcttgtttgttagtttgtctgtttgtcggaatgtttgcaattcgcattccctttgtttgctgcacagccacacaccttttgtggttgccctagctgtcgttggtgaccttcgccggtgaccttgatcttagagcatttccttcgcactttttacgcgtttcgcaatctgaaatttgttgatttaagtaggcggaatgttcgcaaaactgaaattttagctaggtttttacaacaattggaatggaactgccaacttgtgagaaagtcactttcgactaatacccaaaagtgccttagcgcgtgatgcgtttagcatcacttccttgctacgctttacagcacttcaattatatcgatatctggcgcggcattcaaatagcagatatatagaactgcattttaattatattcttccccctatattttgtctcgaaaatgtatataagtcctgagatttattattgaaaatcgatccatgtctaaaatgaactgcttaatgttattattcaaaattataaattattattttgcactttttctccaaaattaaaatgttagattaggaaaatgtcgtatagaaatgaaaatgaccaacaatgatgccttataaaacaaataagtcgaattttagacagttttccttccgttcaataaatatgttcataccaaatttaataataatgtaggtatacaaaactattttgcttacccagaatgttattcaaaacttaaaatttaacattgtacaactcagggtatttgaaacctgtttagcagaaataaaattgaagattattacttttcttaaaaaagtcaaataactggtagacaaaataagtgcaactcgtttataaaaaaaatcaaaagcaacttaattcaaattaacgttacaaattagtgtattggagatatttatcagtatccggtgtttggcacggttaatgaactttagatcgcagaatgaattaggctgcttcgatgcatccactaattacatcatctcctactgcgatgcaagatattatgcaaatgaccaatgcaacgaacctgatttttggagaacatcattttaatctaagctgtgctggctgcataatttgaataagggcataaatgcctttctttcatcccgaaattccggttggtaggtgtatttagaagctttataatacagggacgggttttaatttattgtctcagtgtttttttataattcgactcgcattttcggtccctgtcttac

SEQ ID NO: 40835 - DNA, 621 bp, DROSOPHILA
cattccaattgttgtaaaaacctagctaaaatttcagttttgcgaacattccgcctacttaaatcaacaaatttcagattgcgaaacgcgtaaaaagtgcgaaggaaatgctctaagatcaaggtcaccggcgaaggtcaccaacgacagctagggcaaccacaaaaggaacaacttgtctccagcgataactcgaaggtcatcaaagtgtctgcctacgaaagcatggacttacagcatatggagaatggtctaagcggcgggggaggaggtggcctaagcgaaatagatttccaaaggctggcccagattatagccaccagcatccagaaggtgcagcagaatgtgtccacgatgcagcgcatggtcaatcaactgaacacgccccaagattctccggagctcaagaagcagctgtaagatgattatcattacgatctcttcgtttggaatttaaactgtccccatagatagaacccattgcagatatacatcgattattcgaatatctctcagacaaatcataaattctaaagacatagtgaagatctctattgggtgtttactcacaatgtctaaaaatcttcttaagccaatacagccttttaatacattttgcgc

SEQ ID NO: 40836 - protein, 64 aa, DROSOPHILA
MDLQHMENGLSGGGGGGLSEIDFQRLAQIIATSIQKVQQNVSTMQRMVNQLNTPQDSPELKKQL

SEQ ID NO: 40837 - DNA, 4448 bp, DROSOPHILA
tcttcagcaagagctccaaggccaggcggccgcgggatcaatgatcttgccgcagcaacagcagctaccacaggcccagcagccgcagcagcaacagcaaacgctgccacctcatccgcacctggcgcagcagcaacagctgcctccgcatccgcaccagttgccgccgcagtcccaaccgctagcgggtcccaccgcccagcaccagccgttgcccccgcacgtagtgtcgtcgcccaacggtgctccctttgcagcgccaccgatttcgctcacgggaggactcccgccgggcgcacccacggccattgtcacgaatccgagcgaccaaaccggaccagtcgcagcgggagcagcgcaatctcaagcacctacacccatgggtaagaactttaacggataacaattcataaactataatacttagacatccaactcccgccatagatactacaccaccaagcagcggtccagtgtcagatgccaacgcaccgccgggatcggcaatgccaccagggggaattcctccggcgaacactgctcccatcgccggcgtagctccctcttcttaactcttactcataagccaggaaacgttaaagtaaatagctctaagtcgtacgctctcagtatgtattatgtatactccactttaagcccaactcttgtgtgtaatctgaaggagatgcactacacattgacgcgtctccagttttgtgtaagtttcatttcgtgtccggtcgcgtttacaagcaattgcacaaatattttgaaccaagtttcaaagccgaaaaataggcattcaataaaaatttatttaaactacgagtggcagttattcctttatttttacaaaagcaaaagcttttaacttacttgaacaagttaataaaatatctataatttaaacattatttaattaccatttttgagtttaagaaatatactaagctagctgcgtaaaatgcagccaagtatttaagccttttttgattggttattagatcactgaaagctggcgacgccgcaggatgtttggtcgcttgatctctctcatcaagtcgttactcgaagcagcacgctttacgttgggcgagctttgcaaggaaagtggtgatgcggcgggagatgaaggtggatgactggagcaggagccactttggcataccctgggagggggcggtgaagatatgctgatgttggctctcatgctcaattcgttggaagttgtttccgtcagaataccaacgttactctgtgattcttccagtgacttgcgtgtttgcgcacactccaggtggcggccatagttgcccatactttggacatacacactgttgtagaaagtgataatatcagcggtctgaccattgcccaagctaacctctcggtaagcgcttctccgaaagtgcggctgtcggcgatagtgctggataatcatgctgaaagtgaggtgaagcttctcgagccgaacatgaagatgtatggcgcacaacagcagttggtccaggtgtcgattgcggagcagacggctactctctaaggtgaaagagtgctcggccaggtgccatatttggggaaaggaatccacgaggcaaagactcttacacagaaggagcagccgccggttggccagtccgtagaactttcgaaggcagatgcttgagcctgttgaaaagttctccttgtcttctgtttctgcatcgacttccttgtagcggggaagtctttgatttagctcccaccacagctgtgagctcttgcggaaaatcaacgagtccaggcacatttcctccaccacatccaggtgcttgatcagctctctgcccagaaaaccatgatcgtagcgcaccaccaactctagaatcttttgaaagtcgtaggcgtccagtgaaaagcagtgcaggacaaagggaaaccttaggccttccactagtttgtggtggacgtgaagtgccagttccaggcagcaagctaacagggcggcggtaagcttgcgctgcttcattaactgaccaatcttcagctgtggtttttgaaccagctccggtcccaaaattttctgcaaatatttgtagtaaaggcctctggcctggcggaatcgttttccagacaactcagcatccaaaaaatctttcacggccatggtaaaggtccgattcatttcttccagagtttgatctaaataatttacaattttatctgcgtcttccttcttggggaatgcttttataatgcttaggggaagacttgctggtagatcatgggtggacagcttcctatgcgaaggtgacgagcttgtttggaaggcgagctgtgggcttttaggagagtcccctttggtctctatcgccccctggacgctgagcagcacacgctcgtccatctcactaatgtcggctacttgattggtgtatttgcgatttaagttttccagattgatatctagcataccctccttaatgatctcccgcatatgggtgtcgtctccaactagactatggtccatatagagcattattaaggctttgtggaaaaaggcgttcttcatttgcaccactcccttcgctggtagctcgggaatcagttctcccagtgcttctagcacgctatatttatttagcaaaataggattgaagtcttcggtgtcccaattcttgggcactccagagaactcccggcggataactacggatcggggcacctctaaggcgttcacgaaaaggagatccattgtgcaaacgagcacctgacagccgttgatcaggtttgtaatcgcaaaaccgggtaactcgttgcgaatgaccaggaagagcaaccaaccgaactcatacagcgcttggtagtgattcgcggcacccgggtccgcacccttgccggggtgaacgaacaggctccgaaagatgtgcttataatgccgcagcagcgtcgaagtaataccaagtcgacaacgcagttcctcaacctccagctggaaagtgttctcgttttgggtcagccaattccagtgctccatgcggcgtagaaactgggacacgttcatcttaaagctgcgcagcagacgggttagtgacacgttccagcagcagttcttggccaccgaatcgtttgcctcgttgatggactccctaatatcgcgcatcttcgagcgctgcagttcgctgtagacggcgcaacacagccactcctgggcatctgcctcgctggtggacagcccgttgaccgcatccaagcgatggtaggtggacagagcgctttgctgaattctcgcttccagctccaattgctcgcagctgacggagaagcgtctcaccagcgtctccgcctctccctccacttcacaagtctccattggtaggaaactgtttatattctatagtctactagtttttgtttgtttatatttctgcgtagtttacgcgaatccccgtttagactgtacaaaatgcaaatttcagaaaggcgcgaatgatttcgattgctgcctgcctcaccgccattgttatcgaaattttgcttttgcaacagtgctgctttagctggcttatcgatagctgatacttaacccattgctttcacttactaaataattaattacatttcctcataaagcaagtgacttttaaaatactttcatgtttttaacatcatttagtttttataagtaatctaaattcaattcatttatttccttgtccattggaagtataccatataaggccttcattaaaaaggggtctttctaaggttaaagtttattatttgttttcaaaatgctgcaaacaaatcgagtccttcaaaaagagcaggctgaactatttgctatccagaagaaactcgaccgagtgctccccgtcattcaggaggcattaaattcactaaaggtatctacaaatctcttgcttcaatgacggttttcccaattcagtgttccacaggtagaggagctgcatctcaagtctcaggtggtgggccagcagaacccaaaaacgcagtgctcccctggaagggatcccctccacatagatctgtcggtggagcagtccccaatcacaactgtgatggagtcccatctcgtcaacagccagcaaatagatctggatctcgtaagccaaatgaggcgtttcgaggaggaagtcgactcggattaaaattgttattaaggctggaactttaccagaaaaacgtacatgttgggagcattaaaatataaacaatacagtaccaaaagtatgttcattttcggtgtaagtgtgggaaaactaaactagtaaagctacatactacagaccacaaatcggtctcttgattactcttgatcgtcagaagattcaggtgaactcccggctcgttttttctttttttgtggagctccctgcttttgatcctcgctgctgtcgctgtccgagccacttccactggagtctgacgagctgccttcctcgtcg

SEQ ID NO: 40838 - DNA, 2448 bp, DROSOPHILA
cattttgtacagtctaaacggggattcgcgtaaactacgcagaaatataaacaaacaaaaactagtagactatagaatataaacagtttcctaccaatggagacttgtgaagtggagggagaggcggagacgctggtgagacgcttctccgtcagctgcgagcaattggagctggaagcgagaattcagcaaagcgctctgtccacctaccatcgcttggatgcggtcaacgggctgtccaccagcgaggcagatgcccaggagtggctgtgttgcgccgtctacagcgaactgcagcgctcgaagatgcgcgatattagggagtccatcaacgaggcaaacgattcggtggccaagaactgctgctggaacgtgtcactaacccgtctgctgcgcagctttaagatgaacgtgtcccagtttctacgccgcatggagcactggaattggctgacccaaaacgagaacactttccagctggaggttgaggaactgcgttgtcgacttggtattacttcgacgctgctgcggcattataagcacatctttcggagcctgttcgttcaccccggcaagggtgcggacccgggtgccgcgaatcactaccaagcgctgtatgagttcggttggttgctcttcctggtcattcgcaacgagttacccggttttgcgattacaaacctgatcaacggctgtcaggtgctcgtttgcacaatggatctccttttcgtgaacgccttagaggtgccccgatccgtagttatccgccgggagttctctggagtgcccaagaattgggacaccgaagacttcaatcctattttgctaaataaatatagcgtgctagaagcactgggagaactgattcccgagctaccagcgaagggagtggtgcaaatgaagaacgcctttttccacaaagccttaataatgctctatatggaccatagtctagttggagacgacacccatatgcgggagatcattaaggagggtatgctagatatcaatctggaaaacttaaatcgcaaatacaccaatcaagtagccgacattagtgagatggacgagcgtgtgctgctcagcgtccagggggcgatagagaccaaaggggactctcctaaaagcccacagctcgccttccaaacaagctcgtcaccttcgcataggaagctgtccacccatgatctaccagcaagtcttcccctaagcattataaaagcattccccaagaaggaagacgcagataaaattgtaaattatttagatcaaactctggaagaaatgaatcggacctttaccatggccgtgaaagattttttggatgctgagttgtctggaaaacgattccgccaggccagaggcctttactacaaatatttgcagaaaattttgggaccggagctggttcaaaaaccacagctgaagattggtcagttaatgaagcagcgcaagcttaccgccgccctgttagcttgctgcctggaactggcacttcacgtccaccacaaactagtggaaggcctaaggtttccctttgtcctgcactgcttttcactggacgcctacgactttcaaaagattctagagttggtggtgcgctacgatcatggttttctgggcagagagctgatcaagcacctggatgtggtggaggaaatgtgcctggactcgttgattttccgcaagagctcacagctgtggtgggagctaaatcaaagacttccccgctacaaggaagtcgatgcagaaacagaagacaaggagaacttttcaacaggctcaagcatctgccttcgaaagttctacggactggccaaccggcggctgctccttctgtgtaagagtctttgcctcgtggattcctttccccaaatatggcacctggccgagcactctttcaccttagagagtagccgtctgctccgcaatcgacacctggaccaactgctgttgtgcgccatacatcttcatgttcggctcgagaagcttcacctcactttcagcatgattatccagcactatcgccgacagccgcactttcggagaagcgcttaccgagaggttagcttgggcaatggtcagaccgctgatattatcactttctacaacagtgtgtatgtccaaagtatgggcaactatggccgccacctggagtgtgcgcaaacacgcaagtcactggaagaatcacagagtaacgttggtattctgacggaaacaacttccaacgaattgagcatgagagccaacatcagcatatcttcaccgccccctcccagggtatgccaaagtggctcctgctccagtcatccaccttcatctcccgccgcatcaccactttccttgcaaagctcgcccaacgtaaagcgtgctgcttcgagtaacgacttgatgagagagatcaagcgaccaaacatcctgcggcgtcgccagctttcagtgatctaa

SEQ ID NO: 40839 - protein, 783 aa, DROSOPHILA
METCEVEGEAETLVRRFSVSCEQLELEARIQQSALSTYHRLDAVNGLSTSEADAQEWLCCAVYSELQRSKMRDIRESINEANDSVAKNCCWNVSLTRLLRSFKMNVSQFLRRMEHWNWLTQNENTFQLEVEELRCRLGITSTLLRHYKHIFRSLFVHPGKGADPGAANHYQALYEFGWLLFLVIRNELPGFAITNLINGCQVLVCTMDLLFVNALEVPRSVVIRREFSGVPKNWDTEDFNPILLNKYSVLEALGELIPELPAKGVVQMKNAFFHKALIMLYMDHSLVGDDTHMREIIKEGMLDINLENLNRKYTNQVADISEMDERVLLSVQGAIETKGDSPKSPQLAFQTSSSPSHRKLSTHDLPASLPLSIIKAFPKKEDADKIVNYLDQTLEEMNRTFTMAVKDFLDAELSGKRFRQARGLYYKYLQKILGPELVQKPQLKIGQLMKQRKLTAALLACCLELALHVHHKLVEGLRFPFVLHCFSLDAYDFQKILELVVRYDHGFLGRELIKHLDVVEEMCLDSLIFRKSSQLWWELNQRLPRYKEVDAETEDKENFSTGSSICLRKFYGLANRRLLLLCKSLCLVDSFPQIWHLAEHSFTLESSRLLRNRHLDQLLLCAIHLHVRLEKLHLTFSMIIQHYRRQPHFRRSAYREVSLGNGQTADIITFYNSVYVQSMGNYGRHLECAQTRKSLEESQSNVGILTETTSNELSMRANISISSPPPPRVCQSGSCSSHPPSSPAASPLSLQSSPNVKRAASSNDLMREIKRPNILRRRQLSVI

SEQ ID NO: 40840 - DNA, 6186 bp, DROSOPHILA
tctaattactaagccagcaaactaaaacaggcctttgggcaatggttgaaactaagcgttttcatattttatataattttatatatttaacattatatcaaggcagcaaatctaatgatacagaaaagcatttatagatgctccatatattttgctttagccgtatgtcttagcacccaaccgtgcattatatccaatacaaatgtacgccgaacttcgtgttaagaatttcaatttcatcatcatacatcatatagaacaaccataaacatttgtagacatattatagttgaatcgtattgtatcctgattgtactttttgttgaacaatcgtcaaatgtttcgatacaataagcatataagaaaaacgatacaaaaggagaaaaaaaaacaatatggcacacataagattatatctttaatgtgagggaagggttatcccccacacaaaaaaaacagaatagttgtaatgattttttatattaaaatatttttcaatatctatttaaaagagcatctgcaaacatttttctttggtgggttttacggaattgcaagagatggcttagaaagttttgagaattttataatcttggaaagacggattagtgagatgaaagggattttcagggaagtgctgcaaggtattttgagatgccttttgtctaaaaggcattcccggtgcttgttgttgaataagtcgcctgttgttttgaaaatcgctagacgtgtacctgttcgcattatcaaactgtttcacataagtgagggcttggattacctttgtgtatataaagggaaaaacccgctatttgcatttcgccattaatatttttttgagattatcagcagtgagtcagtataagcgataatttcatcataatgtgctaatagtcaactaattttgttagttgatcatttagacttgttatcaattgccaagcgaatgcaatatcgatacgaactaaactgccgccctttaaagtgcataaactaactgtttttgagttgctttagcaattgtaattttatttaaagttttattaggtaatagtgtctaaatacttaggtgattaacacagttccgaaactaatacatattccgtgtggttgctgggaaaaatcctcgtgacttaaaacaatattcaatcgacgatttgtaactcaatgaaacgatcgctgggtgatcgttgctagctttgattttatgctatatagacagccataagacggtgaatcgaggcaaaactgggatgccaatttaagtacagcataatatcagatcagattaagatccgcgcattatatatatatatattgcctaaatctagatggttaactatagctaccatttgagccaatatcagagacgacatcgagatgtggagagaggaaaaaacattcttaactgacttttggccctgggctattcctgaccgttcgagtttctgagattttgtgcggcggtgctggtggagggcgttggcgagccagggggcgtgggagtgcgtagggagcgttcaaagtcctccgctaaatcatcgtcatctccctcctgttgccaactgtccaatgcggagtcgacatcgaattccgggaacttcagcgtttcccccgtcacatccaccagccgagatcgcaatctctgcgagatctcctccagctccgtgtatttgcgcttgatggcctggcccaactgcaagtgacccagttccatggacttctcgaactgatcgattacggtatctacactgggcgatatgggctccacgtgcgcctcgattcccccagtcacacgtccattgaagtctactatgttatgccatccgctgggaaagcctccgcccgcttgtttttggttaagattaagtgcagcgaatcctattatggcatcttcatggggagacggctctgtgatgccatttgggctaacaaccgcctttttccaaagcttcagaatgaaaagcttctggggctgcaaaggaaaaatggaatgtatttaggtgatctcttagaaaaggtccttttaaatcatacattgctgcgataatcgcgactcacgtccacgcggaacttgctaagccactggggcttcgtcgatttgggtacaattggtgtggcgtacaccaatccttcgtgcgacttataggtctgactattgcaactgatggcctggaaggtcacataggtgttgggaggttcgttgggcgggaagcgcttggctgccgactgacgttttacttgcttcttcgatttcccatagccgggatttaggggcagtccagcagctcccacgatgcgcaactggaagctaaaggtactgggcgctggaggagccggtggcggcggcattactggacctgcgatattcggcgtcggagctgcgatggcattttgaagcatgtcgagtaagtctgtggtccggcttggagccggtacttggttgttgtcatggtcgaagccacgcagctgcttcagttgagcaatctgcgactcacttccaatggccagaagcaccttgagctcgcccagaggcgtcttgttctcagcactgacaattggtgcccagccatcgatggagatcactggtagctatgggtcataaaataaataagtaatttacgtattttcaaaaatatatctattttaagtaattctatttaggagtaaatggaatgtgtatcatatatatatatattgtatatattatgtgaactataatcgcacctttcccttgcacaggtgatttgtgatgctggagtctctgtaggcgatgaagaactggtgcagcggaagtcgtacgactcctcccaatggacgcagctccatgaccagctgctgccgctcgacgctctgcaggaagcgctcatcattgatgatggcgaattgctcctgcagctcgaaggatcccccatcggttaacttgctcagcagtggctgcggctgccagaagggctcaagtgatagctcctggcacgcggtcttactaccgcccgccgttaattgacgcagctccccggcgtagagataacccctgaggagacggactttattggtctctgccatgaagttgatgcactccaagatggccttgctgttgttgttggcttggggaggaggaggtggcggcgccggcggctgagggggcgttaaaacggccttcgagttgcaattaactggaaaatttgcaaaacgcagaagggattagtaatatagtctaaattgaagatagtaggacccatgcatggtggcattaatcagagttcaaagtcattcagcggaccttgaacccgcagattcggattaagcaagctttaagaactgaatcagctgcgatcttcgatccggtgcttatcgccttggcaacagacgaccggactcgaaaatcgattcaagcggaacgagagattgcgccggcaagcgggtaaaaccgggtgaaatcggtaatagcacgtgcaccacaagcggacaactgacaactgacaacttggtagatactggaatcggttgggctaaaaatagaccacttcaattctcaattatatcagataatttagctttttaagaggtgtactgagtgcgtaatgtgtgattcaaattatagggtattaatttaaagaaactgaattctggtaaaattagaaaaacatttttaaaaattgtttgggttcaacgaatggcatagctaattatatttgaatataataataaaattttaaaaattttaaaaatcgaaaaatcctttaaaaattcttagtaaagattttaagcaattgttaaatccgcgtttcatacgaaactcagtttatgtaagtactactattatttcaatctgttaaaaagttcccgttttcctaatactataataataacctaacttatgaaaaatgataacccactgtgcttgacacggtcacaatcaaaagctgttggaaaacaaaatgtatgatttaaattaaagctgggatagagaaaacataaaacacgaaacagatttgttttttttttttttggttttgttggtggttttttgttttgttttgctttcttttttgaaaatgaaaagtatttattgacagaatgatgggcagcacttggataacggcaatcaataacatatagagtaagtgcaggaggcgtgggcgtggttgtgggcggctcgtgtagatttggtatttgtatagcatttgttgttctgcttggtggtagaattggtagttgttgtggctgtagtcgtgtggttcagctagtatcagatgtattcgatttgggggcccaagaatcaatggttcttgcgattggcgaccacacgacattagtcatatatattcacctgctgccttgtttccactttcgttcttttggcccggctgctgctgctgttgctgcggctgctccgggctaccattcaaattctgaagcagactgatcttcaagtacacgctacccaggtggacgtcgcgtcgccgaatggcaatgcacttgcactgctccaacagggatgccctgtagagctccctgagctccaggcggcccatgccgagcatttcgttgagacaggtgccgggttcgcgccaccaaaccgtgatgtctacatggccagcactctgttccggatcctgcaggctcttatcttccatatcgacctgacgctgagccgtctgcccgaaacgggtgcactgcgtcaggctctggaacttctccgactcgaactgcatgatgtggaacatcggttggcgcggcactttacggatcaagtcccccgacagctggcactccacggtgaaaatgggtcgcacttcgttctgaaccagttccatgcgttgggttccctccggctgcaatgtcagtgcctccaagtgcagctgcaaggcgttgcagctgcggaagagctccggcgtcatcaccagctcatcatcctccgattcctgggcggtttgctccggctcggctcccggccacaggacctcctgctgtttcctaatcttaagaggttcggcggaggcagcagtggcgaaaagggccaccaggtccgcgtccaatttcttcatggcctccattagctcgacgttgctggcggtgcctgtaataagcagaggcatatgcaatcgttatttatattagttaaaaacggacatgttttggaatttacaggcttttaagcaggagaattaatgcgatccgatctccacgacgtgggctttccaaatgaaggcctttttgcgtaagagactcgaaaagccggcagaaagagaagcaccaaagcgcagaaagaggggcccccagtaatcgtaatcgcgttctatgctttgccccatacttctcccgctctctcacgtgttcgcctatcactccatcgcaagggaatcggttttcaaaagagcgcaccatggataccctaactttcagttacttttgagtttcagttcataatttacaaatcaaaatgaaaagataggaagtttaaaaagcaggaaccccgatcttttaatttaaattcactaaacaaatttcacatgtgatgtaaactgttcgcatatgtcgctttttaaataaataaatcaaaaacaaatcaagaagttgtggtaatacatacatttaagaaaactcgatttttgtaagttttaaaaatacgtgtagttgatttgttggtatattagtcgaaatgtttcagcatttactattttcttaattgtattcaaatttgttcatagtctttcagaagggtatctcaacctcactctcacaactggtcgattctctttcagcataagcaaaaagcaaagccagacccaaatatatttttttgcataaattcgccgacatcggcaaagttcagtggcaagaggaaataaactttccatcagaaccgaggccattttatactcaaagtcgcctatgtacaaatttatatttgtatgtgtatgtagcaaaaggtcaaggagttatcggtcagcgagaaaaactgtaaccgatttcttcgcctggtaacgcgcttaattttcgatttgctccaagataattgataagagacgcccgatgccagttttagtgacataatattactgcgttccggacgcggattgttgattgcgcacagtagcatttgtaggattagtcagtctcgtgtaactcgtgtaactaacgattccgaccgttttcctggtcatcaggcattcgcaacgc

SEQ ID NO: 40841 - DNA, 2647 bp, DROSOPHILA
atcggatcgcattaattctcctgcttaaaagcctatgaagaaattggacgcggacctggtggcccttttcgccactgctgcctccgccgaacctcttaagattaggaaacagcaggaggtcctgtggccgggagccgagccggagcaaaccgcccaggaatcggaggatgatgagctggtgatgacgccggagctcttccgcagctgcaacgccttgcagctgcacttggaggcactgacattgcagccggagggaacccaacgcatggaactggttcagaacgaagtgcgacccattttcaccgtggagtgccagctgtcgggggacttgatccgtaaagtgccgcgccaaccgatgttccacatcatgcagttcgagtcggagaagttccagagcctgacgcagtgcacccgtttcgggcagacggctcagcgtcaggtcgatatggaagataagagcctgcaggatccggaacagagtgctggccatgtagacatcacggtttggtggcgcgaacccggcacctgtctcaacgaaatgctcggcatgggccgcctggagctcagggagctctacagggcatccctgttggagcagtgcaagtgcattgccattcggcgacgcgacgtccacctgggtagcgtgtacttgaagatcagtctgcttcagaatttgaatgcagttaattgcaactcgaaggccgttttaacgccccctcagccgccggcgccgccacctcctcctccccaagccaacaacaacagcaaggccatcttggagtgcatcaacttcatggcagagaccaataaagtccgtctcctcaggggttatctctacgccggggagctgcgtcaattaacggcgggcggtagtaagaccgcgtgccaggagctatcacttgagcccttctggcagccgcagccactgctgagcaagttaaccgatgggggatccttcgagctgcaggagcaattcgccatcatcaatgatgagcgcttcctgcagagcgtcgagcggcagcagctggtcatggagctgcgtccattgggaggagtcgtacgacttccgctgcaccagttcttcatcgcctacagagactccagcatcacaaatcacctgtgcaagggaaagctaccagtgatctccatcgatggctgggcaccaattgtcagtgctgagaacaagacgcctctgggcgagctcaaggtgcttctggccattggaagtgagtcgcagattgctcaactgaagcagctgcgtggcttcgaccatgacaacaaccaagtaccggctccaagccggaccacagacttactcgacatgcttcaaaatgccatcgcagctccgacgccgaatatcgcaggtccagtaatgccgccgccaccggctcctccagcgcccagtacctttagcttccagttgcgcatcgtgggagctgctggactgcccctaaatcccggctatgggaaatcgaagaagcaagtaaaacgtcagtcggcagccaagcgcttcccgcccaacgaacctcccaacacctatgtgaccttccaggccatcagttgcaatagtcagacctataagtcgcacgaaggattggtgtacgccacaccaattgtacccaaatcgacgaagccccagtggcttagcaagttccgcgtggacgtgagtcgcgattatcgcagcaatccccagaagcttttcattctgaagctttggaaaaaggcggttgttagcccaaatggcatcacagagccgtctccccatgaagatgccataataggattcgctgcacttaatcttaaccaaaaacaagcgggcggaggctttcccagcggatggcataacatagtagacttcaatggacgtgtgactgggggaatcgaggcgcacgtggagcccatatcgcccagtgtagataccgtaatcgatcagttcgagaagtccatggaactgggtcacttgcagttgggccaggccatcaagcgcaaatacacggagctggaggagatctcgcagagattgcgatctcggctggtggatgtgacgggggaaacgctgaagttcccggaattcgatgtcgactccgcattggacagttggcaacaggagggagatgacgatgatttagcggaggactttgaacgctccctacgcactcccacgccccctggctcgccaacgccctccaccagcaccgccgcacaaaatctcagaaactcgaacggtcaggaatagcccagggccaaaagtcagttaagaatgttttttcctctctccacatctcgatgtcgtctctgatattggctcaaatggtagctatagttaaccatctagatttaggcaatgcgcggatcttaatctgatctgatattatgctgtacttaaattggcatcccagttttgcctcgattcaccgtcttatggctgtctatatagcataaaatcaaagctagcaacgatcacccagcgatcgtttcattgagttacaaatcgtcgattgaatattgttttaagtcacgaggatttttcccagcaaccacacggaatatgtattagtttcggaactgtgttaatcacctaagtatttagacactattacctaataaaactttaaataaaattacaattgctaaagcaactcaaaaa

SEQ ID NO: 40842 - protein, 733 aa, DROSOPHILA
MKKLDADLVALFATAASAEPLKIRKQQEVLWPGAEPEQTAQESEDDELVMTPELFRSCNALQLHLEALTLQPEGTQRMELVQNEVRPIFTVECQLSGDLIRKVPRQPMFHIMQFESEKFQSLTQCTRFGQTAQRQVDMEDKSLQDPEQSAGHVDITVWWREPGTCLNEMLGMGRLELRELYRASLLEQCKCIAIRRRDVHLGSVYLKISLLQNLNAVNCNSKAVLTPPQPPAPPPPPPQANNNSKAILECINFMAETNKVRLLRGYLYAGELRQLTAGGSKTACQELSLEPFWQPQPLLSKLTDGGSFELQEQFAIINDERFLQSVERQQLVMELRPLGGVVRLPLHQFFIAYRDSSITNHLCKGKLPVISIDGWAPIVSAENKTPLGELKVLLAIGSESQIAQLKQLRGFDHDNNQVPAPSRTTDLLDMLQNAIAAPTPNIAGPVMPPPPAPPAPSTFSFQLRIVGAAGLPLNPGYGKSKKQVKRQSAAKRFPPNEPPNTYVTFQAISCNSQTYKSHEGLVYATPIVPKSTKPQWLSKFRVDVSRDYRSNPQKLFILKLWKKAVVSPNGITEPSPHEDAIIGFAALNLNQKQAGGGFPSGWHNIVDFNGRVTGGIEAHVEPISPSVDTVIDQFEKSMELGHLQLGQAIKRKYTELEEISQRLRSRLVDVTGETLKFPEFDVDSALDSWQQEGDDDDLAEDFERSLRTPTPPGSPTPSTSTAAQNLRNSNGQE

SEQ ID NO: 40843 - DNA, 2243 bp, DROSOPHILA
acattctatgttctagtgctaggttaatacaatacaaaagatttaattgtcttagcttaagctacaaaccaatctggcttttctcgagctatgtacagaagcgcatctgattctagacctccagaattgccgacatggtcttcttgaccgcatcgcgggcgtaggggatgtacgacagcgagtaccaggtcatggccagagattgtatgataatgaatataagcgtgagtcccgcctttttccactaaagccaatcaaataaaaataataacatattaagtgcacacatcgattgcatcgtactgtttttttgttcaagtaataagaattaaaccaatattcagaatttaattgctagggcatgtgaaactgtgttattaatattaaaagtaaaatgctaaaagctttcatttaactttactgtgagttcatgaagtatgtataagatttggatcgctatttcattggataactttaaagtctaaacattaaggaaaagttttctacaaaacctgcaaacaaattcgtcatgctatcgctataaaactaacttgattataaaagttaacgaccgaaccctaaataattgtgatatcttcgatttgagcatggacgccttaccacaatagcagcgatgaacgtcaggaccatcatgacgagcacgatgatggtggcgatcagccgtgtttccgcaaacattttcttgatctgcttgaagggacccatgagaaagcaggtactgaaaccggagaagagagactcattagccggcttgtgtgaagtacgagtggaacggaaccagcaactcgctcacctggccatcgagatgacgtttcctagagtgtagaagaccgcaaagaccacaatgcccctgtgcagaaatagggcgaccgagccgagtagggaaagtaagatgcccaaggcaaagcagatgacgaatcccttgatccgagtggaccagctcaaagtggacatgtcgttgatctgcgtatgtaattgattgatattaactaaatactttgataagcgttgggtcacacggcttggggcgccatgtgatcgcggggcgttgccagcggctagctcctaagccacgccataatcataattcctccagccagaatatgttaagggatctaatgagatctgtaccattagaaaatttcttcacctgcgtaatgatactgctctcctcctccggagtgggctcatctccactcagaacgcggcgcaacttgtccattatgcggcgattgaataatgttcaacaggtggctgacttggaattaccggcactcctctcggggggttttgcacatacaagggtctcttctgtttttatgctccggaattttcacaccaaaataaatccaagatcatacctagtgtgaccgtggtggtaaccgttaacatataccgtccgattaaaaattataccaacaatttgcaattttatatatatcttcataaaaaaactaaagaaatcagatattagtagtgcatttttgttcaagaatatccatttaaaaacaaatatgtttttatatcaaaatcatattcaaaatataattttagctttttctagctagcatgccatatttagaaactttggcagccaactgctggtcacattcgcgacatctggcaacgcctccagcatgttttgttcagctctacgtaacattttgaggaattcacaaaatgcggctaaaaacgcaacaattacctcacaaatacgaaatctgcgaggacaacaaagtgtccaccatgaggtagaagtgttaacatcaccgggtataaccaccaaacagaatgacaagaagaccgagcctgcggaatgtgaaggctccaaagaagtggctctggacttccgaaatcgggaggcccatgtgccttccttcaatttggcggcctatgtgaacaactcgagtaccctgcagcaatttctcagcttgggagtggatctgcacagtattgaacggcgaaagggattgggagactttgtactgaagctggatttcgagaaaaatgtgaagccctacataacgttcctggtggatcagggcgtatcacccgatgacttcggcaggatgttcaccaagaacccgctgctgttcaaggaggacttggacgatctgcagaccagagtgaactatctaaaaagcaagagattctcggacgaagccaggcaaagaattctcacccagaatccttattggctgatgttctccaccaggcgagtg

SEQ ID NO: 40844 - DNA, 492 bp, DROSOPHILA
atggacaagttgcgccgcgttctgagtggagatgagcccactccggaggaggagagcagtatcattacgcagatcaacgacatgtccactttgagctggtccactcggatcaagggattcgtcatctgctttgccttgggcatcttactttccctactcggctcggtcgccctatttctgcacaggggcattgtggtctttgcggtcttctacactctaggaaacgtcatctcgatggccagtacctgctttctcatgggtcccttcaagcagatcaagaaaatgtttgcggaaacacggctgatcgccaccatcatcgtgctcgtcatgatggtcctgacgttcatcgctgctattgtgtggaaaaaggcgggactcacgcttatattcattatcatacaatctctggccatgacctggtactcgctgtcgtacatcccctacgcccgcgatgcggtcaagaagaccatgtcggcaattctggaggtctag

SEQ ID NO: 40845 - protein, 163 aa, DROSOPHILA
MDKLRRVLSGDEPTPEEESSIITQINDMSTLSWSTRIKGFVICFALGILLSLLGSVALFLHRGIVVFAVFYTLGNVISMASTCFLMGPFKQIKKMFAETRLIATIIVLVMMVLTFIAAIVWKKAGLTLIFIIIQSLAMTWYSLSYIPYARDAVKKTMSAILEV

SEQ ID NO: 40846 - DNA, 3573 bp, DROSOPHILA
ttaatatttcggtgaggcttcatcatataatgccacgagtcataagttttcgtgattaccattccacagggtaatataaatgtactcaaacttgcgaatgaacattgtaagttttatttatagctgcagaactttgtgctattgctttattaaatttaatgtaattcaaatattcactcgctgcgctttaaatatttgcttatgatattttcacgcagttaaaatccctgggagactacgttttgaaccgtttcagcattatttttttacccgatagagggagaaccgttacccattcgcactgataacccgatgcagactgagtcgagaattccatccgtgggtcgctcttccgaaaaagctttaataatataatacaacagaaaggtaaataaatatgtaaatctgaaaattcgttttcattttttagacaattgttcgcctttgtgtgcgtgtatgtgtgtggatgtcggaggtgaacgacaaccgacaaacaaaaacataaacaagtgtttgtctctttggatgtgctcccaatgcaatacgcatgtcacattctccctaagagaaccagatattgaagagaattcgttgcagttgcatttagaatgcacttacttctcatatacgcttccgattaaaaccatagttctgacccattaaaaagttaaaaaacaataattcttttcctaacccaaattgacagcatgaaattaaatttccttaccaatttacaaaaacttcaaatagtataatattcttgacacaatgcaaaaaaaccggaatccttttcagttctattttgttaccccaaactgtaaccttctttgtgtgttctatctttagtcagccctgtgcctcccccctttttcttgtacatatatggggcaagtgtatcaggaccgccacatgggttcattgcaccaggctactgagataaattttaatatgtatttactatttacatatatatagcacagtacaaaactttaaaacctaactaatcgcccagcgccggcaccttgaatatcttggccgtgttgtcctcggataccgttagcaatagattttcctgaggcttgtagacaaactcgtagatgtgatagtagtgtcccgtcagcgtgaatttcagaattcctgtgcgtgcgtcgaatgcgttcagatttccctgcgaggtggccgcaagtatcgtgtggtcgttcaaccatttgatcctggaataattaatgcaattagtaagcaacaaccaaattaaaagttaaatcaaagttataatattttttacagttttatgcggtgctcaccttatgacagcatcattgggaactggattttcgcatatggtacgcaacgctgatttggcatagtcccagatggatatcctgccgtccagcgagccacaggcaaagagctttagatccgccgaggagggagcaaaggccagacactcaattccgtgttccgactggattgtgctaaccggaccgttgttagtgcagaacagcatttttcctgaacgaaaataaatctattagttgccgtttatatgcaatggagaacatgattgcttttactaatagttttgttatggaaactggtattataccgaattcctttaccactggagcactcaccggacgcctcagcgcagacgtagaagggcgattccctttcgcaggccaccaccgcgtgcgtgatctcgccgaaacccattggatgcgattcgtttacgtcaatgagcacctgacagctcttgagatcccacagctttacggatccgttcacgtaggccgtgaacagctttttgccatccccactgagctctccggactcgcaacgcgaagattgtcccggcaggattttgcattcaccgctgggtatgcggaaaacgaagacctctccgctgtcactacccgccagcaggatgtgggcagctcgatgccagaagagccaggacatgtcgctcatggagtactcccagattttagtcaggatcggacgttcgtcgtgcttttcactgaccttgaagacaaacagatcgccggctagatcaccggtggccaaatagacgccgtcgtgactgaaatgcgtttccgtgacggtgtccttgtgctccgtgatctcgtagaggacatcgccggtggaggtttcccaaacgaaagctcgatcgtcctcgctgcccgtcaccgcccaattgtagttgggatgcagactgcaggcgaaaacaggagcggtgtgcttcttgaaagtgaccgtagcttcgtccgtgatggctgctattctctcacggtcacgtagctcctcctcgtcctcctcttcatcatcatcgccaccggccattgcaagccgggcctccagttgctccagcgtcacctcctccaaatcgtcgtcatcttcgtccagcggctgctcctccagctcaattatctcctggagttcgtcgtcgccgtcatcgaaatctggccggtgtggcggtgtgttgtcacgcattcctattctcttaatggtccaaatagcaagttaagctgcataaaaataacaattaaatgaatgtatcacacgtgctagaaaatcaatggtctggcaactcgttcgccaatgttttttaaacatcgattgcttgttgggactatcgacttcgtcgattatttttttagccaaaatacagtgttgccaaatgtcaaaaattgagcggaattttcaaattgaagcgggctatgctgacacgttcatcttggtagtaaaacgtaagcaggtttcatgataaaatcaaactatattttgggggtgttatttttaattcatttaatgcaacaacaaattgcaataacgaggaagccgattaggaactctaaagtaaaggtttataggtttgacctaagatgtattgaaatttgtttttactttgcgtttgtttgatccttatgcacaaatgaacaaaagatgttcttaaagcttaattatatttaacgatgttaaaaatgtcattaagcaagtacttaaattaatgcttagtatatattaatattatatggtattattactatattggctttaaagcatcatgactatctttgaatttcaattatttaatttatttttgacagcctgaactctattcatcaattcatcaatagaatctagatcaccaaaatcacattcagcatcgcatagatcggctctatgttcagtattctccgcctccttttccagggtttttatttgctgttgtagcgaagcgatttggtccaaaagtgttttttcggaattcgctatttgttttggaaaatccatggcttcagcctcaagcttacttagtttttcgtcatattccttcggcgtgtctaatttagctaaacgttctgcgattagattttcttcccttttcatctcctctctgaaaagattaatatttcttagctgttcttcgagtttgcgatcaatttgttgcttgtccatttcgaattttaatcgggtatattgcagttgcctctcaaatttttcgatcccattctctgttaagttgtctatatctttttccaattgattaatatctagttgtaatgagctcgt

SEQ ID NO: 40847 - DNA, 1361 bp, DROSOPHILA
attttctagcacgtgtgatacattcatttaattgttatttttatgcagcttaacttgctatttggaccattaagagaataggaatgcgtgacaacacaccgccacaccggccagatttcgatgacggcgacgacgaactccaggagataattgagctggaggagcagccgctggacgaagatgacgacgatttggaggaggtgacgctggagcaactggaggcccggcttgcaatggccggtggcgatgatgatgaagaggaggacgaggaggagctacgtgaccgtgagagaatagcagccatcacggacgaagctacggtcactttcaagaagcacaccgctcctgttttcgcctgcagtctgcatcccaactacaattgggcggtgacgggcagcgaggacgatcgagctttcgtttgggaaacctccaccggcgatgtcctctacgagatcacggagcacaaggacaccgtcacggaaacgcatttcagtcacgacggcgtctatttggccaccggtgatctagccggcgatctgtttgtcttcaaggtcagtgaaaagcacgacgaacgtccgatcctgactaaaatctgggagtactccatgagcgacatgtcctggctcttctggcatcgagctgcccacatcctgctggcgggtagtgacagcggagaggtcttcgttttccgcatacccagcggtgaatgcaaaatcctgccgggacaatcttcgcgttgcgagtccggagagctcagtggggatggcaaaaagctgttcacggcctacgtgaacggatccgtaaagctgtgggatctcaagagctgtcaggtgctcattgacgtaaacgaatcgcatccaatgggtttcggcgagatcacgcacgcggtggtggcctgcgaaagggaatcgcccttctacgtctgcgctgaggcgtccggaaaaatgctgttctgcactaacaacggtccggttagcacaatccagtcggaacacggaattgagtgtctggcctttgctccctcctcggcggatctaaagctctttgcctgtggctcgctggacggcaggatatccatctgggactatgccaaatcagcgttgcgtaccatatgcgaaaatccagttcccaatgatgctgtcataaggatcaaatggttgaacgaccacacgatacttgcggccacctcgcagggaaatctgaacgcattcgacgcacgcacaggaattctgaaattcacgctgacgggacactactatcacatctacgagtttgtctacaagcctcaggaaaatctattgctaacggtatccgaggacaacacggccaagatattcaaggtgccggcgctgggcgattag

SEQ ID NO: 40848 - protein, 425 aa, DROSOPHILA
MRDNTPPHRPDFDDGDDELQEIIELEEQPLDEDDDDLEEVTLEQLEARLAMAGGDDDEEEDEEELRDRERIAAITDEATVTFKKHTAPVFACSLHPNYNWAVTGSEDDRAFVWETSTGDVLYEITEHKDTVTETHFSHDGVYLATGDLAGDLFVFKVSEKHDERPILTKIWEYSMSDMSWLFWHRAAHILLAGSDSGEVFVFRIPSGECKILPGQSSRCESGELSGDGKKLFTAYVNGSVKLWDLKSCQVLIDVNESHPMGFGEITHAVVACERESPFYVCAEASGKMLFCTNNGPVSTIQSEHGIECLAFAPSSADLKLFACGSLDGRISIWDYAKSALRTICENPVPNDAVIRIKWLNDHTILAATSQGNLNAFDARTGILKFTLTGHYYHIYEFVYKPQENLLLTVSEDNTAKIFKVPALGD

SEQ ID NO: 40849 - DNA, 4400 bp, DROSOPHILA
ctatgatgtttttccctttgttagcttatagtcagtttgattttgtattcaataaagagcgcatcgcgccttcaatcaactccagctactgctgttatcattgaattggttggctagccttaagggcagtcaacaacggagagacgttctcccaccatatctcccaatctaggagaagaggtctgcggcaaccgccctgcctcccagtgacagaggaaccccccgttacctgcaacctacgccggagaccgcggcgagggacctgcaccttatatttaattaatttgtacatattcagttcaacatatacatagtaaatgtaccttaaaacaaataaccgcactggtgggacaaatttagattgtgttttgtcacaagagggagacgaaaatagcttctggatggaagaacttccggtttcttcttcccggtttcagatggaaaccaaacgtaaatattttgagcgatggcttaaactttacaaagtctgcattaaaaatataaaatgatttggcatgaaatgtactgtacattctcctctttcattctcgtcataaaaattgttaaacctgtgaatttaagcgtctcgtttaagaaataggctcaaacgtctatatatccatatatctatatggcaaattcgtaaactaacttaagaactagctaaaatcgttaagccttgattgaaagctatagttattgaaacggaatcaatcgctgctcgttggcccaggtggacttccgcttaactcggctgtatcttctttcgtcgcatccacacaagtttcctctagtttgggcatggacttcgccacttgctgatcttgaccctttagcagctggcctgcggatagttcctccggtttctccacaaccactgcactcagctcagcgcaagacttggatttggctctgctatgttcgtggctgttgcctgcacacttgactggagaagatgattttcggccactaggagcgtcacaaacctcgcggagatcggtgcgtgaatccctacagcaaaccttctcgatgcattccactgcctggcattgcatcaggcattctagcgaggcagaggcattcttattggtggacggatagaactccggttggattgtgaccgctccgattccctgatcgtggaagtatgaccgaacctgttcgatgatcttgaggtagagtttgggattctggaactggatgtgtatagtagccacgtatcggtgggcggccaattgccatatatgcaggtcgtggtaactgatgatctccgggaacttggtgaccaaggttcgctcaaagatctccaagtcgatggaaccaggaatggtttgcagaaggatcaagcaggattccttcactgcgaaaaagatggaataaagtatgtaaatcttttattcttggcacttaataagtatacttactgtagggataactgagcgtcaccagcaggacgcaggagaaaattgagagcacgggatcaatgaacttggctgtgtgctgctcatcctccgccacatagacgattgcggcacaaacgatcacaaatatggtactggacacatcccgcagcatttcgacggctccctggcgtttggtggcgaaataaacactgcccacctccgtctctagttcctcgcgcaactgacgatcattccgggatttgctgaggtgtctttgcatcggagttagggatagatccaagttgctggacatgggtcgctccagcaccacgtttccgccgggtgtgaggtgcaaaaagctaccctggtgcagcgtgtatccaccaattagcagatatgtcagtccattcaggattagcccgatgaaacccagcatcatcacgggtatgggcagatgcatggtgtcctgatgatcgatgtgaaccagagtttgcagagcttccaccaccagcgaaaaggataacgaggccaggatgatgaacacaatcagcatggtcaaaatatcgatcctggcccaaccaaatgtattccgaagcttctgctcccgacactcccttttggcccgtgtttgggcatccgtgtcggccaggcttatagctactccggagccatttatcttggtcagggcgggggaaggattcctagcctctggcgcttgtttactgtgctgtaagataaggaaggcgaaatcagaaactggtaatataatatataataatataatattaatatatatatatatttaatatatatttaatatatataatatatatatatataatatatatttattacttagaaaatgcatctaaattttatagcctctaaaaattccttcaaaaattaatattgttaatttgctgtacagctcgcactcaagttcattcttctctgatttattgttattagtaattgccataagacttatatacaaaattaacttgtttgttctgaaaacaattggcatagaaatacatagaatcgaatggaaaagcataatcatcgtcatgctttccatgccaattggcaatgtctcctctacaacaattttggtgggcagctatttaaacactccgctgatcgtctgtctgtctgtctgtctgtcggtcggtctgctccattatataagcccaaaatcagaccactcaactgtccacacctacaacatcgaccactgtttgaaagctttcgatttctggtgtttggaatcgcctgtaactcgccgaatttggccatgtcttgttcagtttctgcgattttttttttgggcctggtctttgtcttttgcgaaacgtgcttggcacgctttcccatgccggcaacgattttagcattggttcaatattaaaatattatctttgactgctacataaatttttagttggacattttgattgtggaagtattcaccttgaattccaatcaacttaaaaacgaagaaacagatcgaacaagatatataattgtggataaatgtttattagtattataacaaatagagcggtatataaacaaactttgactaattgttgacaaacaacccgcctgcaatacgttcgcttatacaaaattaattaatccctgaagaattatacataccctaccatctctaacagcatttctaaatatccaaaatttgaagtccattaccagacggctgatataaagagtatctgagactgagaaactgaggcaataactacgtgtaataaacctgatttcatgtcacctgctgtgtagacaggggtattacactcgaggagataatttcacagcaataggatgataagccccatgaaaacggtgactaaactcactgattagcccaaataataacgaaagcagccactcccatgcagagatgataaaagtatttcaaaaattcggccataaattattacaaaaaaaaaacagtccaaacgaaaccagttctgcgcaaaataaaaaggtgtttggaatgcgttttcgatacactttgttgtggttcggcttataaaagttcaatgcaccagcatttgtttcgactttgcacactagcacgcgacatttcctggccaaaaaaatgttaaaccgggtagcaaaataagtcaaaataaaccgcgcatgcaacacaattattgttttcaagtaatcaccgcataaatattgggtgttgaatgtgtaacttttcatacccaagattcgcagatcaattgggtatactagattcgttggaaggtatgtaacatgtagaatgaagtacatatttattcttgatcaagatcactatcctagtcaatctctctatgtccgcttgtctttccttctgtctgtccgtccgtatgatcgtcgaagttttggaaacttaaaaagctagaaggcggaaattaatcatgtccaatgggtatctgatagtcgaggaagttggctaaagcgatctttcttggttcattttgatacatatcaaatgttttctttataaatacttaaaaaatacaacttaagttattaagaatgccaaacaaataattaaaacaattattctggcatataaaatgtatcattataaatcattattaaacctaaaatcaatagttacagataggtttttaattggttgacctaccttaattgtgatgatacaaccgccgagtgcgaaaatattacacagcatgtgatgactggccatcagcagagtgagtccatgggtcaagtggctgaggatcagctggagcacgaagtagcagatcgatagtaccagtacggtgtacagcggtatcggcttgcaccgctggagaatatcctttaccattgttctgtggaaagaagggcatcgaaaggtcagtaagaagtgaagtgataagttaaatatctggtagatgcgaaaatggcggacaaatggctcttgacaacaaactgcactaggggtgatctatataaatctatattcaaatttac

SEQ ID NO: 40850 - DNA, 1542 bp, DROSOPHILA
atggtaaaggatattctccagcggtgcaagccgataccgctgtacaccgtactggtactatcgatctgctacttcgtgctccagctgatcctcagccacttgacccatggactcactctgctgatggccagtcatcacatgctgtgtaatattttcgcactcggcggttgtatcatcacaattaagcacagtaaacaagcgccagaggctaggaatccttcccccgccctgaccaagataaatggctccggagtagctataagcctggccgacacggatgcccaaacacgggccaaaagggagtgtcgggagcagaagcttcggaatacatttggttgggccaggatcgatattttgaccatgctgattgtgttcatcatcctggcctcgttatccttttcgctggtggtggaagctctgcaaactctggttcacatcgatcatcaggacaccatgcatctgcccatacccgtgatgatgctgggtttcatcgggctaatcctgaatggactgacatatctgctaattggtggatacacgctgcaccagggtagctttttgcacctcacacccggcggaaacgtggtgctggagcgacccatgtccagcaacttggatctatccctaactccgatgcaaagacacctcagcaaatcccggaatgatcgtcagttgcgcgaggaactagagacggaggtgggcagtgtttatttcgccaccaaacgccagggagccgtcgaaatgctgcgggatgtgtccagtaccatatttgtgatcgtttgtgccgcaatcgtctatgtggcggaggatgagcagcacacagccaagttcattgatcccgtgctctcaattttctcctgcgtcctgctggtgacgctcagttatccctacatgaaggaatcctgcttgatccttctgcaaaccattcctggttccatcgacttggagatctttgagcgaaccttggtcaccaagttcccggagatcatcagttaccacgacctgcatatatggcaattggccgcccaccgatacgtggctactatacacatccagttccagaatcccaaactctacctcaagatcatcgaacaggttcggtcatacttccacgatcagggaatcggagcggtcacaatccaaccggagttctatccgtccaccaataagaatgcctctgcctcgctagaatgcctgatgcaatgccaggcagtggaatgcatcgagaaggtttgctgtagggattcacgcaccgatctccgcgaggtttgtgacgctcctagtggccgaaaatcatcttctccagtcaagtgtgcaggcaacagccacgaacatagcagagccaaatccaagtcttgcgctgagctgagtgcagtggttgtggagaaaccggaggaactatccgcaggccagctgctaaagggtcaagatcagcaagtggcgaagtccatgcccaaactagaggaaacttgtgtggatgcgacgaaagaagatacagccgagttaagcggaagtccacctgggccaacgagcagcgattga

SEQ ID NO: 40851 - protein, 513 aa, DROSOPHILA
MVKDILQRCKPIPLYTVLVLSICYFVLQLILSHLTHGLTLLMASHHMLCNIFALGGCIITIKHSKQAPEARNPSPALTKINGSGVAISLADTDAQTRAKRECREQKLRNTFGWARIDILTMLIVFIILASLSFSLVVEALQTLVHIDHQDTMHLPIPVMMLGFIGLILNGLTYLLIGGYTLHQGSFLHLTPGGNVVLERPMSSNLDLSLTPMQRHLSKSRNDRQLREELETEVGSVYFATKRQGAVEMLRDVSSTIFVIVCAAIVYVAEDEQHTAKFIDPVLSIFSCVLLVTLSYPYMKESCLILLQTIPGSIDLEIFERTLVTKFPEIISYHDLHIWQLAAHRYVATIHIQFQNPKLYLKIIEQVRSYFHDQGIGAVTIQPEFYPSTNKNASASLECLMQCQAVECIEKVCCRDSRTDLREVCDAPSGRKSSSPVKCAGNSHEHSRAKSKSCAELSAVVVEKPEELSAGQLLKGQDQQVAKSMPKLEETCVDATKEDTAELSGSPPGPTSSD

SEQ ID NO: 40852 - DNA, 17131 bp, DROSOPHILA
tgggcacaaacgaagggacagggtcaaaactagccacaagtcgagtcgagaccgggctgggctgggctgggcaaatcgttgtgggttagtacaaactatgctcttgtgggcttgcggattcccgactgccgtggctcgttttgccaaaaattacgatttttggtgaaagcgaacgtttgacacccgctcgcatttaagccacatgtcgccggtgaatgtgcgaatgtggcttggagtctgccaatgaaaaaaaagaccgcctaagccttgcgtgaaagtgagcgggccaaaatatgaccgactcttgcccggctgagtctcacttggacaaaggctctccgccctaaaatggcatttcccagtcacagagggggggggggggggggggattcaaccacgttcaaaacgactaccgtgttaccactgctccatgtcacttaatcgaattatcatcatggcatcaacaaatgatttcaacttacgctgtcctttggtcctggctctgtcaccaccgcactggccgtcctgcggcgttgccttttttcacttcaattcattccgccagagccaagccctgggcacctctggatccacatcaccaggctgccgggaaaacctttctcctcacttttttaccatttctaccgctggctcctgttttgccaacgtcattgtcgctggtcatttgcgctgcttacttcatccattcattcgctgttcgtccgttttatttcgcctcgtccttttttcagctttgtttcgtctgtcgtctcgtttgtttgaggttatgttgaatgtcagtttgttatccttgtgcaaatccttttatacaaatgaaatttgcgccaaatggcgataagcaaagtacaatagtgtgcggatggtctgcacagacccagctctccttctccacttcccacttttcctttaaatggaaaatcgcacgctcaaatgaccgaattgattactaactcttttcaccaatcccattccgttgcagacatcaacaagggatcacccatcgacttcaagagcggctcggcctgctccacacccacgaaggatacgctgaagggctacgagcggagcacgcagggctgcatgggtcctgtgctgccgcagcgcagcgtcatgaacggactgcccgcacaccactactcggcgccgatgaacttccgcaaggacctggtcgcgcgctgctcctcgccgtggttcggtataggatccatctcggtgctcttcgccttcgtggtcatgcttatcctgctaaccaccaccggcgttataaaatggaatcagtcaccaccctgctccgttctagtcggcaacgaggcctctgaggtcacggctgccaagagcacgaacacggacctctccaagctgcacaattcatcggtgcgcgcgaagaacggacaaggaatcggactggcccagggacaatcgggactcggagcagcaggagtgggatccggcggtggatcttccgcggccactgtgacgacggccacctcgaacagcggcaccgcccaaggactgcagtcgacgtcggcctccgcggaggccacgtcctcggcggccacgtcttcctcccaatcctctctaacgccttcgctgtcctcgtccctggcgaatgccaataatggaggtaattatgcacaacttttaattatttttaaatgagtttttgcaagttttgccagccagctaccaagaggggaagctgagagagaccgattgagagaaagccaagatgtcggagtatttagcgcttagcgccctccggcggagacaaaagtttattgcttttgtaggattttttagcccgaagtttgctcctgacagacagacagacgcctacgccgaatggggattatgcgaatgccgttttcattattcctcgaaacgccttcccatttctttcaattaaagttcaacttgagcgcgttctttgggatttgtcggctaaaaaattgcattaattacatttttgaattgacagcaaggcagccgagaaggcagcagctaaaatagacagtcgaaagtttttagtgtcaaagttcggctttctctttttcaagcgctctccagcctttaacgtaggacctctttaaccgactaagagttagactgctaggattaaattaaaaacacatttaacgctaaattaaaaaagccaagtgactaggggtggctttcaaaggagcgttcaaaccacaagggctttcctaaaccaccaagtttcgattccattcgattcgttcactgtgttacctgtaggacgagcgatgtcaacgcggctgtcagtccgtggggcaggagaaagaggacgtcgacatcgccgaagcctaaacgaggagcagggcgaagatgatgtggctacagatggaactttcagtgacttaattacaaacgaaagcctcaaccagcaggcggctgaaaagtatttggcaactaccctagcaaaaagcccgactgatgttcacggcagtggcaataaaactttaccccgaatggatggagtatacggtacccaaaggagcgaagacaccccggacaccagctacgactatgtctatgaagacgaagttgagccggagaccaccccttcgctcatccgtagaaccaagacggggcaacaatttggcaaatcattaaacagcaatttacgcagcgctgctaaaacactggtcaacaagaggaggaaatatgaccacggaacggtggaagcggagcatattaagcatgaggaggaggaggaggaggatgagcagaagctggagcgccacgaagcgatcgggatggcaacggagctgacgacggagtcggagaccagcacattgcctgctgttattgatgacgataatcaaagtgacaacagcagctcaggcccaacgccggagacgactgtaaggagcgacaccgatgacattgttgaaatcaacacccccccatcacagacagctcaaaggactttcgccgccgtctcgcaccagcctgccattgaacatgattttcaaatcaaagggaccgatgctgggggcttgcagacggagaaacctgccactgatgatatcaataatgagcgtgatttagctgacaactatgaggtagacagtaaggagccgacctcgccgggcacacccccacaaggtataaatcaagccgacatcgactggaagtcgagccccgccagtggtatagaattgcgattgagttcaggctcaagaaatgtacaattaatgctttcgccctacggacttttattgagaatgacttaatatattaaatttctatttgaatgtataattttaaatggtctgccatttgcgcataggtttaaatgaaagcataattataatgtttcttgagcctgattcccaattctattccatttgtgcctattactcatccacttcttggtatcaaggtaaggtgagtcagcaaactggaaaagcgtcactacaatcacttcaatctgaatcggatctgatgatgaatgatgcttcgcactatgaggatatcgatatagtaaaactagatggattgacgatctcccacgaggaggagatttacaagacggcagataaggaaaatatggcaccaaaaaatcaaccatctcagcatatagatagaagtcaaaacgaggtactgaaaggccatcagcagggtgacgaaaaacaaccccaactagagccccttaaaccgtatgtgagtgagcgagttgatctgccgggcaaacgcatattcctgaatctgactatagccacagacgagggcagtgactccgtttacaccttgcacgtcgaagtgcccacgggcggaggaccccacttcatcaaggaggtcctgacgcatgagaaaccgactgcccaggcagacagttgtgttccggaaccaccaccgcgcatgcctgactgcccgtgcagttgcctcccgcctccagcgcccatctatctggatgacaccgttgacatcgactctgccccaccagccaaaactgttacgacgagcacgatctcggcacctattaaccccttccatagcgaggaggaggatgacgaagacggggttagagatgaggagcaaacaccttcttcaagcacggctactaacctccctagcactgagatcgataaccacattgccgcctttactgaacccgctgttggtgctggtggtgtgccgtttgcatgccctgatgtgatgccagtactaatactggaaggtgaattgtgcacaatgcatttgttgttaacctccgcttctctaaccagcgtttgaataaccttactaagcgctgtacagcctgttaactcctagtctatctaactaaaccagataatttctcataagtcctcatttgtacaaaatatcccaaagcatcaaatattgtattggcatcacatcagcatccagcaccagcctggctggcttgattctgtatattattcgtgtttccatttactaacctagcagggaaaactccattggggggattcgcgactatgatagactaagtcctgtataaaatcgtgtagcactagcgaatcacaatatacatcatcaatgactaaccagaatctaatcctctttgtatctctatcatcccctcattgtactctcaaaaacattgccatcgctttgccgccgctgtcgaatcaggagcccgaacattccctgcacgcagtttcccaccggacggcactacctttggccagattactctcggccagaagctgaccaaggagatccagccgtacagctactggaacatgcagttttaccagtcggaacctgcctacgttaagttcgactacacgattccgaggggcgcctccatcggtgtatacggccgacgcaacgccctacccacccacacgcagtaccactttaaggaagtgctcagtggatttagtgccagcacacgaacggcccgggccgctcacgtaagtagcctgcatccaaatggccctttcctgatcgatactaactcaagtcattttttcatgcaccaacgtttcattcatcactcactgcaccaatcactcgcccgatcgctcgcatggcctaattttgaacagctgtcgataactcgggaggtgacacgctatatggagccggggcactggttcgtctcgctttacaacgacgacggggacgtgcaggagctgaccttctacgcggccgtagccgaggacatgacccaaaactgtcccaacggctgctccggcaacggtcagtgcctgctgggtcactgccagtgcaaccccggcttcgggggcgacgactgcagcgagagcgtgtgccccgtactgtgctcccaacatggcgagtacaccaacggagagtgcatctgtaacccgggctggaagggcaaggagtgctctctgcgccacgacgagtgcgaggtggccgactgcagtgggcacggccactgtgtcagtggaaaatgccaatgcatgcgcggctacaaaggcaaattctgcgaagaaggtagcgccaggatataggatcctttttccaaatccagcttgctctgtcccatcctgacactttctaacactctttcgctttttttcccagttgactgcccacatccgaactgctcaggccacggattctgcgccgatggcacttgcatatgcaagaagggctggaagggacctgactgcgctaccatggaccaggatgcgctgcagtgcctccccgactgttccggccacggcaccttcgacctggacacacagacctgtacctgcgaggcaaagtggagtggggacgattgttccaaggagctgtgcgacttggactgcggtcagcacggacgttgtgaaggtgacgcttgtgcatgcgacccggagtggggtggcgagtattgcaacacccggttgtgcgacgtccgctgtaacgagcatggccagtgcaagaatggtacttgtctgtgcgttactggatggaacggaaagcactgcaccatcgagggctgtcccaatagctgcgccgggcatggccagtgccgtgtaagtggcgagggtcaatgggagtgtcgctgctacgagggctgggacgggccggactgtgggattgcactggagttgaactgtggcgacagcaaggacaacgacaagggtgagtagcagattcggagcgttgataagcgaattctctaataccgattatcgatcctagatggcttggttgattgcgaggatcctgagtgctgtgccagccacgtatgcaagacctcccaactatgtgtttcagctccgaagcccattgatgtgctgctcagaaaacagccgccagctattacggcctctttctttgagcggatgaagttcctcatcgacgagagcagcctgcagaactacgccaaactggaaacctttaacgaaaggtaggttattcgtggtagccagtttgccctggacagtttttagttaccattcgaaatcgaggccgctgtggctgtgtatattttccaaaattggcggacgagcttaaatcgtctactgtaaaattttgagagtctagttggttatactactgtaactaaacatatactaccgaaaaaataataatcaaatagtttgcataattaataattttctatgtttaaatatttcattttaattttcgtgccctcgtctaaaaaaatccctcaaataaaaacatatccatacacaccacataccaaatatcccattaaaatcttgtaaataaaaccctatatgtcctttgttaaatcgaaccctagacagaaacaatctaagttagctcctaagtgcatttgatttaagaaatatgttaagcaccctaggtattcagattagttacacttaagttatccagacgtcgcgatttcggtgtgatcgaaatggaactgagatttagggtccccaaacgatatcaacacacaaattctagctaactagaccatagacaaccatgctaattcaattattttctctctgctctcttttcttctccacacgcgctccctaaaccgtgttttaaataatacatgccacctactactaaattactcctgttctactcgatactaccactcactactaactacgcacatactcactaccataatacccaactacgcgtccaaaaattccgaatgctttgcattaacaacgaatgctaaacgctcttgttactcggtactcgatattgttgcccatactctttgttgcgcgataacgaaaacaaatcatatactaacagcattttttggaattatttcaatgcaaggtaagcaagcgaaaagcggtactaaaatactactaaaactactactctactatactactaataattctcaatggttgtttggtacacttttgtatactttaagtctcgttaacttggctccattcgcaatttatttcgaaaactttaccattatcattatcattaccggtacaattacagttaccattgccattatcatttcgttattagtgtagctatccttgtttctttaaagctcagttggtagtttattttaagttcattgcccaaacttattatccagacaaccaggccaaaacacattgggtttttagttctaagctatggaaaactcattctcccactcgtacttaggtcaatgctaggtcacaaacacgagccataaataacatactatatattgttcaacttgtaatacctttatgtgttcaaacgagtattatgttctgtgcgtgtgaattcttattatttgtacttatttattgctcaagtagttacaaatcctcagtttgactgcttgctagcctagctaatctatatctagacataaactagaagccccaatccctgctagacccgactaatacatgttctctgtccttttaacagtcgatcagcggtgatcagaggccgcgttgttacatctctgggcatgggactggtgggtgtgcgagtgtccaccaccacgctcctagagggcttcaccctgacccgagatgatggatggttcgacctaatggttaacggtggtggagccgtaacgctgcagttcggacgcgcacctttccggccgcagtcgcgcatcgtgcaagttccatggaacgaggtcgtgattattgacttggtcgtcatgagtatgtccgaggaaaagggattggccgtaactacgacacacacatgctttgcacacgactacgacctgatgaagcccgtggtgctggcttcgtggaagcacgggtttcagggagcctgtcccgatcgcagcgccattcttgctgaatctcaagtgattcaggagtcgttgcagatcccgggtacaggcctcaacctggtttaccactcatcgcgtgctgccggctacctttccactattaagctgcagttaactccggatgtgattccgacatcgctacatcttatccatctccgcataacaatcgagggaatactctttgaacgaatattcgaagcagatccgggaattaagttcacgtacgcctggaaccgactcaacatctaccggcaacgagtctacggtgtaaccacggccgtggtgaaggttggctaccagtacaccgactgcactgacattgtgtgggacattcaaacaactaagctaagcggtcacgacatgtcgatctcagaagtgggtgggtggaacctggacatccatcaccgctacaacttccacgagggaattctgcaaaagggcgacggctcaaacatatatctgcgcaataagccgcgaatcatcctgaccacaatgggagatggccaccagcggcctctggagtgtcccgattgcgacggccaggcgacaaagcagcgacttctggcacccgtcgcactggccgccgctcctgacggcagtcttttcgtcggtgattttaattacatccgccgcatcatgaccgacggcagcatccgcactgtggtcaagctgaacgcgactcgcgtctcgtaccgctaccacatggccctcagcccgctcgacggaactctttatgtttcggatccagaatcacaccaaatcattcgggtacgcgacaccaacgactactcgcaaccggaactaaactgggaagcggttgtgggctccggggagcgctgtcttcctggtgacgaagcgcactgcggcgatggggcactggcaaaggatgccaaattggcttatccgaaaggcattgcgatttcgagcgacaacatcttgtactttgcagacggaactaatatccgtatggtggaccgggatggaattgtaagcactctgatcggcaaccacatgcacaagtcccactggaagccaattccctgcgagggaaccctgaagctggaggagatgcatcttcgctggcccactgagctagcagtctccccgatggacaacacgctgcacataatcgacgaccacatgatcctgcggatgacaccagacggtcgtgtgcgcgtcatctccggccgtcccctacattgcgccacagcctccactgcctacgatacggatctggctacccacgctaccctggtgatgccgcagtctatcgcgttcggtccactcggtgagctttacgtggcggaaagcgactctcaacgaataaaccgggtgcgcgtgatcggcacggacggaaggatcgctccgtttgctggtgccgaatccaagtgcaattgcctggagcgcggttgcgactgcttcgaagcggaacactatctggccaccagtgccaagttcaacacgatcgccgcccttgctgtcacacccgatagccatgtacacatcgcggaccaggccaactaccgtatccgctccgttatgtcgagcatcccagaggcaagtccgtcgcgcgagtacgagatctacgcacctgacatgcaggagatatacattttcaaccgattcggacagcacgtgtccacacgcaacatcctgaccggagagacgacctatgtgtttacctacaacgtaaacacctccaacggaaaactgagcaccgtaacagacgcggctggcaacaaagtgttcctgcttcgagattacacttctcaggtaaattccatcgagaacacgaagggtcaaaagtgccgcctgcgcatgaccaggatgaaaatgctgcacgagctgagcactccagacaactacaatgtgacctacgaatatcacggccccaccggtctgctacgaaccaagctggactccaccggacgatcctacgtttacaactacgatgagtttggtcgcctcacttctgcagtgactcccaccggtcgtgtcatcgagctgagcttcgacctgagcgtgaagggagcccaggtaaaggtttcggagaacgcccagaaggaaatgtcactgctgatccaaggtgccaccgttattgtgcgcaacggagccgccgagtcgcgtaccaccgttgacatggacggctccaccacaagcatcactccatggggccacaacctgcagatggaagtggcaccttataccattctggcagaacaaagtccactgcttggcgagagctacccggtcccggctaagcaacgcactgagattgctggtgacttggccaacaggtttgagtggcgctactttgtgcgccggcagcagccgctgcaagcgggaaaacagagcaagggaccgccacgtcccgtaaccgaagttggacgtaagctgcgtgtgaacggagacaacgtgctgactttggagtacgaccgcgagacccagtcggtggtcgttatggtggacgacaagcaggagctgcttaacgtgacctacgatcgcacttcccgccccatcagcttccgaccgcagtccggcgactacgcggacgtggacttggagtacgatcggttcggacgtctggtcagttggaagtggggtgtcctgcaagaagcctactctttcgaccgcaatggccgtctgaacgagatcaagtacggcgatggctcaacaatggtctacgcattcaaggacatgtttggctcgttaccgctgaaggtgactacgcctagacgttctgattatctcctgcagtacgatgatgcaggtgcactccagagcctgacgacacctcgtggacacattcacgcattctccctgcaaacttctcttggcttctttaagtaccaatactattcaccaatcaaccgacaccccttcgagattctatataacgacgaaggacagatcttggccaaaatccacccccaccaatctggcaaggtaagtaaatcagaataaaagatttttatagtcaagaacaaaatattgttctgcatgtcgttgtcggaatctatgccgaatagaaataaaaatttcttaatatttgcaggtggcattcgtacatgatactgccggacgactggagacgatcctcgcaggattgtccagcacccactatacctaccaggatacaactagcctggtaaagtccgtggaggtgcaggagccgggcttcgagttgcgccgagagtttaaataccatgcaggtatcctaaaggacgagaagttgcgcttcggctccaagaactcgctggcctcggcgcgctacaagtacgcctacgacggaaacgcccgtctcagcggcatcgagatggccatcgacgataaggaattaccaaccacgcggtacaagtacagccaaaacttgggacaactggaggtcgtgcaggacctgaagatcacgcgcaacgcttttaaccgaacagtcatacaggactctgccaaacaattcttcgccattgtggactacgaccagcatggacgggttaagagcgtgctaatgaacgtgaagaacattgatgtgttccgccttgagttggactacgatcttcgcaaccgcatcaagtcgcaaaagacgaccttcggtagatcgacagcctttgataagattaactacaatgccgacggacatgttgttgaggtcctgggcaccaacaactggaagtatctgttcgacgagaacggcaacactgttggcgtggttgaccagggtgagaagttcaacctgggctacgacatcggagaccgggtgatcaaggtaggcgatgtggagttcaacaactacgatgcccgcggcttcgttgtgaagcgcggtgagcagaagtaccgctacaacaaccgcggacaactgattcactcgttcgaaagggaacgtttccagagctggtactactacgacgaccgcagccgcctcgtggcctggcatgataacaaaggtaacaccacgcagtactactacgccaatcctcgcactcctcatctcgtgacccacgttcacttcccgaagatcagccgcaccatgaagctgttctacgatgaccgcgacatgctaatcgctttggagcatgaggaccagcgctactacgtggccaccgaccagaacggctcgccactagccttctttgatcagaatggcagcattgtcaaggaaatgaagcgaacgcccttcggccgaatcattaaggacactaagccggagttctttgtgcccatcgacttccacggcggactgatcgacccacacacaaagctggtgtacaccgagcagcggcagtacgacccgcacgttggccaatggatgaccccgttgtgggagacgctcgccaccgagatgtcacacccgacggatgtttttatataccgctaccacaacaacgaccccatcaacccgaacaagccccaaaactatatgatcgatctggattcctggctccagttattcggctacgatttgaacaacatgcaaagcagccgctacaccaagctggcccagtatacgccgcaggcttccatcaagtcaaacacgttggcccccgactttggcgtgatctccggcctggagtgcatcgtggaaaaaacaagtgagaagttcagtgattttgactttgtgcccaaaccgctgctgaaaatggagccaaagatgcgcaacttgctcccgcgtgtcagctaccggcgcggtgtgttcggcgaaggtgtactcctctcgagaatcggcggacgggcgttagttagcgtggtcgacggatcaaacagcgtggtgcaggacgtagtgagcagcgtgttcaacaactcttacttccttgacctacacttcagcattcacgaccaagacgtattttacttcgtaaaggataatgtcctgaagctgcgcgacgacaacgaggagctgcgtcgccttggcggcatgttcaacatatcaacccatgaaatcagcgaccacggaggcagcgccgctaaggagctgcgtcttcacggcccagacgccgttgtcattatcaaatatggcgttgatcccgagcaggagcgccaccgcatcctaaagcatgcccacaagcgggcagtggagcgggcttgggagttggagaagcagctggtggctgccggcttccaaggccgtggcgactggaccgaggaggagaaagaggagctcgtccaacacggtgacgtcgacggctggaacggaatcgatatccacagcatacacaagtatccgcagctggccgacgaccccggtaacgtggctttccagcgggacgcgaagcgtaagcgacgcaagaccggcagcagccatcggagtgcctccaaccgccgccagctcaagttcggcgagctgagtgcgtgagtggaggcatatagagagaagctggtggcggagacgaagccagaggagagtgacatgaccgacgaagaatacggtgaccaggaggactacctaattgccgtgggcaaaatggagccaagggacagcagtgaggcacttgacgagcagattttgtaattaggtgaaatgcgcaacagcgaccacaagaaaaacaacagcacaactctcgatgacacaacacaaaataagacaacaacaaaaacaaaggaaaagcaagcattgaacacactaattaatataaactttaatcatgcttaaagtttagtattagccacaacgcaaccctcgaataaccgaagaaacttcttatgtgtacactggaacagaaatatgtatgttgatgttgagtttaggcgtatgtttagtccatgtgtgtaatgttaaatgtaattttttaaatcagaatcagtgtccccacgggcaatcagcttgcaatggcattttacgccacggtgcgtattatttagattggtccattaaccgattttggtcgagacaagagtgcatagatcaaaccaatacgaacggaatgatctcgcttgtttcggaaattggagttaggacaaacacaggccaacaagccagttgcattacgatgtcaaacgatgagtattacacagcaaattatgcatacgataagtacagatgttaaactacgaaatgaataaatgtaaaaagattaaagttctgcatagtagctccctagtctttggtccaaacctggactctttccaacacagcccactctcaaatggcaacagaaatgttgatcgctgcttaacctacttcttcataattgctctgtgtatatacgaacgaatacttttcaagcctccactgacgaaaaagcgcgtatcctttatcctaacactcattttagcgaaataggtctctaagccgaatgctcgaatttaaatttaatagacgcgtctacctaatttggatagccaagaatcaaaaggaatttttatcagtcccctttcaatgcaatacaatactctaacgactcttttcactcattttataatgttagctgttgaatttattcaaaggaaaacgcattaaaaactttttacaaattgtgatatatatttctaaacatttcatttgacaacttgaagtgtagcgaagaaaaactcgaattaactcaaatcgaaccgaaagtaatagcaaacaacgcatgtactttacacatttttttaaacatagtctcttacgattagtttttatgctgcaatatttagttcttaccgtttgccatgttaattgtaaaaacaataatgttttttgtaatgatcccacccgggaatgtcacatagtgtttagtttcttttaattactcatttttaaaaacactcaagcaaggaagataaaatttctgtactcccttaaatttggctgatattttgtcggtattttgtgtttaaaattattattaaattatttataattgaaactaaactattaactattgaaatattacctagcataaaatataggacttgcgcagaacttaaacatacccctataaccataaaaacacaccttgtattataaacacccatacatacaactaaacttaggcttaagaattagactaaagacaaatctcgtaaaaacaaaaaggataagcacctaactaaagtgaaagtaagcgattgattctgtttcagtgagggtagaacagaatattacagaagataactgcgtagtaattagctaaagtgttagtaattttattaaataaaattataaatgaaatatggataaacacttcaaatttaaattaaggtatgcatcattatctgagttcgtttatacgaattgtaaatctttcactgtgtaaagggctaaaaacgttcagtacttagctcgttacgcagaataagatgttgcaaactaacgaaaattgtaaaaatcggaaatccgtatatgaatgtgtatgtaataaaattaagcagcattatattaaccaaaaagcatataacaaaacaaacaaattgaaatcagcataaagaaaactgcaatgcgaaaaattgtgactgaaaacaaggaaaatatatagataccaagcggatgccgttgtcgagctcgactgtgcttcatctcgtacataccccaggtcctctgttcttaaaatactttgatctgtacattttcaggatggggcaaaagcttaacctacttaattagttgagatcatgattaggcatattaactgactaacgaaaaaggccagtccgttaaggcagtttgagcatacataaattgcgaacaataattgtatttaatgtacgaaattgtctttaaaatatatggataccgagagaagtgcagagggtataggctataaattacaaatcgaatgcagacaacaaagacaattgtacacaaagaaataattatggcaagccgatatacatacatgataaaacatccatataaatatatataataactaataatattacgagtaaaaagcgatttcaataaaaatgaaaatataaaaaaataaacgtgttatttaattttggatttttaacagaaagtaggtgaggtaacgggtttggcgagggaagagtattttaatgctttgaactagtcaaacccatgaataactgtaactctatattagaacctaatatgcattactatacttttaaatttgtaattctaccatattaaagaaatactaaagcccgggaaaaaatcaaaatcaacaaagctgcataaggtttaaaacttttttgaaaagttgacaacatttatttcagtttcgattcgttttcaattaaataccaatagctccgtaagcttaacataaggcgcgtcccaaggggttttccgtgaagatagattttcctgaatgctggttgatgaatttggagtaaggagcgggggatagttcatagcctgctgatagtttcggtgcatcttggcttcgagttagaacaagcaattttccgcttaggttttcatcgatagactttagtgcagtagtccttttttggtgatcaacaacgtaaatattaaagttaactccatacaatccaaacaagtgctccaactcagagcgaagtgtaggcagtgaaataatttccttgctaacgttgtgctgcagaaatagagacgctttgctgctatttccaaatcgtggcaccagatcttctgccaaggatatatttaaccaaggcaaattaggaagctgtaattcctcagtcgaacaaatagtcaactttaagggaactcctttaagatcgacaagctcactagctattaaacgcttcttggacgcctgctcagatgaatagggagcaaactccgacttaatggccgtcttgattatgctggcatagttggacaaaactttggctagctgagcctgagcctccaggacctcctgcttagctttgttatcggcagctagctcatggaagataagaacgggatcggtcggtataagttgagccttcttttttagtttctgg

SEQ ID NO: 40853 - DNA, 10242 bp, DROSOPHILA
acatcaacaagggatcacccatcgacttcaagagcggctcggcctgctccacacccacgaaggatacgctgaagggctacgagcggagcacgcagggctgcatgggtcctgtgctgccgcagcgcagcgtcatgaacggactgcccgcacaccactactcggcgccgatgaacttccgcaaggacctggtcgcgcgctgctcctcgccgtggttcggtataggatccatctcggtgctcttcgccttcgtggtcatgcttatcctgctaaccaccaccggcgttataaaatggaatcagtcaccaccctgctccgttctagtcggcaacgaggcctctgaggtcacggctgccaagagcacgaacacggacctctccaagctgcacaattcatcggtgcgcgcgaagaacggacaaggaatcggactggcccagggacaatcgggactcggagcagcaggagtgggatccggcggtggatcttccgcggccactgtgacgacggccacctcgaacagcggcaccgcccaaggactgcagtcgacgtcggcctccgcggaggccacgtcctcggcggccacgtcttcctcccaatcctctctaacgccttcgctgtcctcgtccctggcgaatgccaataatggaggagcccgaacattccctgcacgcagtttcccaccggacggcactacctttggccagattactctcggccagaagctgaccaaggagatccagccgtacagctactggaacatgcagttttaccagtcggaacctgcctacgttaagttcgactacacgattccgaggggcgcctccatcggtgtatacggccgacgcaacgccctacccacccacacgcagtaccactttaaggaagtgctcagtggatttagtgccagcacacgaacggcccgggccgctcacctgtcgataactcgggaggtgacacgctatatggagccggggcactggttcgtctcgctttacaacgacgacggggacgtgcaggagctgaccttctacgcggccgtagccgaggacatgacccaaaactgtcccaacggctgctccggcaacggtcagtgcctgctgggtcactgccagtgcaaccccggcttcgggggcgacgactgcagcgagagcgtgtgccccgtactgtgctcccaacatggcgagtacaccaacggagagtgcatctgtaacccgggctggaagggcaaggagtgctctctgcgccacgacgagtgcgaggtggccgactgcagtgggcacggccactgtgtcagtggaaaatgccaatgcatgcgcggctacaaaggcaaattctgcgaagaagttgactgcccacatccgaactgctcaggccacggattctgcgccgatggcacttgcatatgcaagaagggctggaagggacctgactgcgctaccatggaccaggatgcgctgcagtgcctccccgactgttccggccacggcaccttcgacctggacacacagacctgtacctgcgaggcaaagtggagtggggacgattgttccaaggagctgtgcgacttggactgcggtcagcacggacgttgtgaaggtgacgcttgtgcatgcgacccggagtggggtggcgagtattgcaacacccggttgtgcgacgtccgctgtaacgagcatggccagtgcaagaatggtacttgtctgtgcgttactggatggaacggaaagcactgcaccatcgagggctgtcccaatagctgcgccgggcatggccagtgccgtgtaagtggcgagggtcaatgggagtgtcgctgctacgagggctgggacgggccggactgtgggattgcactggagttgaactgtggcgacagcaaggacaacgacaaggatggcttggttgattgcgaggatcctgagtgctgtgccagccacgtatgcaagacctcccaactatgtgtttcagctccgaagcccattgatgtgctgctcagaaaacagccgccagctattacggcctctttctttgagcggatgaagttcctcatcgacgagagcagcctgcagaactacgccaaactggaaacctttaacgaaagtcgatcagcggtgatcagaggccgcgttgttacatctctgggcatgggactggtgggtgtgcgagtgtccaccaccacgctcctagagggcttcaccctgacccgagatgatggatggttcgacctaatggttaacggtggtggagccgtaacgctgcagttcggacgcgcacctttccggccgcagtcgcgcatcgtgcaagttccatggaacgaggtcgtgattattgacttggtcgtcatgagtatgtccgaggaaaagggattggccgtaactacgacacacacatgctttgcacacgactacgacctgatgaagcccgtggtgctggcttcgtggaagcacgggtttcagggagcctgtcccgatcgcagcgccattcttgctgaatctcaagtgattcaggagtcgttgcagatcccgggtacaggcctcaacctggtttaccactcatcgcgtgctgccggctacctttccactattaagctgcagttaactccggatgtgattccgacatcgctacatcttatccatctccgcataacaatcgagggaatactctttgaacgaatattcgaagcagatccgggaattaagttcacgtacgcctggaaccgactcaacatctaccggcaacgagtctacggtgtaaccacggccgtggtgaaggttggctaccagtacaccgactgcactgacattgtgtgggacattcaaacaactaagctaagcggtcacgacatgtcgatctcagaagtgggtgggtggaacctggacatccatcaccgctacaacttccacgagggaattctgcaaaagggcgacggctcaaacatatatctgcgcaataagccgcgaatcatcctgaccacaatgggagatggccaccagcggcctctggagtgtcccgattgcgacggccaggcgacaaagcagcgacttctggcacccgtcgcactggccgccgctcctgacggcagtcttttcgtcggtgattttaattacatccgccgcatcatgaccgacggcagcatccgcactgtggtcaagctgaacgcgactcgcgtctcgtaccgctaccacatggccctcagcccgctcgacggaactctttatgtttcggatccagaatcacaccaaatcattcgggtacgcgacaccaacgactactcgcaaccggaactaaactgggaagcggttgtgggctccggggagcgctgtcttcctggtgacgaagcgcactgcggcgatggggcactggcaaaggatgccaaattggcttatccgaaaggcattgcgatttcgagcgacaacatcttgtactttgcagacggaactaatatccgtatggtggaccgggatggaattgtaagcactctgatcggcaaccacatgcacaagtcccactggaagccaattccctgcgagggaaccctgaagctggaggagatgcatcttcgctggcccactgagctagcagtctccccgatggacaacacgctgcacataatcgacgaccacatgatcctgcggatgacaccagacggtcgtgtgcgcgtcatctccggccgtcccctacattgcgccacagcctccactgcctacgatacggatctggctacccacgctaccctggtgatgccgcagtctatcgcgttcggtccactcggtgagctttacgtggcggaaagcgactctcaacgaataaaccgggtgcgcgtgatcggcacggacggaaggatcgctccgtttgctggtgccgaatccaagtgcaattgcctggagcgcggttgcgactgcttcgaagcggaacactatctggccaccagtgccaagttcaacacgatcgccgcccttgctgtcacacccgatagccatgtacacatcgcggaccaggccaactaccgtatccgctccgttatgtcgagcatcccagaggcaagtccgtcgcgcgagtacgagatctacgcacctgacatgcaggagatatacattttcaaccgattcggacagcacgtgtccacacgcaacatcctgaccggagagacgacctatgtgtttacctacaacgtaaacacctccaacggaaaactgagcaccgtaacagacgcggctggcaacaaagtgttcctgcttcgagattacacttctcaggtaaattccatcgagaacacgaagggtcaaaagtgccgcctgcgcatgaccaggatgaaaatgctgcacgagctgagcactccagacaactacaatgtgacctacgaatatcacggccccaccggtctgctacgaaccaagctggactccaccggacgatcctacgtttacaactacgatgagtttggtcgcctcacttctgcagtgactcccaccggtcgtgtcatcgagctgagcttcgacctgagcgtgaagggagcccaggtaaaggtttcggagaacgcccagaaggaaatgtcactgctgatccaaggtgccaccgttattgtgcgcaacggagccgccgagtcgcgtaccaccgttgacatggacggctccaccacaagcatcactccatggggccacaacctgcagatggaagtggcaccttataccattctggcagaacaaagtccactgcttggcgagagctacccggtcccggctaagcaacgcactgagattgctggtgacttggccaacaggtttgagtggcgctactttgtgcgccggcagcagccgctgcaagcgggaaaacagagcaagggaccgccacgtcccgtaaccgaagttggacgtaagctgcgtgtgaacggagacaacgtgctgactttggagtacgaccgcgagacccagtcggtggtcgttatggtggacgacaagcaggagctgcttaacgtgacctacgatcgcacttcccgccccatcagcttccgaccgcagtccggcgactacgcggacgtggacttggagtacgatcggttcggacgtctggtcagttggaagtggggtgtcctgcaagaagcctactctttcgaccgcaatggccgtctgaacgagatcaagtacggcgatggctcaacaatggtctacgcattcaaggacatgtttggctcgttaccgctgaaggtgactacgcctagacgttctgattatctcctgcagtacgatgatgcaggtgcactccagagcctgacgacacctcgtggacacattcacgcattctccctgcaaacttctcttggcttctttaagtaccaatactattcaccaatcaaccgacaccccttcgagattctatataacgacgaaggacagatcttggccaaaatccacccccaccaatctggcaaggtggcattcgtacatgatactgccggacgactggagacgatcctcgcaggattgtccagcacccactatacctaccaggatacaactagcctggtaaagtccgtggaggtgcaggagccgggcttcgagttgcgccgagagtttaaataccatgcaggtatcctaaaggacgagaagttgcgcttcggctccaagaactcgctggcctcggcgcgctacaagtacgcctacgacggaaacgcccgtctcagcggcatcgagatggccatcgacgataaggaattaccaaccacgcggtacaagtacagccaaaacttgggacaactggaggtcgtgcaggacctgaagatcacgcgcaacgcttttaaccgaacagtcatacaggactctgccaaacaattcttcgccattgtggactacgaccagcatggacgggttaagagcgtgctaatgaacgtgaagaacattgatgtgttccgccttgagttggactacgatcttcgcaaccgcatcaagtcgcaaaagacgaccttcggtagatcgacagcctttgataagattaactacaatgccgacggacatgttgttgaggtcctgggcaccaacaactggaagtatctgttcgacgagaacggcaacactgttggcgtggttgaccagggtgagaagttcaacctgggctacgacatcggagaccgggtgatcaaggtaggcgatgtggagttcaacaactacgatgcccgcggcttcgttgtgaagcgcggtgagcagaagtaccgctacaacaaccgcggacaactgattcactcgttcgaaagggaacgtttccagagctggtactactacgacgaccgcagccgcctcgtggcctggcatgataacaaaggtaacaccacgcagtactactacgccaatcctcgcactcctcatctcgtgacccacgttcacttcccgaagatcagccgcaccatgaagctgttctacgatgaccgcgacatgctaatcgctttggagcatgaggaccagcgctactacgtggccaccgaccagaacggctcgccactagccttctttgatcagaatggcagcattgtcaaggaaatgaagcgaacgcccttcggccgaatcattaaggacactaagccggagttctttgtgcccatcgacttccacggcggactgatcgacccacacacaaagctggtgtacaccgagcagcggcagtacgacccgcacgttggccaatggatgaccccgttgtgggagacgctcgccaccgagatgtcacacccgacggatgtttttatataccgctaccacaacaacgaccccatcaacccgaacaagccccaaaactatatgatcgatctggattcctggctccagttattcggctacgatttgaacaacatgcaaagcagccgctacaccaagctggcccagtatacgccgcaggcttccatcaagtcaaacacgttggcccccgactttggcgtgatctccggcctggagtgcatcgtggaaaaaacaagtgagaagttcagtgattttgactttgtgcccaaaccgctgctgaaaatggagccaaagatgcgcaacttgctcccgcgtgtcagctaccggcgcggtgtgttcggcgaaggtgtactcctctcgagaatcggcggacgggcgttagttagcgtggtcgacggatcaaacagcgtggtgcaggacgtagtgagcagcgtgttcaacaactcttacttccttgacctacacttcagcattcacgaccaagacgtattttacttcgtaaaggataatgtcctgaagctgcgcgacgacaacgaggagctgcgtcgccttggcggcatgttcaacatatcaacccatgaaatcagcgaccacggaggcagcgccgctaaggagctgcgtcttcacggcccagacgccgttgtcattatcaaatatggcgttgatcccgagcaggagcgccaccgcatcctaaagcatgcccacaagcgggcagtggagcgggcttgggagttggagaagcagctggtggctgccggcttccaaggccgtggcgactggaccgaggaggagaaagaggagctcgtccaacacggtgacgtcgacggctggaacggaatcgatatccacagcatacacaagtatccgcagctggccgacgaccccggtaacgtggctttccagcgggacgcgaagcgtaagcgacgcaagaccggcagcagccatcggagtgcctccaaccgccgccagctcaagttcggcgagctgagtgcgtgagtggaggcatatagagagaagctggtggcggagacgaagccagaggagagtgacatgaccgacgaagaatacggtgaccaggaggactacctaattgccgtgggcaaaatggagccaagggacagcagtgaggcacttgacgagcagattttgtaattaggtgaaatgcgcaacagcgaccacaagaaaaacaacagcacaactctcgatgacacaacacaaaataagacaacaacaaaaacaaaggaaaagcaagcattgaacacactaattaatataaactttaatcatgcttaaagtttagtattagccacaacgcaaccctcgaataaccgaagaaacttcttatgtgtacactggaacagaaatatgtatgttgatgttgagtttaggcgtatgtttagtccatgtgtgtaatgttaaatgtaattttttaaatcagaatcagtgtccccacgggcaatcagcttgcaatggcattttacgccacggtgcgtattatttagattggtccattaaccgattttggtcgagacaagagtgcatagatcaaaccaatacgaacggaatgatctcgcttgtttcggaaattggagttaggacaaacacaggccaacaagccagttgcattacgatgtcaaacgatgagtattacacagcaaattatgcatacgataagtacagatgttaaactacgaaatgaataaatgtaaaaagattaaagttctgcatagtagctccctagtctttggtccaaacctggactctttccaacacagcccactctcaaatggcaacagaaatgttgatcgctgcttaacctacttcttcataattgctctgtgtatatacgaacgaatacttttcaagcctccactgacgaaaaagcgcgtatcctttatcctaacactcattttagcgaaataggtctctaagccgaatgctcgaatttaaatttaatagacgcgtctacctaatttggatagccaagaatcaaaaggaatttttatcagtcccctttcaatgcaatacaatactctaacgactcttttcactcattttataatgttagctgttgaatttattcaaaggaaaacgcattaaaaactttttacaaattgtgatatatatttctaaacatttcatttgacaacttgaagtgtagcgaagaaaaactcgaattaactcaaatcgaaccgaaagtaatagcaaacaacgcatgtactttacacatttttttaaacatagtctcttacgattagtttttatgctgcaatatttagttcttaccgtttgccatgttaattgtaaaaacaataatgttttttgtaatgatcccacccgggaatgtcacatagtgtttagtttcttttaattactcatttttaaaaacactcaagcaaggaagataaaatttctgtactcccttaaatttggctgatattttgtcggtattttgtgtttaaaattattattaaattatttataattgaaactaaactattaactattgaaatattacctagcataaaatataggacttgcgcagaacttaaacatacccctataaccataaaaacacaccttgtattataaacacccatacatacaactaaacttaggcttaagaattagactaaagacaaatctcgtaaaaacaaaaaggataagcacctaactaaagtgaaagtaagcgattgattctgtttcagtgagggtagaacagaatattacagaagataactgcgtagtaattagctaaagtgttagtaattttattaaataaaattataaatgaaatatggataaacacttcaaatttaaattaaggtatgcatcattatctgagttcgtttatacgaattgtaaatctttcactgtgtaaagggctaaaaacgttcagtacttagctcgttacgcagaataagatgttgcaaactaacgaaaattgtaaaaatcggaaatccgtatatgaatgtgtatgtaataaaattaagcagcattatattaaccaaaaagcatataacaaaacaaacaaattgaaatcagcataaagaaaactgcaatgcgaaaaattgtgactgaaaacaaggaaaatatatagataccaagcggatgccgttgtcgagctcgactgtgcttcatctcgtacataccccaggtcctctgttcttaaaatactttgatctgtacattttcaggatggggcaaaagcttaacctacttaattagttgagatcatgattaggcatattaactgactaacgaaaaaggccagtccgttaaggcagtttgagcatacataaattgcgaacaataattgtatttaatgtacgaaattgtctttaaaatatatggataccgagagaagtgcagagggtataggctataaattacaaatcgaatgcagacaacaaagacaattgtacacaaagaaataattatggcaagccgatatacatacatgataaaacatccatataaatatatataataactaataatattacgagtaaaaagcgatttc

SEQ ID NO: 40854 - protein, 2515 aa, DROSOPHILA
MNFRKDLVARCSSPWFGIGSISVLFAFVVMLILLTTTGVIKWNQSPPCSVLVGNEASEVTAAKSTNTDLSKLHNSSVRAKNGQGIGLAQGQSGLGAAGVGSGGGSSAATVTTATSNSGTAQGLQSTSASAEATSSAATSSSQSSLTPSLSSSLANANNGGARTFPARSFPPDGTTFGQITLGQKLTKEIQPYSYWNMQFYQSEPAYVKFDYTIPRGASIGVYGRRNALPTHTQYHFKEVLSGFSASTRTARAAHLSITREVTRYMEPGHWFVSLYNDDGDVQELTFYAAVAEDMTQNCPNGCSGNGQCLLGHCQCNPGFGGDDCSESVCPVLCSQHGEYTNGECICNPGWKGKECSLRHDECEVADCSGHGHCVSGKCQCMRGYKGKFCEEVDCPHPNCSGHGFCADGTCICKKGWKGPDCATMDQDALQCLPDCSGHGTFDLDTQTCTCEAKWSGDDCSKELCDLDCGQHGRCEGDACACDPEWGGEYCNTRLCDVRCNEHGQCKNGTCLCVTGWNGKHCTIEGCPNSCAGHGQCRVSGEGQWECRCYEGWDGPDCGIALELNCGDSKDNDKDGLVDCEDPECCASHVCKTSQLCVSAPKPIDVLLRKQPPAITASFFERMKFLIDESSLQNYAKLETFNESRSAVIRGRVVTSLGMGLVGVRVSTTTLLEGFTLTRDDGWFDLMVNGGGAVTLQFGRAPFRPQSRIVQVPWNEVVIIDLVVMSMSEEKGLAVTTTHTCFAHDYDLMKPVVLASWKHGFQGACPDRSAILAESQVIQESLQIPGTGLNLVYHSSRAAGYLSTIKLQLTPDVIPTSLHLIHLRITIEGILFERIFEADPGIKFTYAWNRLNIYRQRVYGVTTAVVKVGYQYTDCTDIVWDIQTTKLSGHDMSISEVGGWNLDIHHRYNFHEGILQKGDGSNIYLRNKPRIILTTMGDGHQRPLECPDCDGQATKQRLLAPVALAAAPDGSLFVGDFNYIRRIMTDGSIRTVVKLNATRVSYRYHMALSPLDGTLYVSDPESHQIIRVRDTNDYSQPELNWEAVVGSGERCLPGDEAHCGDGALAKDAKLAYPKGIAISSDNILYFADGTNIRMVDRDGIVSTLIGNHMHKSHWKPIPCEGTLKLEEMHLRWPTELAVSPMDNTLHIIDDHMILRMTPDGRVRVISGRPLHCATASTAYDTDLATHATLVMPQSIAFGPLGELYVAESDSQRINRVRVIGTDGRIAPFAGAESKCNCLERGCDCFEAEHYLATSAKFNTIAALAVTPDSHVHIADQANYRIRSVMSSIPEASPSREYEIYAPDMQEIYIFNRFGQHVSTRNILTGETTYVFTYNVNTSNGKLSTVTDAAGNKVFLLRDYTSQVNSIENTKGQKCRLRMTRMKMLHELSTPDNYNVTYEYHGPTGLLRTKLDSTGRSYVYNYDEFGRLTSAVTPTGRVIELSFDLSVKGAQVKVSENAQKEMSLLIQGATVIVRNGAAESRTTVDMDGSTTSITPWGHNLQMEVAPYTILAEQSPLLGESYPVPAKQRTEIAGDLANRFEWRYFVRRQQPLQAGKQSKGPPRPVTEVGRKLRVNGDNVLTLEYDRETQSVVVMVDDKQELLNVTYDRTSRPISFRPQSGDYADVDLEYDRFGRLVSWKWGVLQEAYSFDRNGRLNEIKYGDGSTMVYAFKDMFGSLPLKVTTPRRSDYLLQYDDAGALQSLTTPRGHIHAFSLQTSLGFFKYQYYSPINRHPFEILYNDEGQILAKIHPHQSGKVAFVHDTAGRLETILAGLSSTHYTYQDTTSLVKSVEVQEPGFELRREFKYHAGILKDEKLRFGSKNSLASARYKYAYDGNARLSGIEMAIDDKELPTTRYKYSQNLGQLEVVQDLKITRNAFNRTVIQDSAKQFFAIVDYDQHGRVKSVLMNVKNIDVFRLELDYDLRNRIKSQKTTFGRSTAFDKINYNADGHVVEVLGTNNWKYLFDENGNTVGVVDQGEKFNLGYDIGDRVIKVGDVEFNNYDARGFVVKRGEQKYRYNNRGQLIHSFERERFQSWYYYDDRSRLVAWHDNKGNTTQYYYANPRTPHLVTHVHFPKISRTMKLFYDDRDMLIALEHEDQRYYVATDQNGSPLAFFDQNGSIVKEMKRTPFGRIIKDTKPEFFVPIDFHGGLIDPHTKLVYTEQRQYDPHVGQWMTPLWETLATEMSHPTDVFIYRYHNNDPINPNKPQNYMIDLDSWLQLFGYDLNNMQSSRYTKLAQYTPQASIKSNTLAPDFGVISGLECIVEKTSEKFSDFDFVPKPLLKMEPKMRNLLPRVSYRRGVFGEGVLLSRIGGRALVSVVDGSNSVVQDVVSSVFNNSYFLDLHFSIHDQDVFYFVKDNVLKLRDDNEELRRLGGMFNISTHEISDHGGSAAKELRLHGPDAVVIIKYGVDPEQERHRILKHAHKRAVERAWELEKQLVAAGFQGRGDWTEEEKEELVQHGDVDGWNGIDIHSIHKYPQLADDPGNVAFQRDAKRKRRKTGSSHRSASNRRQLKFGELSA

SEQ ID NO: 40855 - DNA, 2450 bp, DROSOPHILA
gaagtattatttaacttattttaatttaacttatttcggttttataagccatatatgtataatctaatttaaattgaaaataatgttcgcaagtgtcattataatggcaatataagtgcttgaatgataaaataatattattttataatattagaaacatctgttattgatatttttagatattaaaatgtcttaaaaacccatattttattacattttttacatttaaacgttcttgcttgatatatccttaattcaatattaacttaattaaataaatcagggttatcttgaaaatatacgaaaaataagacaatttttaaagactttcatttgctgctgctatctgaacataacagtttattttattgttcccgtatctgaagtttgtttaaaatatttgaaccgagaccattgtcttcttatctaaacgctcatatgttgagctgatggtagttttcctcaccgctttccacacattttccgaaatctcagccagatctttgggtaacagtaaacaaaaacccaacacatggtttggtgccgtgggaatgtcccacatctttgaaggatctgcagacaggacctttcgcatctttacccaaaactggcccacatgttgagaatgccatgcatcgcaaatgataagaaattcaaatatgttttcaatgtatatttttagtttttgtttacaaatgtattttgaaaatccaaacaattgaaatccatttttgcactgcaaaaaggagcaattgctggaatatctcccgccacaatattctgtggatgcccaatcgctttttgggattttccagtgtgttagaaattccgcaaagcgctgcccaagatcgatgatcccaaagtcgaagtgcccaaactctggagtacccatcccgctggagaaccgagctccagtccagttgaagttatcccaatcgaaagttgaaaaaacccatttttcgttcaaggttgaagttgcagctccaggcgattacttcgttcaagcttgagcccaacggtccaggaagttccattcgatggcatagggttcgcaggctttgggttgcaccgatgtccagaagaaggtgccggcattggtgcgggcaaaatgcactggtacatagtaatcctcctggtcgatggtgtgcagctccccggatccgttctcattgtaaacgatgacggcatcttccttggcgcactggcggatttcctcgatgaggcgatgctccagatgctcgttggccatgttgtccatatcgttgctgagccactcgaactcggcctccttctcctcggaggcgatgtaggagctcctcttgggctgctccttcttcatgttgaagaattgaccgagcagcggcttcagcagattcttcaggcgacgcgaaggcgagactttcgatttgtacatggtgttgagggtcttctgcttgctgatggccgacattagatgaatttcgttcagatattttctggtggtgagtgcgtagaatgcgtgctgggatgttctcgcttcgacgttcggatgctgtgtgatgctgtcactaagattagaggcgctatttatactttcttgggagacaggagcgatgctacagcatctcagccaatcacgtcgctcggaaggcaggcaggtgcaaggatccgaaatttcacacgttagtcagtggcagcaggtaggtcctgcaggacctgagattcgagatcttgtgcgaagcgtgggaatctcgggcccattcctcctttcaagacaattatccccgggttccaaacgaatccttggcgtgggaacagcacattgccggccttctctcggagacccagttattgttttggatttcgactgggtttgttttgccagttcatcagaaatatgtcgatcctgtaaccgaaaaccagctacaatctaagccaaatttacacaaatcgtgcactttcattcttatgtttttcggttcggttgattagggatggcatcgcagaaagtcctttgaggcacgatcttgagaattctcacgttcagttggggagctcctcgtattttggttacttgggcagcgggcttcccaaatattttcgtgtcacgacagagggtttcatttttgaacatctctagtcctcacttttttggttcagacccctcaattaattgtagaatgggggttcattttttgtgaatgtatcgtattataactcatttattgtgggatgtggtgattgctcgccttacatttatatttacagcctgtgagaatttgtaacccgtgtttaaatggttgaaaagatcctaaagaaatataaaactgcagatgaggtctgtttagatgtttgggccctattgatatcaaattgtgtttgtagcaatcactaatataaatttacttgaggtttcattttttctattacttagggccacaaaagagctgaaatcctcagagacaaatatt

SEQ ID NO: 40856 - DNA, 450 bp, DROSOPHILA
atgtcggccatcagcaagcagaagaccctcaacaccatgtacaaatcgaaagtctcgccttcgcgtcgcctgaagaatctgctgaagccgctgctcggtcaattcttcaacatgaagaaggagcagcccaagaggagctcctacatcgcctccgaggagaaggaggccgagttcgagtggctcagcaacgatatggacaacatggccaacgagcatctggagcatcgcctcatcgaggaaatccgccagtgcgccaaggaagatgccgtcatcgtttacaatgagaacggatccggggagctgcacaccatcgaccaggaggattactatgtaccagtgcattttgcccgcaccaatgccggcaccttcttctggacatcggtgcaacccaaagcctgcgaaccctatgccatcgaatggaacttcctggaccgttgggctcaagcttga

SEQ ID NO: 40857 - protein, 149 aa, DROSOPHILA
MSAISKQKTLNTMYKSKVSPSRRLKNLLKPLLGQFFNMKKEQPKRSSYIASEEKEAEFEWLSNDMDNMANEHLEHRLIEEIRQCAKEDAVIVYNENGSGELHTIDQEDYYVPVHFARTNAGTFFWTSVQPKACEPYAIEWNFLDRWAQA

SEQ ID NO: 40858 - DNA, 3316 bp, DROSOPHILA
cgctggaaaactcgtctccgattccatcatcatcatgccgccggtggcctgcatctcgtaatccatcaaagaggcctgcgttccaattatttgtgtggcaggcaaggaaaagaaatctgcaaggcaataaaccgatcattaagttacattaacttatataaaataatttacaatttattataattgtatgtacaaactgaagtctattccgatttttctcagtgcaacggcaatgcaacgcaacacgttgacactatcgatgcttggcccaattaccgatcgtttatttataaccaattcggagcagagcagtgtgttgtcatttcttatctacgagttagtttctttttttctgctttttgtttgtgctgataaccttatcaacgcaatcggaaactataaggtaacgaaggcaaaacggagtgcacagattaacaacaactaattaagtgtagtcatagttgcaaaaatacatatgtatatttattccaatagaaaacatttaaaattgtatttctattattttgtaccccttttaaaaatattaatatagatcaaaaaaattgagatatatatttaagtaaatcgtggacaaaactaaatgaaatattcgtacatatcattgaaatcacttaaaaacatttaagaagcgtttataccctcagaaagagtatagattattgattcactcccgcagatatacacatttcttttaccggctgtatatatttacgcccacactgccttccccctttgttttcttctattgttggaacacttttgcgaatgcagattgattaaactggcggtgtaagaagaatcgtaacactctgttgacccagtgtacatagtcatctccgcagtacctccagttaatccccactacttgtgtgttttgtttagtaggccaaacacaccgatatacatatatgcatatgtatgtctataaagactgagtcaagccggtttttctttgctaaatttaagcggctgtcaagtgctatcgtttcgagtccggtaccctctgtatgccacagatagtccggatcccaccgaataactgaacagtgataacacaggtcgctgggagagccaatgggagaagaaatggggccgcaaggtcagagataattgtgtaaatttacaagttttacgacactttcacgcaacaccaattaaatgcgcgggcataagagccaaggtcgagagattataaacaaaattacagcttaagtcgtctggtgtgttccggtttttaaattcataccaacaaaaatgccttcaatactcatttaaagttaaattaatatcatatttggttcaagtataatttgaatttcattgcaagtgttaaatttaagttcaaaatggtttgagacactaaaaaatgcaaccattactcttaaaggattgagtataacataataatatatttctgagtgttttctgaaactaatgaggatatttaatatttaaaggctgctcgacaacaaatttatttattggaattattgcatgtgcaattgctaagtaagcctaatataaaactgccttaaacaatttaataattaaataactaagcttgcatttttgagcagcgatactcaccattgcagtactgggcggccaagtcagactcgtcgtagcgacatctcttggtgtacaccggttggtccgtgtccaaatccccgacaggattgtgaccgggattcaggcgcttcttgcagcgcaggacttccggaggcaggacgaccggcatcggttgtgccgcgaggttattgccatcattgttgttgttgttgttgttggcgtcggtcatgaaggtgacggcgcgtggattgaacggatccatcgaaggacgcagcgctccagtttcgaaagtggcggccgccgacgacgacggatcaccatgtgcccagcactcgaagttcgtcaaaaccatcgcgcgccagctgcagtggaatttccccaaaaaaaccgaaaagcaagtacagtaaattcggaaaaaacgctcctctgcgtccgtactgtactgtacgaaatcgtgcggcgaactgcaggcgcgtatttttcccctaattgaaatcgtatttgtatgcagtatggattttgatggctctgtcggcttaataagcgccgaaaatacgcagcagttgctaaaatggatgaaataattcaattaacacacgcaagcggggcgcgcgagcattcggccgaaatgcgactgtaaatgcggtgacggcaactgttaaaaataaaccaataagcaagttttacattttgccgcgtgcgcctttcgattcacgattgctcttttgttttcctttcgctccagtgtgaccacactgctggtgtcgcaataaggcgtgcgaccctggagaaaaataccgaagaagttgcgaaaagacagctgtggttgcaaaaatagtgcagatcttatgaatctcattggaagtcatggaaacttataatttatatatatttatatttataattatcgaaaatcgcgaaacagcgtacaatatgttacttgaacaaatatgacacttcattttgtatacctaaagaaatagcttcaatacttctcttttattttgatataattttaactttttactcaattaaaatgaattaaaaaatgagaatttagttgaaaatatttcgatagcaacgataccaacgattaatcgactagtcgcagtattttctggtatattttgaatgctggcacggtactaccactttatcatgtgatttgtgatttgtcaaatatttctgataaccgaatggcagaccaaagcaaaactagaaattgagagaaattgctgatttttcaattaagctgcattctatttaactgaaaagatgtcgaccaagaacaagaaagccgccggaggcaacggagttgcgccgaaacaaacccgccagcagtcgcacgtatgtaacatgacggctccgattgccggctagctaatcccttgtttattttggatgcccaggactcgcaggactacagctccttcaagacagtgctcttctactgcatgcttatcgttttcctgcccgtgctgaccttctttgtgctgaagggcttcgttctggaccagttcctcgacatttccgaagtcaaagtgaacatagcatccgccgtgggagcggtcgttgcattgcacatcgccctgggactctatatatacagggcctactttggggcacccggttccaagggctccaaaacggactaatcctcatctaccccggactgttaccctatttccattaactttaagtcggtagagcactcttgtacatacat

SEQ ID NO: 40859 - DNA, 790 bp, DROSOPHILA
aaagagcaatcgtgaatcgaaaggcgcacgcggcaaaatgtaaaacttgcttattggtttatttttaacagttgccgtcaccgcatttacagtcgcatttcggccgaatgctcgcgcgccccgcttgcgtgtgttaattgaattatttcatccattttagcaactgctgcgtattttcggcgcttattaagccgacagagccatcaaaatccatactgcatacaaatacgatttcaattaggggaaaaatacgcgcctgcagttcgccgcacgatttcgtacagtacagtacggacgcagaggagcgttttttccgaatttactgtacttgcttttcggtttttttggggaaattccactgcagctggcgcgcgatggttttgacgaacttcgagtgctgggcacatggtgatccgtcgtcgtcggcggccgccactttcgaaactggagcgctgcgtccttcgatggatccgttcaatccacgcgccgtcaccttcatgaccgacgccaacaacaacaacaacaacaatgatggcaataacctcgcggcacaaccgatgccggtcgtcctgcctccggaagtcctgcgctgcaagaagcgcctgaatcccggtcacaatcctgtcggggatttggacacggaccaaccggtgtacaccaagagatgtcgctacgacgagtctgacttggccgcccagtactgcaatcgacctgtgttatcactgttcagttattcggtgggatccggactatctgtggcatacagagggtaccggactcgaaacgatag

SEQ ID NO: 40860 - protein, 77 aa, DROSOPHILA
MPVVLPPEVLRCKKRLNPGHNPVGDLDTDQPVYTKRCRYDESDLAAQYCNRPVLSLFSYSVGSGLSVAYRGYRTRND

SEQ ID NO: 40861 - DNA, 3453 bp, DROSOPHILA
tatataggcttgtacgcaatgctggaggccagtagatacacacttgttccaaacgtgttttaagtgcaagtgcaagtgagccggatgcatattaggtaatcaacttattaaatccggatcaatgaatttaactcacttcttacttccgcctttggtgtagagatcacagactatgtcaaacatggccctcttccgcaggaacatgccggccatgttgccaaagtagagcactggcttttcataggcgatgcccctatccttgaagaaatcattgttggcggacgcccaacggtagaacaaggcggcagcgatcgcaaatagggcgaagaactcccacaacatgttgaccctagcttggcgatctaagcgtccagaatataactaactacgccacaaacaatcgggagcgttttgttgtccccacgcagagctttctaacaaagcttcgtgtactgcatttgataaaatacttgttgtctgtaatacacacaagtatgtacaaatttctgagcgcaaatgatttagaatatcactcatcatttcattatcacggcgtgttggagaaaatgctgacgactctgagcataccaatattatgtttaaaatatagaaacagaatatttcgaaattctgttttctaattctttaatatatattttttctattttaatggcacacaacttcattaaattcatatatttaaacttggccaatttatcgttttaaaattcatcgatttcttgttggctatcgaagtttatgcgtagtagttcgagaactaacaatttgatctgagggattttaagtattaggatgtaaattaaaccatcatcaccataaattaaattatcatcgataaaaaaggacgcaaagcattttcattttcaatagtttctagtaaaaatattttatttcatttcaacttcattatccgagttactagccacttgttgctatctgcaatcgatctttacctgttcgattcagttttgtacagtcacgacgctactatcttcaataaatacagctcttatacggtgcgattagcattattaacatttcgccagtcggccgaagcagacgaattacctttcggtctggaagtgataagacatttctagtcaaatcattatagtcgcatatctgtggactctggaatggcggctaagaaactggatgccataatcttcggtgcctccgggtttaccggaaagtacaccgtcttcgaggctgtcagcgtgctgaagggcctgcaatggggcatcgccggacgcaaccaggagaagctgcagtcggtgctgcgggagatgggtgcaaagtccaagacagacctctcccaaacgccgatcgtcatcgcggacgtgaacaacgaggcgtcactgctagagatggccaaacgctgccgcattttagtcaatacggccggaccatatcggttcttcggcgagcgagtggtcagggcttgcatcgaggcgggaacgcatcacgtagacgtaagcggagagccacagtacatggaaaccatgcagctgcgctaccatgatctcgccaaggagcgtggcgtgtacgtgatcagtgcgtgcggctttgattccattcccgccgacatgggagtcaccttcgtggagaagaacttcgacggcgtggtcaactcagtggagaactttgtccatctgggcgtcaagggaggtaccaagggaacgggcagtgctgcactcaacaccggcacctgggagagcgccattcacgctatcgccaaccggagcgagtctgtggccatccggcgcaagttgtttcccgagcgtctgcccaactttcatccggctcttaagtcacgatcgccgctttcccgtgccgcggaagtggacaacaaggtgatcctgccgttccctgaaacagatcgctcggtggtgatgcgctcgcagcgtttcctttacgaactggagaagaagcgacccgttcagatgcaggcctacatgacgtatccctcatggtttgcggccagcgttgtcgtgctcttcgcctctatcattggcattatggccaagttctcctttggccgccagctgctgcttaagtaccccaccgtcttctccggcggcatggcttcccgcgagggtcccagtgaggcgcggatggagcgctccttcttcagaatgaccatgaaggccacaggctggcccaagtccgaaaaactagccgagaccaccgatcagtacacctctccgcccacaaagacactgaccgtgagggttacgggtcccaatcccggctatggatccacttgcgttgcactgctctccacggcgaagaccatcctcaacgaaagcgacaagatgcccggatccggcggagtcctgccacccggagcagccttccgtggcaccagtctcatcagcgagctggagaagcacgagcacggcattaagtttgaaatcgtggccaacaaatagtgtctttaatgaggtgcattcgatgttattaaaaatacatatatgtatgtatgtatgttaaatatatttatcttaatatgaaatttggatttacgtttgcattacctattgattaactaatttgtgccattagcttactcacaaataattattatttatttcagggaagaattaatatttatatatgtgtttattactataaccagttcggttccacttcttttaaaaatagtgctccaactggttcttgggtttccaagtatttgcaggcacggtcacaccgacacagttttgtttcgattagtttggttatcgataccgctgttggctgccttcgttgtttaccttttggtcattagcaatttcgacgccaacgcgagaatacacagattatgagtcctgaaatatccggcttccggcggttcctgcattggggccccattaccgcccttagtaagtgttgaccgaactggtgataggaggtgatatcctgaggacatccttcttgaagggatggatccaatttgaaaatatctacactggtgaaagtggagtcaagaaactactcattatatggggtccaattacgtgggcggcacttgcaccggcaacgccccactccgggctatgtctgcgccatatcgcgtttcatatgccacccacaccaaacgcaggagttccaatcggttgtccacccaccagggacttttaatttgcctaatgtgtcgtgctaattgcgttttagttgtgtgtcgtttgcccttttattgcccccggataaccctggtccttcgagcctatcgggaatttcacggagccaccaccaaacatggcgtgcaaatcggacgtttgactgccggcgggtcagacggcataagacttccggaccactgcgatatcgaactgatgtaccattgttctcggcataatggctttattagacggcggtcgcttgttgctgctctcgaaaaggactcggcggaatcagtccgagaaacgg

SEQ ID NO: 40862 - DNA, 1453 bp, DROSOPHILA
cgacgctactatcttcaataaatacagctcttatacggtgcgattagcattattaacatttcgccagtcggccgaagcagacgaattacctttcggtctggaagtgataagacatttctagtcaaatcattatagtcgcatatctgtggactctggaatggcggctaagaaactggatgccataatcttcggtgcctccgggtttaccggaaagtacaccgtcttcgaggctgtcagcgtgctgaagggcctgcaatggggcatcgccggacgcaaccaggagaagctgcagtcggtgctgcgggagatgggtgcaaagtccaagacagacctctcccaaacgccgatcgtcatcgcggacgtgaacaacgaggcgtcactgctagagatggccaaacgctgccgcattttagtcaatacggccggaccatatcggttcttcggcgagcgagtggtcagggcttgcatcgaggcgggaacgcatcacgtagacgtaagcggagagccacagtacatggaaaccatgcagctgcgctaccatgatctcgccaaggagcgtggcgtgtacgtgatcagtgcgtgcggctttgattccattcccgccgacatgggagtcaccttcgtggagaagaacttcgacggcgtggtcaactcagtggagaactttgtccatctgggcgtcaagggaggtaccaagggaacgggcagtgctgcactcaacaccggcacctgggagagcgccattcacgctatcgccaaccggagcgagtctgtggccatccggcgcaagttgtttcccgagcgtctgcccaactttcatccggctcttaagtcacgatcgccgctttcccgtgccgcggaagtggacaacaaggtgatcctgccgttccctgaaacagatcgctcggtggtgatgcgctcgcagcgtttcctttacgaactggagaagaagcgacccgttcagatgcaggcctacatgacgtatccctcatggtttgcggccagcgttgtcgtgctcttcgcctctatcattggcattatggccaagttctcctttggccgccagctgctgcttaagtaccccaccgtcttctccggcggcatggcttcccgcgagggtcccagtgaggcgcggatggagcgctccttcttcagaatgaccatgaaggccacaggctggcccaagtccgaaaaactagccgagaccaccgatcagtacacctctccgcccacaaagacactgaccgtgagggttacgggtcccaatcccggctatggatccacttgcgttgcactgctctccacggcgaagaccatcctcaacgaaagcgacaagatgcccggatccggcggagtcctgccacccggagcagccttccgtggcaccagtctcatcagcgagctggagaagcacgagcacggcattaagtttgaaatcgtggccaacaaatag

SEQ ID NO: 40863 - protein, 431 aa, DROSOPHILA
MAAKKLDAIIFGASGFTGKYTVFEAVSVLKGLQWGIAGRNQEKLQSVLREMGAKSKTDLSQTPIVIADVNNEASLLEMAKRCRILVNTAGPYRFFGERVVRACIEAGTHHVDVSGEPQYMETMQLRYHDLAKERGVYVISACGFDSIPADMGVTFVEKNFDGVVNSVENFVHLGVKGGTKGTGSAALNTGTWESAIHAIANRSESVAIRRKLFPERLPNFHPALKSRSPLSRAAEVDNKVILPFPETDRSVVMRSQRFLYELEKKRPVQMQAYMTYPSWFAASVVVLFASIIGIMAKFSFGRQLLLKYPTVFSGGMASREGPSEARMERSFFRMTMKATGWPKSEKLAETTDQYTSPPTKTLTVRVTGPNPGYGSTCVALLSTAKTILNESDKMPGSGGVLPPGAAFRGTSLISELEKHEHGIKFEIVANK

SEQ ID NO: 40864 - DNA, 2486 bp, DROSOPHILA
tatagctattcgctatttgcacaactaaagtaatttgagtcgcagccaattaccacttgagcttttctctgccaactggattttgcttttcttattttttttctctttggttttccgttcgctgccaggagacttttggattttcggctgcccacttcgaaggtcctctgaaaactgacggagcagcggaatgtcgatgtctcaaataccgagctggagtgtcgtcttcgctctcttggactcggggattggggattctcagattcggattctcgtatgcgtacgttcgctttctccctggaaaagtggagtccaccccctcctccgcgttgctggggcgatggtattgcgattttcgtgggtgggatatttgtgcgctggaatgcgcatgtgtgctttggcgtcgttttgctgctgctggcgcaattagacaaacaattgacacgtctatggaaacaacaactgcgcaccagtaatgattattttcggtttgttctcggccagtgctgcccatcgaacagctgactgctgtcggtcgatagctctaccgatatgttcgcgcatctctggcttctgcaacagctgattttaaaatttccaagttcctattgcgaaagtttggaagcccattgcagcattagtttatttacatcagcataattttagctatagctagatcaagacatggaactttgttgatacttaaaatatttttattttcaaaccccaagaagcgtgatcttaaaatcgatccgattctagttacctggcctgagagtaaaatatttatacctaaccgcctgagctaatccgtgttagtttacaagaattccattacatttgtgttcctggaaagtcgagctcttctcagaaagtgtttacacttgtcttcatgttcgtaaatctctatttacagcaacagactttcattttttgtacttaacacgtagtttttaaatcaattatcagctaattagttcgattgggacaacaaggatactcagcgtcgctgccgcgatctgctctgagactcctccgccgtatcttgcgctgcttccgtatttgacgacctcggctgctcatgggccttaatctcatggtccagccgctctttcgcccggaaaacctttgactggatatagaaggagccgcctttggagcgttcgttgacttgaaacagatgctcgtagttcttggtgatagcgtccacgtttttggggtcatctatattcaggatctgcttggcttcctccagcgtcatgcctgcattgataagtaggtgtaaatagtgaaatagatagcatgactgtgtccaagactcacctgtgcgcaggttggactcggcgctcttgtcgccctgcttgccaccacccgcccgtcgtgctgcttcctgagatgcggcgatctcctggcgcagcgccttggtaaaggctcttcccactgcctgggcgcccaacacgatgatctgggcgatatacttggccatgacggtttcttgtattccttggattcgtacgtcaaaacaccggcattctatgtgtacagcttaattttgggtctcagaaaacgtgtcgctttaattacgcaacaccgtagtgaccctccgtgttccaattgtactatttaaaaggcgtccttctaaaaaaatgcatacgtaacttttaacacttaatttcgaatgtgatttataattgtattgagctaccaggtaaattttagcttttactccagatatttactaacgagcaggcggcgaaaagcaggtgaaacagctgattggagatggtacacggctttcataattagctatcgatatatataatagctatatcatcgagaatcgaaatatttttaaaaccaattatttaaatatttttaccacgactactttgtcatcgatagcatttgtcagttatcgtttttaaaaattcgaaattccctagttaagccaatgattcaggaaccgaactggaaaaaggactacgaccgtctggtccgcgagcatttgaatgatcagaatcagacgaagtcgctacaacgacaaatacggcattttcgctcaaagcgcgtacgactccagaatgaaatcgaggcggagagcaggagcatggacgtttgggtaaagatgatggagaacttgcaccgcggagtggagcgctttcagaagcaccaccacctgctcacgcccaaaaagcgcaagcagctgcgccgcataatgcgaaagctgcccttgagcagtttggatgagcaggtgcgactgatggaggtgtcggagcggttggtgcccaagccgtgcaaggagactcctgaaccaccgaagggcaacgaacgccagttcatcaagtactcagttccgcatcagaaaaagaactgtgatcctaataatcaatcccccgtggacaaacggctggccaggatatatgccaatctgaaggctctgctaaaaatccacgagcagacctcgtccgtcatcgctgatatacatt

SEQ ID NO: 40865 - DNA, 426 bp, DROSOPHILA
atggccaagtatatcgcccagatcatcgtgttgggcgcccaggcagtgggaagagcctttaccaaggcgctgcgccaggagatcgccgcatctcaggaagcagcacgacgggcgggtggtggcaagcagggcgacaagagcgccgagtccaacctgcgcacaggcatgacgctggaggaagccaagcagatcctgaatatagatgaccccaaaaacgtggacgctatcaccaagaactacgagcatctgtttcaagtcaacgaacgctccaaaggcggctccttctatatccagtcaaaggttttccgggcgaaagagcggctggaccatgagattaaggcccatgagcagccgaggtcgtcaaatacggaagcagcgcaagatacggcggaggagtctcagagcagatcgcggcagcgacgctga

SEQ ID NO: 40866 - protein, 141 aa, DROSOPHILA
MAKYIAQIIVLGAQAVGRAFTKALRQEIAASQEAARRAGGGKQGDKSAESNLRTGMTLEEAKQILNIDDPKNVDAITKNYEHLFQVNERSKGGSFYIQSKVFRAKERLDHEIKAHEQPRSSNTEAAQDTAEESQSRSRQRR

SEQ ID NO: 40867 - DNA, 5326 bp, DROSOPHILA
gagtctgtggccatccggcgcaagttgtttcccgagcgtctgcccaactttcatccggctcttaagtcacgatcgccgctttcccgtgccgcggaagtggacaacaaggtgatcctgccgttccctgaaacagatcgctcggtggtgatgcgctcgcagcgtttcctttacgaactggagaagaagcgacccgttcagatgcaggcctacatgacgtatccctcatggtttgcggccagcgttgtcgtgctcttcgcctctatcattggcattatggccaagttctcctttggccgccagctgctgcttaagtaccccaccgtcttctccggcggcatggcttcccgcgagggtcccagtgaggcgcggatggagcgctccttcttcagaatgaccatgaaggccacaggctggcccaagtccgaaaaactagccgagaccaccgatcagtacacctctccgcccacaaagacactgaccgtgagggttacgggtcccaatcccggctatggatccacttgcgttgcactgctctccacggcgaagaccatcctcaacgaaagcgacaagatgcccggatccggcggagtcctgccacccggagcagccttccgtggcaccagtctcatcagcgagctggagaagcacgagcacggcattaagtttgaaatcgtggccaacaaatagtgtctttaatgaggtgcattcgatgttattaaaaatacatatatgtatgtatgtatgttaaatatatttatcttaatatgaaatttggatttacgtttgcattacctattgattaactaatttgtgccattagcttactcacaaataattattatttatttcagggaagaattaatatttatatatgtgtttattactataaccagttcggttccacttcttttaaaaatagtgctccaactggttcttgggtttccaagtatttgcaggcacggtcacaccgacacagttttgtttcgattagtttggttatcgataccgctgttggctgccttcgttgtttaccttttggtcattagcaatttcgacgccaacgcgagaatacacagattatgagtcctgaaatatccggcttccggcggttcctgcattggggccccattaccgcccttagtaagtgttgaccgaactggtgataggaggtgatatcctgaggacatccttcttgaagggatggatccaatttgaaaatatctacactggtgaaagtggagtcaagaaactactcattatatggggtccaattacgtgggcggcacttgcaccggcaacgccccactccgggctatgtctgcgccatatcgcgtttcatatgccacccacaccaaacgcaggagttccaatcggttgtccacccaccagggacttttaatttgcctaatgtgtcgtgctaattgcgttttagttgtgtgtcgtttgcccttttattgcccccggataaccctggtccttcgagcctatcgggaatttcacggagccaccaccaaacatggcgtgcaaatcggacgtttgactgccggcgggtcagacggcataagacttccggaccactgcgatatcgaactgatgtaccattgttctcggcataatggctttattagacggcggtcgcttgttgctgctctcgaaaaggactcggcggaatcagtccgagaaacggcgaaattactcattactggaccgtggagccggctaatcaactcgaaaagcgacaataaactaaataaatgacccttatttccttcgcacgcaattgccaagcgaagcatggccaccaaagtcacccccatccaaaacataaaaaaataaacagggctaggtccctccaactacatacgtgtatcaaattttcgtacatgaatcacactaatgtttatctacctcttggctttcaggcatcatcaagtgcataacgctgacaacgctctatatgaactcgatgtggtggccgccaaataaatcattcgccggattcgcccaccaggccctcttcctgctcctttccacgctggccacattcaattacgtcatggccactttgactggtcccggactgatgccaaaacagtggcatcccaaggtaaccggagaaccagaagcgcacggcacacggaatggtggtgaaacatttgttgtgacacgatggccggtcaaccgcctccgcctagttcgagacacctgttacctgtttccattgatagtgcccaccatttggcccgaaaaactgttgacccgtcacgaactgcccaagtacttagtccgggtgtggtttctccgtttctttgtgcatcgtcattccacggcggaagcaattgtttagcgtccgatgagcaggtgccgagttttccggaggagttcgctctcaacggggtccgatttccaggccagacaaatgggccaagccggcccattggcgtgtttgactgcttatcgcgcataatccgtgccaattaaacgctgcaatttattttaaagaatccggacccggtccgttgtatgcatagatgtcgtgcaggggccaccaacggctgtaacgtttttcgaccgccattcattttgtccggccgtggcagtagtgcgacccaaatataatttattagcggcgactcctcacattacggccgggcagttcgggccctgcacgcgaacgcactctacggggcccaaagtccgtaatgcaattaccggaatttgcataaatgttttgtaggcgagcccagacgcaagaggggcggatttctttggctagctgcgtggctcatgggcgatagaaggtgggtgggaggtggtcggtcacctaatgagctgtgcgtcgttaggttttgttgtacctgacggcatcgggaaacgcgcataaatcacgaataatatactcgttttcgctgtgtattttaatgaattttaatttttgtcaggatcccaaggacgcccagttcctgcagtactgcaaaaagtgcgagggctacaaggcaccacgctcccatcattgtcgcaagtgtaagtgatattaagatgatttgcacaggaatttaaaagaacttaagcaaatgaaaattgtttaaatcgaacaccataatgatttatatatctgaccacttaggtgatcgctgcgtcaagaagatggaccatcactgcccatggatcaatcactgcgttggctgggccaaccacgcgtacttcacatacttcctgctcttctccatcctgggcagcctgcagggcaccgtggtgctgtgctgctccttctggcggggaatctaccgctactactatctcacccacggattggcgcacttggctagcgtgcagttcactctgctcagcatcatcatgtgcattctgggcatgggcctggccatcggtgtcgtcattggcctgagcatgctgctgttcattcagctgaagacgattgtaaacaaccagacgggcatagagatctggatagtggagaaggccatttaccgccgatataggaatgccgactgcgacgacgagttcctatatccctatgatttgggctggcgggcaaatttgcgactggtattcaatgacgagtgccaaaagcgaggcgatggcatcgagtggccagtggtggagggttgtgatcagtatacattgacggtgagtattgcagattgtatttagagagcgcagattaacatgtatttcctgcagcgcgagcaactggcgcagaaggaggagaaacgagctcgaacccgcaccttcaaatgcacaaggccagtgactggccgttggctgccgatcttttcgcagggttggcgtgtttgtgtggccgctccctgctccgatgagccacgcatcagcctgcgacccaacgacatgattaaggtcactcgcttccgcaaccactggctgttcggcgagcgagtgctttccgagcaagagctagctggcgtcaagaagcgccaacgcaagggtcccattcgtggctggttcccacgacgcagcgccgttgaggtcattgaggcggtccatgaaggcagcggcgatggcaacagcgagacaccagcacctgcggcccagaatggcaacgcccacagccacttgaagcagcagcagcgaaacggacatgccaaaaagtacatgtagcccggatcgggcagagatcaatcgatggcattctgtgccacattcggcttgtatatagaattagattccgcttggagactcgactgtttaacgcttagccaggccgtcatcccgtttactctgttaacaatgtcgaccaataaataacgcgaaagtttggtatcagttgctgatgtgaatcgaaattaatccagttgtgtatcagcagataacgcttatctttttcagatagtaaatgcagcgtaaatctcatggcgacaaagtaaaatatatataaatatgtataattaaagtattgttttaaagtttcccatagaaacttgacaaacctttagatgtcaactgatgagaccttatttatttattgggtattccataatttgattatgatacagattatattacatatgtttacgcgtggaatatagtttaaaagctctaaaccggcgaatcatatttacaggtcatggttgcctcgatgtcctccaccgttcgcggcacaatcgcaaagttctccacgccagtcttcgtgatgagcacatcgtcctcgatgcgcacacctccgaaattccggaagcgattgaacatctctgcgttaatgaatttagcaatgttcggatcggccagagcgcggtccatcagccagttgatgaagtagcagccgggttcgattgtgacatacatgccggccttaaggatgcgggcaaagcgcagcttgctcagccacggttcactggggcgcttgggctccttgggcagatagccgcccacgtcgtgcacatccagaccgatcaagtggcccaggccatgtggctggaacacgcccgaaacacctgcctcgagcatctcctccacatcgcccttgagcatgccgccctccttcaggcgctgcagcaacaccctgcccgccagcttgtgcatgtccacccaggagactccgtcacgggctgactctgtgaccgcattgcgggcatccagcacggcattgtagatgaacttctggtcgtcggtgaactttccattggccgggaatgtgcaggttatgtcggccgcatagccacaatagttggctcccatatcgaacaggcagagatcaccatcctggacgggcttgctgttgggtgcgcccgcgtgtccatagtgcaagatcgacgagttcgttccgctgccgcatatgcaggtgtaggag

SEQ ID NO: 40868 - DNA, 1552 bp, DROSOPHILA
cgataccgctgttggctgccttcgttgtttaccttttggtcattagcaatttcgacgccaacgcgagaatacacagattatgagtcctgaaatatccggcttccggcggttcctgcattggggccccattaccgcccttagcatcatcaagtgcataacgctgacaacgctctatatgaactcgatgtggtggccgccaaataaatcattcgccggattcgcccaccaggccctcttcctgctcctttccacgctggccacattcaattacgtcatggccactttgactggtcccggactgatgccaaaacagtggcatcccaaggatcccaaggacgcccagttcctgcagtactgcaaaaagtgcgagggctacaaggcaccacgctcccatcattgtcgcaagtgtgatcgctgcgtcaagaagatggaccatcactgcccatggatcaatcactgcgttggctgggccaaccacgcgtacttcacatacttcctgctcttctccatcctgggcagcctgcagggcaccgtggtgctgtgctgctccttctggcggggaatctaccgctactactatctcacccacggattggcgcacttggctagcgtgcagttcactctgctcagcatcatcatgtgcattctgggcatgggcctggccatcggtgtcgtcattggcctgagcatgctgctgttcattcagctgaagacgattgtaaacaaccagacgggcatagagatctggatagtggagaaggccatttaccgccgatataggaatgccgactgcgacgacgagttcctatatccctatgatttgggctggcgggcaaatttgcgactggtattcaatgacgagtgccaaaagcgaggcgatggcatcgagtggccagtggtggagggttgtgatcagtatacattgacgcgcgagcaactggcgcagaaggaggagaaacgagctcgaacccgcaccttcaaatgcacaaggccagtgactggccgttggctgccgatcttttcgcagggttggcgtgtttgtgtggccgctccctgctccgatgagccacgcatcagcctgcgacccaacgacatgattaaggtcactcgcttccgcaaccactggctgttcggcgagcgagtgctttccgagcaagagctagctggcgtcaagaagcgccaacgcaagggtcccattcgtggctggttcccacgacgcagcgccgttgaggtcattgaggcggtccatgaaggcagcggcgatggcaacagcgagacaccagcacctgcggcccagaatggcaacgcccacagccacttgaagcagcagcagcgaaacggacatgccaaaaagtacatgtagcccggatcgggcagagatcaatcgatggcattctgtgccacattcggcttgtatatagaattagattccgcttggagactcgactgtttaacgcttagccaggccgtcatcccgtttactctgttaacaatgtcgaccaataaataacgcgaaagtttggtatcagttgctgatgtgaatcgaaattaa

SEQ ID NO: 40869 - protein, 427 aa, DROSOPHILA
MSPEISGFRRFLHWGPITALSIIKCITLTTLYMNSMWWPPNKSFAGFAHQALFLLLSTLATFNYVMATLTGPGLMPKQWHPKDPKDAQFLQYCKKCEGYKAPRSHHCRKCDRCVKKMDHHCPWINHCVGWANHAYFTYFLLFSILGSLQGTVVLCCSFWRGIYRYYYLTHGLAHLASVQFTLLSIIMCILGMGLAIGVVIGLSMLLFIQLKTIVNNQTGIEIWIVEKAIYRRYRNADCDDEFLYPYDLGWRANLRLVFNDECQKRGDGIEWPVVEGCDQYTLTREQLAQKEEKRARTRTFKCTRPVTGRWLPIFSQGWRVCVAAPCSDEPRISLRPNDMIKVTRFRNHWLFGERVLSEQELAGVKKRQRKGPIRGWFPRRSAVEVIEAVHEGSGDGNSETPAPAAQNGNAHSHLKQQQRNGHAKKYM

SEQ ID NO: 40870 - DNA, 5821 bp, DROSOPHILA
ttgatattcagcagcttgtcaatctcgaactccacgggcagtccgtggcaatcccagccgaagcgacggtccacatggtatccctgctggtatgcgtaccgtgtgacgatgtccttgatggtgccagcaagaatgtgtccgtagtggggcagcccggttgcaaagggcggtccatcgtagaacgtgtatcttggaggtggaaaattagcacaaaatttggcgatcggctgatgcaatcgtatgcggcacttacttgggctttcccttcgacagctggctgcacttttcaaagatattttcgtgtcgccatttctgcagtacgttctcctcctcggccgggaaattaatgttctctggcacccgacacacgtcgttccgctctagtttttttcccatggctgtcaaagttcactgttgtattatttatcaagtaacagagcttattcgcccaccttttatatcagaaattcaactgacttgcggcgtttttgcgtggcacacaacgtgcccgaggtacggaactagtggttcattaatcgctctctagctcatgggttcgcgatatcgatagtaggttccgatgagcggcatccttgataatcagctgacgacagcactgaaaaaaaaagaaaggcttatttactattaacaactttaataaatttgttagccataagaataaaaaactgaactgtaagttactaagtaagaaagccattggcaattgaatgaataaactatgcaatagttttgaaagcaattattcctgacttagacaaataattctaataaattaaaaccccaaataccagctattattaatttgtagtataaccaaattactgtaatatataattataaaaaaattatcttaaattatattaagccatatgttttttttctcagcagtatattttctttttaacaatcaatagtttagcatatatatggtagctatcgttatcgatagcaatatatctttgctatcagcccattggtcatcactaacgcgaaaacaagaggaagagtaatgtgtacacttttgtgtcgctccttttcggccaatttaacaaacgaaaaagtataagtactgggcaaatcagcacttgcacgcctcccaatacgtctcgccagcgcacacctgtgttctgggctccaccggaaactcgccttcagccattcgacgtcgccaacagtcatcggatatggcacgcccaatttttccgaaccagcagaagatagctgagaaactaatcatcttgaatgaccgcggcctgggcattcttacgcggatatacaacatcaagaaagcatgcggcgacaccaagtcgaagccaggcttcctctccgagaagtcgttggaatcgagcatcaagtttatcgtgaagcggttccccaacatcgacgtcaaagggctcaatgctattgtaaacatcaaagcggagattattaagtcgctgtccctgtattaccacacattcgtggacctacttgatttcaaggacaatgtatgcgaactgctcaccacgatggacgcctgccagattcacctggacatcacattgaacttcgagctgaccaaatattatctggacttggttgtgacctacgtgtccttgatgattgttttgtctagggtcgaggaccgcaaggcagttctgggcttgtacaatgccgcctacgagctgcaaaacaatcaggcggacacgggcttcccccgcttggggcagatgattctggactacgaggtccccttaaaaaagttggccgaggaattcattccccaccagcgcctgctaaccagtgcgttgcggtcgctgacctccatctatgcactgcgaaacctgccagcagacaagtggagggaaatgcaaaagttgagtctggtaggcaatccggccattcttcttaaggccgtccgcactgacaccatgtcctgcgagtacatatccctggaggcaatggaccgctggataatctttggcttgctgctgaaccatcaaatgctcggacagtacccggaagtcaacaaaatctggctctccgccctggagtcaagctgggttgtggccttgttccgcgacgaggtcctgcaaattcatcaatacattcaggctactttcgacggaattaaaggttacagcaagcggatcggagaagtaaaggaagcctacaacacggcggttcaaaaagctgctttaatgcatcgggagcggcgcaagtttcttcgaacagccttgaaggagctagctcttattatgaccgaccaaccaggcctcctgggacctaaggcaatattcattttcatcggtctttgtcttgcgcgcgatgagattctatggctcctcaggcataatgacaacccacctcttctcaaaaataaaggttagttaaggattttcttacgattaaattaaaatttgtgaaccttaactattttaaatttataggaaagagcaatgaagatcttgtagaccgacagctgccggagctcttattccacatggaggaactccgcgctcttgtgcgtaaatacagccaggtaatgcagcgatattacgtgcaatacttgtccggattcgatgccacggatcttaatattcgaatgcaaagtctgcaaatgtgtccagaagacgaaagcataatcttcagttcgctctacaacacggctgcagccctgacagttaagcaggtggaagacaacgaactcttttatttccgaccattccgcctggactggttccgcctccaaacgtacatgagtgtgggaaaggctgcacttaggatcgcagagcatgcagagctggcccgcctactggattcaatggttttccacactagggtggtagataacttggacgaaatactagtagaaacctcggatctcagtatcttctgtttctataacaaaatgtttgacgaccaattccacatgtgcttggagtttcccgcgcagaaccgctacatcatagcgtttcccttaatctgcagccacttccaaaattgtacgcacgaaatgtgcccggaggagcgacaccatatacgtgaaaggtctctcagcgtggtaaatatatttcttgaggaaatggctaaggaggctaaaaacattataaccacaatttgcgatgagcagtgcacaatggcagacgctctattgccaaaacactgtgctaagattctttccgtacaatctgctcgtaagaagaaggacaaatcgaagtctaagcattttgacgacatacgaaagccgggagacgagtcgtaccgaaagacacgagaggatctgacgacgatggacaagttgcacatggccctgacggagctttgttttgcaatcaattattgccccacggtcaacgtttgggagtttgcttttgcccctcgcgagtatctctgtcagaacctggaacaccgcttttcccgggatcttgttggcatggtgatgttcaaccaggagacaatggagatagccaagccctcggagctgctggccagcgttcgagcctacatgaacgtgctgcagacagtagagaactacgtgcacatagacataacacgagttttcaacaactgcctgttgcagcaaacacaggctttagactctcatggcgagaaaaccattgccgctttgtacaacacctggtacagtgaggttctgctaaggcgtgtctccgctggcaacattgtgttctccattaaccaaaaggcttttgttcccatttcgcccgagggctgggtaccatttaacccgcaggaattctctgatctcaacgagctgcgagcacttgcagaacttgtgggaccttacggtatcaaaacattgaacgaaacacttatgtggcacatagcaaaccaggtgcaagagttgaagtcgctggtgagcaccaacaaggaagtgctcattacactgcgaaccagttttgacaaacctgaagtgatgaaggagcaatttaagcgcttacaggacgtggaccgcgtgctgcaacgcatgacgatcattggtgtgatcatatgtttccgcaacctggtgcatgaagccctcgttgatgtgctggacaagcgcatacccttcctgcttagctcagtgaaggactttcaggaacatttgcccggaggcgaccaaattagggttgcttccgagatggcctcagcagcgggtctgctatgcaaggtagaccccacattagcaactacactgaaatcaaaaaagccagaattcgatgagggtgagcacctcactgcctgtctactgatggtctttgtggcagtgtctataccaaaactggcccgtaacgaaaattccttctacagagccacaattgatggccactcaaataacacgcactgcatggcggcggccattaataacatcttcggagccctgtttaccatctgcggtcaaagtgacatggaggaccgcatgaaagagttccttgctctggccagttcttccctactgcgcttgggccaggagtccgacaaagaggcgacacggaaccgagagtccatctatttgctgctggacgaaatcgtcaaacaatcgcccttcctcacaatggatctgcttgagtcctgctttccctacgtgcttatacgcaacgcgtaccatggcgtatacaagcaggaacagatcttagggctggcactctaaatggagccgatctgtgtattccacataatgcttatgtagtttatccgccgatcgactatcgatcactatgctaatctaacatactttaaaactgttaaacatacccaaatgtattctagactctgcatttttatactcgtacgacttcgaataaagtgcttatacaacccaaataagtatcccacattaataagctgtctctagatcggatcggtatgtatattctttatttcggcttattgaaatatgtgtccactcccgcgaacgtgcagctcctccgcttcaatttctgttaaatttcatttggacacatgcgcacacgtgtgtgtatattaaatatgagtttgggggaaaaatcttccgcaatattaaattatttggtcacgttcaatgttactttgtaggcttgtgtacaaatacttgtaggcaagtagtaaaatatgttttcgttattttgtaatatgatttctcagtagttatcattggtagtatttaaatttcgattttgagttttcaattccgatacaaagacttttatgcaatgatttattattgtttttaattctttttgaattacatgatctgggataggttctttttcacggatggttaaatgataagttttgcaaaccgaaatcgggtaagtagggcatcttttcaaatctgctcgtaatcaacataggcctaaacatctacaaatgggttcggttaaatgtaccaaaatcactacactctgctaaaaagctgtcaatatttgagtttacatctgtatttgtgaacattctcgatatctacaatggggtttcgttaattatacacatacttgcttattaatattatagaaggtattgttatttatgtgatgctgaatattttgctagttcgtacaatctatttagcatttctcactgatttggttttacttggtttcgcatgaaaatgtattccttttcagtcagtcagtttaggcatctgttgactaaaaattgtcgtcattgtcttttgtttttgtttctcagttaataaaaaatatatgtgtatatgtatgtatatacttatatgcacgtcgtcgaaataaaacttgaaaaacatttgcgctacttctctcgtttgcttttgtcgttaaaagtaaaatcgcttctttagtaattacattttaaagctctcaag

SEQ ID NO: 40871 - DNA, 3756 bp, DROSOPHILA
atcactaacgcgaaaacaagaggaagagtaatgtgtacacttttgtgtcgctccttttcggccaatttaacaaacgaaaaagtataagtactgggcaaatcagcacttgcacgcctcccaatacgtctcgccagcgcacacctgtgttctgggctccaccggaaactcgccttcagccattcgacgtcgccaacagtcatcggatatggcacgcccaatttttccgaaccagcagaagatagctgagaaactaatcatcttgaatgaccgcggcctgggcattcttacgcggatatacaacatcaagaaagcatgcggcgacaccaagtcgaagccaggcttcctctccgagaagtcgttggaatcgagcatcaagtttatcgtgaagcggttccccaacatcgacgtcaaagggctcaatgctattgtaaacatcaaagcggagattattaagtcgctgtccctgtattaccacacattcgtggacctacttgatttcaaggacaatgtatgcgaactgctcaccacgatggacgcctgccagattcacctggacatcacattgaacttcgagctgaccaaatattatctggacttggttgtgacctacgtgtccttgatgattgttttgtctagggtcgaggaccgcaaggcagttctgggcttgtacaatgccgcctacgagctgcaaaacaatcaggcggacacgggcttcccccgcttggggcagatgattctggactacgaggtccccttaaaaaagttggccgaggaattcattccccaccagcgcctgctaaccagtgcgttgcggtcgctgacctccatctatgcactgcgaaacctgccagcagacaagtggagggaaatgcaaaagttgagtctggtaggcaatccggccattcttcttaaggccgtccgcactgacaccatgtcctgcgagtacatatccctggaggcaatggaccgctggataatctttggcttgctgctgaaccatcaaatgctcggacagtacccggaagtcaacaaaatctggctctccgccctggagtcaagctgggttgtggccttgttccgcgacgaggtcctgcaaattcatcaatacattcaggctactttcgacggaattaaaggttacagcaagcggatcggagaagtaaaggaagcctacaacacggcggttcaaaaagctgctttaatgcatcgggagcggcgcaagtttcttcgaacagccttgaaggagctagctcttattatgaccgaccaaccaggcctcctgggacctaaggcaatattcattttcatcggtctttgtcttgcgcgcgatgagattctatggctcctcaggcataatgacaacccacctcttctcaaaaataaaggaaagagcaatgaagatcttgtagaccgacagctgccggagctcttattccacatggaggaactccgcgctcttgtgcgtaaatacagccaggtaatgcagcgatattacgtgcaatacttgtccggattcgatgccacggatcttaatattcgaatgcaaagtctgcaaatgtgtccagaagacgaaagcataatcttcagttcgctctacaacacggctgcagccctgacagttaagcaggtggaagacaacgaactcttttatttccgaccattccgcctggactggttccgcctccaaacgtacatgagtgtgggaaaggctgcacttaggatcgcagagcatgcagagctggcccgcctactggattcaatggttttccacactagggtggtagataacttggacgaaatactagtagaaacctcggatctcagtatcttctgtttctataacaaaatgtttgacgaccaattccacatgtgcttggagtttcccgcgcagaaccgctacatcatagcgtttcccttaatctgcagccacttccaaaattgtacgcacgaaatgtgcccggaggagcgacaccatatacgtgaaaggtctctcagcgtggtaaatatatttcttgaggaaatggctaaggaggctaaaaacattataaccacaatttgcgatgagcagtgcacaatggcagacgctctattgccaaaacactgtgctaagattctttccgtacaatctgctcgtaagaagaaggacaaatcgaagtctaagcattttgacgacatacgaaagccgggagacgagtcgtaccgaaagacacgagaggatctgacgacgatggacaagttgcacatggccctgacggagctttgttttgcaatcaattattgccccacggtcaacgtttgggagtttgcttttgcccctcgcgagtatctctgtcagaacctggaacaccgcttttcccgggatcttgttggcatggtgatgttcaaccaggagacaatggagatagccaagccctcggagctgctggccagcgttcgagcctacatgaacgtgctgcagacagtagagaactacgtgcacatagacataacacgagttttcaacaactgcctgttgcagcaaacacaggctttagactctcatggcgagaaaaccattgccgctttgtacaacacctggtacagtgaggttctgctaaggcgtgtctccgctggcaacattgtgttctccattaaccaaaaggcttttgttcccatttcgcccgagggctgggtaccatttaacccgcaggaattctctgatctcaacgagctgcgagcacttgcagaacttgtgggaccttacggtatcaaaacattgaacgaaacacttatgtggcacatagcaaaccaggtgcaagagttgaagtcgctggtgagcaccaacaaggaagtgctcattacactgcgaaccagttttgacaaacctgaagtgatgaaggagcaatttaagcgcttacaggacgtggaccgcgtgctgcaacgcatgacgatcattggtgtgatcatatgtttccgcaacctggtgcatgaagccctcgttgatgtgctggacaagcgcatacccttcctgcttagctcagtgaaggactttcaggaacatttgcccggaggcgaccaaattagggttgcttccgagatggcctcagcagcgggtctgctatgcaaggtagaccccacattagcaactacactgaaatcaaaaaagccagaattcgatgagggtgagcacctcactgcctgtctactgatggtctttgtggcagtgtctataccaaaactggcccgtaacgaaaattccttctacagagccacaattgatggccactcaaataacacgcactgcatggcggcggccattaataacatcttcggagccctgtttaccatctgcggtcaaagtgacatggaggaccgcatgaaagagttccttgctctggccagttcttccctactgcgcttgggccaggagtccgacaaagaggcgacacggaaccgagagtccatctatttgctgctggacgaaatcgtcaaacaatcgcccttcctcacaatggatctgcttgagtcctgctttccctacgtgcttatacgcaacgcgtaccatggcgtatacaagcaggaacagatcttagggctggcactctaaatggagccgatctgtgtattccacataatgcttatgtagtttatccgccgatcgactatcgatcactatgctaatctaacatactttaaaactgttaaacatacccaaatgtattctagactctgcatttttatactcgtacgacttcgaataaagtgcttatacaaccc

SEQ ID NO: 40872 - protein, 1126 aa, DROSOPHILA
MARPIFPNQQKIAEKLIILNDRGLGILTRIYNIKKACGDTKSKPGFLSEKSLESSIKFIVKRFPNIDVKGLNAIVNIKAEIIKSLSLYYHTFVDLLDFKDNVCELLTTMDACQIHLDITLNFELTKYYLDLVVTYVSLMIVLSRVEDRKAVLGLYNAAYELQNNQADTGFPRLGQMILDYEVPLKKLAEEFIPHQRLLTSALRSLTSIYALRNLPADKWREMQKLSLVGNPAILLKAVRTDTMSCEYISLEAMDRWIIFGLLLNHQMLGQYPEVNKIWLSALESSWVVALFRDEVLQIHQYIQATFDGIKGYSKRIGEVKEAYNTAVQKAALMHRERRKFLRTALKELALIMTDQPGLLGPKAIFIFIGLCLARDEILWLLRHNDNPPLLKNKGKSNEDLVDRQLPELLFHMEELRALVRKYSQVMQRYYVQYLSGFDATDLNIRMQSLQMCPEDESIIFSSLYNTAAALTVKQVEDNELFYFRPFRLDWFRLQTYMSVGKAALRIAEHAELARLLDSMVFHTRVVDNLDEILVETSDLSIFCFYNKMFDDQFHMCLEFPAQNRYIIAFPLICSHFQNCTHEMCPEERHHIRERSLSVVNIFLEEMAKEAKNIITTICDEQCTMADALLPKHCAKILSVQSARKKKDKSKSKHFDDIRKPGDESYRKTREDLTTMDKLHMALTELCFAINYCPTVNVWEFAFAPREYLCQNLEHRFSRDLVGMVMFNQETMEIAKPSELLASVRAYMNVLQTVENYVHIDITRVFNNCLLQQTQALDSHGEKTIAALYNTWYSEVLLRRVSAGNIVFSINQKAFVPISPEGWVPFNPQEFSDLNELRALAELVGPYGIKTLNETLMWHIANQVQELKSLVSTNKEVLITLRTSFDKPEVMKEQFKRLQDVDRVLQRMTIIGVIICFRNLVHEALVDVLDKRIPFLLSSVKDFQEHLPGGDQIRVASEMASAAGLLCKVDPTLATTLKSKKPEFDEGEHLTACLLMVFVAVSIPKLARNENSFYRATIDGHSNNTHCMAAAINNIFGALFTICGQSDMEDRMKEFLALASSSLLRLGQESDKEATRNRESIYLLLDEIVKQSPFLTMDLLESCFPYVLIRNAYHGVYKQEQILGLAL

SEQ ID NO: 40873 - DNA, 6659 bp, DROSOPHILA
agttaagtgtgcttgactattccgtatatataggcaaagaaatgaaaatctgctgtttcccaattataaaaactgtggaaaaaatatgttttataaatttacaagtgtaatatttttgtatttttacaggcattgaaaacagccgggagcctgggatacaatctaatcatgccttgatctcccttaaagggtaatgtaatcctccgcaccatttgagtacaaattattttaattcccaaattgatgacaacttcatacccaaatcagagaaataatgttgaaatctttttaacatgcatcaccatctgaataaaatattgaaacttagtttatgtataatagtatttgtataattaaacagtctttgtgtattttacagaaatatttccagatattgggattcctattcaaaactgaaatttgactgaaccagtgataaggtaaatcctcactaaattaaatgttttcttactccttaattgatgacaacttcatactcaaatcagagaaattatgttgaaatccttttaacatgcatcaccatctgaatcaagtacattttatcaaattttaaggcaataagggccaattaataatttatattctctcttttattttgcaggaaatataaactaatgatactttcacaagatttacaactgattcggttggaaaaacctaaaaggtattgccaatgtaaaatattatttatttatttaaactgccttcttgatgacaacttcatacccaactcagaaaaactatgttgaaatctttttaacatgcatcaccatctgattaaaaatatgcatatttagttatgatgaatgaaatatagattactaataaaggttttctttttgacttttcaggtagtctagccacgtgctaaatcgcaatcttttaacaaagtttttctttatatataaaataaattctttatttatgtgtacaaaataaaatatttcaactgtctaaattaaatagctttaaaaaccgttcaacacgctctccacaacaataacaagctgataaagagaatctccttgtgcaatcgattccagctggacgaggcagctactccgtcgtagaatacctccttgtgggctgttttccgcacagcagctccaccgttgaagtctcgtttcttcttaaagctttcgtagtaccaatccattccgtccttgcgatccacacgatcaacctgaaggagctccagttccgtgcgtttttgtgcattagccgtgagttgatgctcgctggccacgccctcgttatcaccactgggcgtggttctctgatactcctctgccgtgggctgagccacttgctgctgatacggcgtgtagaccttggtaatggtggaccgtcctccacctcgtagtggaggagaagctggtggcggtggtggtactgtgctcgttggaccagctagagttacttgattatcactcggactctgaggtgttgtggtggtcacccaggaacgactctttatctgcgccacatgctcttcagccggaggaatcaaaagaatcgtctctgccgtggtcgtttgcacgagaggaggaggtctaagcagggtcacagattgcgcctccagatcttcgtcatcgtactgggaatccagctcagtgctggatgaggcattattttcagcaggagtaacctgtgtggtactggtggttgtagtactccttgtggtcgttgtagaagcttttgttgtactagtggcgatcctctgcatcaaaggcgttgtggtggttatatcgggcgtggtctccgtgacttcgtaagtagctgtctctgaactttcgccactgcttttggttggcttaggtcgtgcttgagtagatataggtataaactttctctgacctatgccctggactatttccgacgggtttcccgtgatattcaccacctccactaaaccacgccgctgttgaggatcatggacaggcataaaaccaccgacatgggctggaacgatgggacggaagccaccgcgctcgatgctcgaaggctcacgaaaggtggtgcgaaagacacccactgtggtggcagcgctaccactctcattactcagtgcatcctccatggatgaagttgtggaatctgtatccacataacgattcctggctatgtttagcttctcctgcttctgctgatccttgaggtatttttcgaactctgcactattcggctgatacatcctagttttgccacgaccacttggcagactaatgtgggccatgcggtgtgtggcgggcatgtcatcattgctatcagttcgttgttttcgtcctcgatctccgaaaccgaagaatctgcccaagcttacactgggcaaaggatatccgaagaaggtaaaaggcgatccagatcccggctggggttttcgattgaaatacttcgtatggagtatagtgttgttcagatctatattgctgtttatcgtgggagtcggcttgggtcgctgcgaagtactgatcgcggagtgggtggtatctggcgcctcggtggcgtccacatactgatcgtagaagtactcgctttcgcccaccagcggtcgatcgcctggcagtctggttccttcgcccgcctcacactcatcgttgaaatcgtcgggcaaatccctctggaagacatccccgtgctcattgagcagtggcaactggttgccatcggtgcgttcgttgccatagatatccgcacccacgcagagactcctttccatgcgggccgaccgcaggaggcgtccatcctggcacttgggtcccggatacggaaagttcgtctcctgcagccacaccgaaagccattgcatctcacagttgcaatcaatcggattccctgcgttggaaaaggtaaatgcaataacgattttcctgttctcgaaagtacttaccatccacgtccaagatggctatgtttccccggacattccggaaggtacgttccttgatgctcctcagctggttattccgcatggagaggactcgcaaacggggcattgtctcaaatggagaaccctgtacagaacaaggatgaattgaaagtaataactacaataaatagcttttaaaggcctcacctgaatgcgacatatctgattgttatccattttaagctccactaaccaattcagcgccttcaacggcatcgtggacaccaacttgacaccattggtggacagatccaaaacttccaggttccgcatgcttcgcagaccaatgttttccatattccggaaatgattgttggacagattcaagaagaccagcgaattggcgttgtggaaactttccggagagatgtagcgcaacttgttgtactgaaagtgggaggccagcaggcttggcagctcctcaaagacatgatcctttagctccaccagcttattgtctgccaggacgaattcctgcagttcatcgagtcctttgagtgcgccaggctccacatttcggatctcattgctgctgagatcaagatactgcagcttgggaagatttcggaaggtgccctgctgcagttccacaatgagattgttggacaaacggatctccaccacatttcgccagccaccgatcacatcggattggattcgggatatttgattatagctcagatcgatgtctcgtaggttgttcaaattacccaagcccaccgatatatccaggagggcattgccagagagatccagatactcgagagatctttgcgtatcgaaagccgtgggtgagatgctccgtatgagattcctagagagatccagctgctccagtctgctgttattcgaaaagaaattatccgtgatggcttccagtttgttggactgaagattcagattcctaagttcggcaaggggcagtagagctcgctcatccgcttcgcccagttgattttcttgcaaatgcagcagctccagacgttgaatccctatgaacgaggtgtccttcagctgacgcaactcgttttgagccagacttaagactctcagttccattgccccttgaaaaccatgtcggggcagttgctctattcgattctggctgagatccagcattcgcaggttgggcaattgcaaatccttgctagcggctgctggtagcgatgtaatttgattgcccttcagcgagatgcgctccacaatcctgggcagtcctgcaatcacagacttaagctgattataactggcatccacctcaaagagtctctccaaatggattagggtggaagagtggattttggtcagctcattggaggatatattgagcgtttcgagtaagggattgtgacgaaaactattgggtgccaattcgattagtccattctcgctcaaatccagacgtctcaatgatggaagtcccgccagcaactgggagtccaccctagcaaactgattctgcgccagatcgagtcccttcaatccaggaaggttccaaaacggtaggggtaagtctgaggatagactgttatttctcatccgaagttccctcaaagcaggcatggccatcagtgcatccctttctatgagtctcaaatgattatggttcagatgcagttgctccaaagtcccatgaccacgaagagctccatagggtagttcgctcaaaagattaccactcatgtccaaatagcgaagcctaggtaaggcatccaacaatgccctcaaagcctccacatgaccaatttcattgttgtacatgtgaaccgcctccacgccacttccactggcctgaagcagggattccggatgaatccgccgtatgagattgttctgcagatatatggttttcagttgaggggtgcgcaaaaaggctccatattgcagttcagtaatcctgttatcgtttaaatgaagctctgaaagattgggaagatccacaaaggagccatcctcaataacagtgattagattgttgtccagtcgtagtttcttcagatgctccagatccttgacaatgcgacccaccatgcctacgtcactgatttgattgtgggacagtttgaggctaaccaaattgggtaatctggacagggcacgcaaatgaatccagttgagaccattgtgcgatagatccagattcttcagggatatcaatccatcgaaaagaccggcttccaggcgggtgaggcctgacccgcctgttatatgtatgtgctgcaatttgggtagatgcctaaagagatgggagggcaactcctggagtgcccccgtttggacactgagataggtcagactgagcagtccggagaagtcgggcaagtgcttcagttcctcgctctgaatggtaatggccagcatgttgatcatcccgttcagactctccgctggaatgctgcgcagttgaggttccaccacgaagatctccaccaggccattctccagctcatttagccatccattggacactctttcgatgctattgtggcgcagcatgagccgaactatctgcaggctgccgaaaaaacgtcctggcaatgccggcaattggttgttctccaggaccagctcatcgatcctgcccttgatgtttcgttccactgcctttagaccgtccatgatctgcggcagattgctgtgcgagcacctgtatgcaaagcgacataattttccaagtttgcagatcataaaatagtagccactcaccatatctggatctcctttcctcgtaacgaacagcggcagggtaaaatagcctgtgatggagggcaactttcggccctgatcaaatttatcccaatgcaaaggagtaggaagatgggcagtaacatcatggcaatcggctagaccataggttatgtgggtggagcttcttccttttggccaacttggcgcatatctgtagcgagtataagtatgtcatttgtccattaaatactttaccaccctattatcttaacttaatttagatttataattaatattaaatgaatttcacaaattaaagtaagttaacccattataaataatattcaaaaatagaaacaaaaaaaccaaaattgaaaacaaacgtcacatgaacacttggtgtaggaaaactctctagtcatatatttatcacttagcaagcggaatagattgaattaaaaataaattattattgattatattgatggtatgaaggttccgccaaacttcagacaagaccccctcgactgctttttccgttcctatctaagtccaggtgaccggtaatcaagaaattcctgcacccagaaaataaaaatcgaaaacaaaatcacactaaaatgtaaacagttcatataataaataagtaataataaccttatatacataaaatatgtatataatttattaaatatcaaatttttaaaataatgatattaggttagcgaattgtaactatactttcatctatcttctctagggaatatgtatcgataaaaatgtgatatataattattatttatttttcatttgaattcttcataaaaattatgtaatgtatgttaaaagtgcttacgattctgtaaagtatattttatatattattcataggaataactcgcagagtctagctctcgaaaactataagatctggcaaattaaaataaggtcttctttttagtttatttatttgttttacaaaagtatcttcaattgcaatttaaaagtattttcatttttg

SEQ ID NO: 40874 - DNA, 4542 bp, DROSOPHILA
atggtgagtggctactattttatgatctgcaaacttggaaaattatgtcgctttgcatacaggtgctcgcacagcaatctgccgcagatcatggacggtctaaaggcagtggaacgaaacatcaagggcaggatcgatgagctggtcctggagaacaaccaattgccggcattgccaggacgttttttcggcagcctgcagatagttcggctcatgctgcgccacaatagcatcgaaagagtgtccaatggatggctaaatgagctggagaatggcctggtggagatcttcgtggtggaacctcaactgcgcagcattccagcggagagtctgaacgggatgatcaacatgctggccattaccattcagagcgaggaactgaagcacttgcccgacttctccggactgctcagtctgacctatctcagtgtccaaacgggggcactccaggagttgccctcccatctctttaggcatctacccaaattgcagcacatacatataacaggcgggtcaggcctcacccgcctggaagccggtcttttcgatggattgatatccctgaagaatctggatctatcgcacaatggtctcaactggattcatttgcgtgccctgtccagattacccaatttggttagcctcaaactgtcccacaatcaaatcagtgacgtaggcatggtgggtcgcattgtcaaggatctggagcatctgaagaaactacgactggacaacaatctaatcactgttattgaggatggctcctttgtggatcttcccaatctttcagagcttcatttaaacgataacaggattactgaactgcaatatggagcctttttgcgcacccctcaactgaaaaccatatatctgcagaacaatctcatacggcggattcatccggaatccctgcttcaggccagtggaagtggcgtggaggcggttcacatgtacaacaatgaaattggtcatgtggaggctttgagggcattgttggatgccttacctaggcttcgctatttggacatgagtggtaatcttttgagcgaactaccctatggagctcttcgtggtcatgggactttggagcaactgcatctgaaccataatcatttgagactcatagaaagggatgcactgatggccatgcctgctttgagggaacttcggatgagaaataacagtctatcctcagacttacccctaccgttttggaaccttcctggattgaagggactcgatctggcgcagaatcagtttgctagggtggactcccagttgctggcgggacttccatcattgagacgtctggatttgagcgagaatggactaatcgaattggcacccaatagttttcgtcacaatcccttactcgaaacgctcaatatatcctccaatgagctgaccaaaatccactcttccaccctaatccatttggagagactctttgaggtggatgccagttataatcagcttaagtctgtgattgcaggactgcccaggattgtggagcgcatctcgctgaagggcaatcaaattacatcgctaccagcagccgctagcaaggatttgcaattgcccaacctgcgaatgctggatctcagccagaatcgaatagagcaactgccccgacatggttttcaaggggcaatggaactgagagtcttaagtctggctcaaaacgagttgcgtcagctgaaggacacctcgttcatagggattcaacgtctggagctgctgcatttgcaagaaaatcaactgggcgaagcggatgagcgagctctactgccccttgccgaacttaggaatctgaatcttcagtccaacaaactggaagccatcacggataatttcttttcgaataacagcagactggagcagctggatctctctaggaatctcatacggagcatctcacccacggctttcgatacgcaaagatctctcgagtatctggatctctctggcaatgccctcctggatatatcggtgggcttgggtaatttgaacaacctacgagacatcgatctgagctataatcaaatatcccgaatccaatccgatgtgatcggtggctggcgaaatgtggtggagatccgtttgtccaacaatctcattgtggaactgcagcagggcaccttccgaaatcttcccaagctgcagtatcttgatctcagcagcaatgagatccgaaatgtggagcctggcgcactcaaaggactcgatgaactgcaggaattcgtcctggcagacaataagctggtggagctaaaggatcatgtctttgaggagctgccaagcctgctggcctcccactttcagtacaacaagttgcgctacatctctccggaaagtttccacaacgccaattcgctggtcttcttgaatctgtccaacaatcatttccggaatatggaaaacattggtctgcgaagcatgcggaacctggaagttttggatctgtccaccaatggtgtcaagttggtgtccacgatgccgttgaaggcgctgaattggttagtggagcttaaaatggataacaatcagatatgtcgcattcagggttctccatttgagacaatgccccgtttgcgagtcctctccatgcggaataaccagctgaggagcatcaaggaacgtaccttccggaatgtccggggaaacatagccatcttggacgtggatgggaatccgattgattgcaactgtgagatgcaatggctttcggtgtggctgcaggagacgaactttccgtatccgggacccaagtgccaggatggacgcctcctgcggtcggcccgcatggaaaggagtctctgcgtgggtgcggatatctatggcaacgaacgcaccgatggcaaccagttgccactgctcaatgagcacggggatgtcttccagagggatttgcccgacgatttcaacgatgagtgtgaggcgggcgaaggaaccagactgccaggcgatcgaccgctggtgggcgaaagcgagtacttctacgatcagtatgtggacgccaccgaggcgccagataccacccactccgcgatcagtacttcgcagcgacccaagccgactcccacgataaacagcaatatagatctgaacaacactatactccatacgaagtatttcaatcgaaaaccccagccgggatctggatcgccttttaccttcttcggatatcctttgcccagtgtaagcttgggcagattcttcggtttcggagatcgaggacgaaaacaacgaactgatagcaatgatgacatgcccgccacacaccgcatggcccacattagtctgccaagtggtcgtggcaaaactaggatgtatcagccgaatagtgcagagttcgaaaaatacctcaaggatcagcagaagcaggagaagctaaacatagccaggaatcgttatgtggatacagattccacaacttcatccatggaggatgcactgagtaatgagagtggtagcgctgccaccacagtgggtgtctttcgcaccacctttcgtgagccttcgagcatcgagcgcggtggcttccgtcccatcgttccagcccatgtcggtggttttatgcctgtccatgatcctcaacagcggcgtggtttagtggaggtggtgaatatcacgggaaacccgtcggaaatagtccagggcataggtcagagaaagtttatacctatatctactcaagcacgacctaagccaaccaaaagcagtggcgaaagttcagagacagctacttacgaagtcacggagaccacgcccgatataaccaccacaacgcctttgatgcagaggatcgccactagtacaacaaaagcttctacaacgaccacaaggagtactacaaccaccagtaccacacaggttactcctgctgaaaataatgcctcatccagcactgagctggattcccagtacgatgacgaagatctggaggcgcaatctgtgaccctgcttagacctcctcctctcgtgcaaacgaccacggcagagacgattcttttgattcctccggctgaagagcatgtggcgcagataaagagtcgttcctgggtgaccaccacaacacctcagagtccgagtgataatcaagtaactctagctggtccaacgagcacagtaccaccaccgccaccagcttctcctccactacgaggtggaggacggtccaccattaccaaggtctacacgccgtatcagcagcaagtggctcagcccacggcagaggagtatcagagaaccacgcccagtggtgataacgagggcgtggccagcgagcatcaactcacggctaatgcacaaaaacgcacggaactggagctccttcaggttgatcgtgtggatcgcaaggacggaatggattggtactacgaaagctttaagaagaaacgagacttcaacggtggagctgctgtgcggaaaacagcccacaaggaggtattctacgacggagtagctgcctcgtccagctggaatcgattgcacaaggagattctctttatcagcttgttattgttgtggagagcgtgttga

SEQ ID NO: 40875 - protein, 1513 aa, DROSOPHILA
MVSGYYFMICKLGKLCRFAYRCSHSNLPQIMDGLKAVERNIKGRIDELVLENNQLPALPGRFFGSLQIVRLMLRHNSIERVSNGWLNELENGLVEIFVVEPQLRSIPAESLNGMINMLAITIQSEELKHLPDFSGLLSLTYLSVQTGALQELPSHLFRHLPKLQHIHITGGSGLTRLEAGLFDGLISLKNLDLSHNGLNWIHLRALSRLPNLVSLKLSHNQISDVGMVGRIVKDLEHLKKLRLDNNLITVIEDGSFVDLPNLSELHLNDNRITELQYGAFLRTPQLKTIYLQNNLIRRIHPESLLQASGSGVEAVHMYNNEIGHVEALRALLDALPRLRYLDMSGNLLSELPYGALRGHGTLEQLHLNHNHLRLIERDALMAMPALRELRMRNNSLSSDLPLPFWNLPGLKGLDLAQNQFARVDSQLLAGLPSLRRLDLSENGLIELAPNSFRHNPLLETLNISSNELTKIHSSTLIHLERLFEVDASYNQLKSVIAGLPRIVERISLKGNQITSLPAAASKDLQLPNLRMLDLSQNRIEQLPRHGFQGAMELRVLSLAQNELRQLKDTSFIGIQRLELLHLQENQLGEADERALLPLAELRNLNLQSNKLEAITDNFFSNNSRLEQLDLSRNLIRSISPTAFDTQRSLEYLDLSGNALLDISVGLGNLNNLRDIDLSYNQISRIQSDVIGGWRNVVEIRLSNNLIVELQQGTFRNLPKLQYLDLSSNEIRNVEPGALKGLDELQEFVLADNKLVELKDHVFEELPSLLASHFQYNKLRYISPESFHNANSLVFLNLSNNHFRNMENIGLRSMRNLEVLDLSTNGVKLVSTMPLKALNWLVELKMDNNQICRIQGSPFETMPRLRVLSMRNNQLRSIKERTFRNVRGNIAILDVDGNPIDCNCEMQWLSVWLQETNFPYPGPKCQDGRLLRSARMERSLCVGADIYGNERTDGNQLPLLNEHGDVFQRDLPDDFNDECEAGEGTRLPGDRPLVGESEYFYDQYVDATEAPDTTHSAISTSQRPKPTPTINSNIDLNNTILHTKYFNRKPQPGSGSPFTFFGYPLPSVSLGRFFGFGDRGRKQRTDSNDDMPATHRMAHISLPSGRGKTRMYQPNSAEFEKYLKDQQKQEKLNIARNRYVDTDSTTSSMEDALSNESGSAATTVGVFRTTFREPSSIERGGFRPIVPAHVGGFMPVHDPQQRRGLVEVVNITGNPSEIVQGIGQRKFIPISTQARPKPTKSSGESSETATYEVTETTPDITTTTPLMQRIATSTTKASTTTTRSTTTTSTTQVTPAENNASSSTELDSQYDDEDLEAQSVTLLRPPPLVQTTTAETILLIPPAEEHVAQIKSRSWVTTTTPQSPSDNQVTLAGPTSTVPPPPPASPPLRGGGRSTITKVYTPYQQQVAQPTAEEYQRTTPSGDNEGVASEHQLTANAQKRTELELLQVDRVDRKDGMDWYYESFKKKRDFNGGAAVRKTAHKEVFYDGVAASSSWNRLHKEILFISLLLLWRAC

SEQ ID NO: 40876 - DNA, 4038 bp, DROSOPHILA
cacggcgccttcgataaatatacacaagccagaaaaaaaaatgccagagagatctcgtcaatatcattcgctggcagaaaatcgaaccatgctaattatatttagtttataatgctaattgaaatcgctcacaccaaattttttgttgggcgtcaaaagcgcgttctaaatcatatagtacaacatcgatatatggtgagctataaattcgaaagggcaattagccttggttgtatattatcgttgtgagtagtttataccaagaaattttcgagtagattctcataataaacataacactttgccttaaatgggagctcgctcataaatgaatatgtgaaaagcggcatcaacaagtagcaaccgttttccagtgaatatattactgttgcatatcattttactccgccaagggaacacacaagttaatctgcacttttctttctctacttccagggcgtcacatttccggcagttctcgtggccagcacgtgccaaatgtgttagtgctactaatattgaacctgctttctgcattcagtatactcacctgccgaagaaggagacgaatattttggcaaagctaagatttcgaggggaagtcatgatgtgagaaaacttgttgtacagcgtgaagtcagtcatagagaagtaggatctagtcgtagtagcattcaaataagtgtacttagttcaacaaatgtccagtggtaatcaaacttacttgctaagcatatatttaagcgttaataaatacacgtttataatgctaacagactttagttagcgtgtggcttagatcactaaataatgaagtaactccttgcgtgcattttaaataggacaacatgtcgaggaacatattaaaaaatattttataacacgtgctgcgccaaatatcatacgcttactggctaagtttcgccttacacactaaattcggtccactaaacctcaagttcagcaagtcggccttaaaagtctatagtctccacagtgtttacaagctgctacggctgttaagcgtacgctgcagggcgttcacacaggacagcacgtcctcatagtccttggaccattcgcgcaaattgcgttccagtgtctcgagtcgcagctgacccaatcgcattcctccgtgcttaatggccgcatagcaggagcacgccaacagcttgaagcattgccggcgaaccgcattgtgggcatggctctcccagttgggcgtactagccacgcactgccaggccatggatacgtagtccactagtgcgtcccagtgagtggagtcgtgcaggcgcttggcctgcgattgcagcacccgcttaaattcgtttagatgcatcgacgccttggagtaggccgccgcatcggttttcttgcacagccgggaggtgggaagggacttgaagatgagccgcttagcatggtgcagatcctgctccaaagcgctgaaaacaagacaaaacgatttatgtatatgtttgtttgcttgttggattttattttctaggttttcaaaacgcaccacccatctgtgaagagattattaagcgtctcgttgctttgacctttacataacctatgtaccctttttcacaaattcattttaaaaggagaatagacagcactaaggtacgtaacttccggaagccgaatcttaatacactatactatcaaaaactagtctattctattattttcaattaattgttttgattgtttctagggaaacaaattgattgttgtcaagaaactggtgtaaaccgaataaaaacactttacaatcatataaaaaaaaactacgacacctttatatttaaattcattttccgacagtttctatttcagattcatatatcataccgtctaacgattgtttatagattttgtatacctaaacacgttaagatcacagtttgctaaagttttttgcagatagctttaaaactgagtgactagattgtgtagaaacggacggaccttcggacggacatggttaaatagaatatatatactttttatggtagcaactgtccaaaccaaatgtaacgtagggttaacgtaccttatgtctggcgtgggcagctgcgttcgtatttctccctcatcactggcacttttaatgttgttcatgatcaaatcgattagttgctcctgcgatagaccctgcaacagggatggtagcgtcgcatctgtgttcgtctgccccacaggtctatcctccatttttagcttctttacaactggtgttcccggccaaagttgcttggtggtggccatcttgatgggcgagtaggtatccattggtgtgggctctggcggagtgctgcccatggtcaggcgtttgcgaggggagctgcgcaggatcatgccgcttgttagttgaaagttcttggtgggcgtgcgctggaaaggactacgcattgaggaaccaccgctggcacctcctcctgcgccaccacctccgttgaccttatctggagaatatgttgtggtaaagcgacggcgaccacgctgccgaatgaccagctcatctggcgagggcaatggagagaagacaaagtcctgggcctgcaccacgtttacatcgttgtccacccgcagtcccagtcctccgttagcattcggagtgtttatgatggccgctggagtcggctcatccggagtccggcgattggagttcgtcggtgtgttggccatacgcagcgcctccaggcggtcgggaatctcggccagtgccattcgtgtctgcagcggggtcgtcattgctaatccaaattgcgatgcggactgttgaaaaatacaattcgcatacgcatcaggcttgtataaacattttcactccaccctccacctgacgtacccacttggatgcttcgctatatcttcgcagcggaccaaacaatctcgacgtggacggatctggtggatcttcctgacacttggagtttttgcagtttctcctctagcgtctctaccgcggcagcaactgtaacttttcccttatttttgtttaaattgcgccaattcgctcaaggtggcagcgcgctctggagatgggagttcttttgcgatggtatcgcttgttaaccgatatggtacacgcatttaataccgtctaaatagttagtatatgtgcagttaaaagtctatagttttactttagctccacaactattttaactgaggttagaaattagaattatcctatcagtgcatgattgcttatagagatgagccttcttatgtattcaattaaatagtaagtgaatattttagtattattttatagtattgttttatttatatcatattatttattatattattttcaagaaaaaagcttatttatgtttaatttatgtttaatataaatatttttctttatgcaaccaaaaggtctggcagccccaaagcaccggcaactcagtggacatccggcaaccttctgccttctttctatccgaatttcgtttggtaaaggtcgtcagcgcgcttctaattaaaactaaaataaaatgaaaccgattgctataatatataacgcatgcaaagctgaccgtatgggctcgtctcctttaaaaactgatgcaatgataaatgtaataaaatgatacacataccgcaccagaacggcaatttgaatggatcaccatttacacgtggtgcaatgtgagatacctggagacacttagaaatattctggggtaagtttacaagaaatactattgtttcagcttatttaacaacccataatgactttctacccaatgcatacatcatgttgcaaaatggataaaaaattaggttaaaggaaagataactgcatattcacatttgtcattaacaatataaaattggcatttggttaaagttgggttaaataagattttaaattatggtaaattacatggtgatacattataaatgtgaagagcattccacgtaattacttagtgcacaagttaagtgtgcttgactattccgtatatataggcaaagaaatgaaaatctgctgtttcccaattataaaaactg

SEQ ID NO: 40877 - DNA, 1348 bp, DROSOPHILA
ccttgagcgaattggcgcaatttaaacaaaaataagggaaaagttacagttgctgccgcggtagagacgctagaggagaaactgcaaaaactccaagtgtcaggaagatccaccagatccgtccacgtcgagattgtttggtccgctgcgaagatatagcgaagcatccaagtggtccgcatcgcaatttggattagcaatgacgaccccgctgcagacacgaatggcactggccgagattcccgaccgcctggaggcgctgcgtatggccaacacaccgacgaactccaatcgccggactccggatgagccgactccagcggccatcataaacactccgaatgctaacggaggactgggactgcgggtggacaacgatgtaaacgtggtgcaggcccaggactttgtcttctctccattgccctcgccagatgagctggtcattcggcagcgtggtcgccgtcgctttaccacaacatattctccagataaggtcaacggaggtggtggcgcaggaggaggtgccagcggtggttcctcaatgcgtagtcctttccagcgcacgcccaccaagaactttcaactaacaagcggcatgatcctgcgcagctcccctcgcaaacgcctgaccatgggcagcactccgccagagcccacaccaatggatacctactcgcccatcaagatggccaccaccaagcaactttggccgggaacaccagttgtaaagaagctaaaaatggaggatagacctgtggggcagacgaacacagatgcgacgctaccatccctgttgcagggtctatcgcaggagcaactaatcgatttgatcatgaacaacattaaaagtgccagtgatgagggagaaatacgaacgcagctgcccacgccagacataagcgctttggagcaggatctgcaccatgctaagcggctcatcttcaagtcccttcccacctcccggctgtgcaagaaaaccgatgcggcggcctactccaaggcgtcgatgcatctaaacgaatttaagcgggtgctgcaatcgcaggccaagcgcctgcacgactccactcactgggacgcactagtggactacgtatccatggcctggcagtgcgtggctagtacgcccaactgggagagccatgcccacaatgcggttcgccggcaatgcttcaagctgttggcgtgctcctgctatgcggccattaagcacggaggaatgcgattgggtcagctgcgactcgagacactggaacgcaatttgcgcgaatggtccaaggactatgaggacgtgctgtcctgtgtgaacgccctgcagcgtacgcttaacagccgtagcagcttgtaa

SEQ ID NO: 40878 - protein, 382 aa, DROSOPHILA
MTTPLQTRMALAEIPDRLEALRMANTPTNSNRRTPDEPTPAAIINTPNANGGLGLRVDNDVNVVQAQDFVFSPLPSPDELVIRQRGRRRFTTTYSPDKVNGGGGAGGGASGGSSMRSPFQRTPTKNFQLTSGMILRSSPRKRLTMGSTPPEPTPMDTYSPIKMATTKQLWPGTPVVKKLKMEDRPVGQTNTDATLPSLLQGLSQEQLIDLIMNNIKSASDEGEIRTQLPTPDISALEQDLHHAKRLIFKSLPTSRLCKKTDAAAYSKASMHLNEFKRVLQSQAKRLHDSTHWDALVDYVSMAWQCVASTPNWESHAHNAVRRQCFKLLACSCYAAIKHGGMRLGQLRLETLERNLREWSKDYEDVLSCVNALQRTLNSRSSL

SEQ ID NO: 40879 - DNA, 3621 bp, DROSOPHILA
tttttaatactaaatgccaaggttgcagaacagacaacacgagcgtttcaaacgcagacgactcgcttaccaccaccagcaatagcacagtcaagaccataaaaccaagttttcagttggacatggacgagtttaaattggacagctcggaagatcagataatgcccccaccgaacacgccgccaggtttaaagatcagcaacacctcggatagtgtagttttattgacgcctgcgacccaggatataatctttgtgaatgatacactcgaagatgtgagcaaactgggcaccatggatgttctggccgaaattatgaaggacgatgacgacacgtgctcgagtgctttaagacagtacgagaaggttataattgaccagcagaagcaaaacctaccaaatgccccaaaagttgagagcgtcattccaattaccaaagtcgtgaaaatggaacctatatcccagccagaaacagacttaggcaacgaatcaacaaaactgcccgaggatattgaaaagtatcttatggatatcaaagaagaggatagtaggcattcggaggaggagtttccgcgaccgattttgatcaaggaggaacctgaggcgacggtcaaagaacgttttaacattgagtgcgtcgagtgcgaaaaggtatgtacaattttctcgaccatccacaactaaataatatttatttcaaattcgatccacttagttcatcaattttatgggttcaaatctgacagacgagaagatcaaagattatttggcaaagtgccggcatgaagacgctcgcagttcaactccgccgggattctggaatccacacatggtttccttcgcagaaggcgatccacgcaacgaagtgttgatagacactcggttttgggaccagagataaaacaaatgacatttaggcaatcaatttacaaatagtttttcagtttagaccatttcatttattattgattttgttagttctcaatttgatcacatttgattcacaagtttcctcgcttggcttgttcaatttcaatggccgtgaacaaggacttaaagttgccagcgccaaatccctgaaatagtaatgatcatgatttacttgttcttagcaacagtaggttaagcaataaatcttacattgtgattgtagcgttggataacttccaggaagagggtcggtctatcctggcagttctttgtgaagatctgcagcagatatccgttctcgtcgaagtcaatcaaaatgttcaacttcttcaagacctccatgtcctccttgatcttggtgcggctgtgcgagagctgctcctgaaggatctcgtagtacgaggatgggatggtcaggaactcggttcctcgagcctttaggttgctcaccgcctcgataatgtcatccgtattaagagcaatgtgctggacaccaccgccgccgtagtactccacgtactcctggatctgtgacttctttttcccattggctggctcattgatcggcatcttcaccgtctcctcgtagtttgccatcacgatggaccgcagggcggagtattccgtgtgaatctgcgagtcatccacggaccagaagcggtggaactgcaggattctctcgtaccaggaggccacgctctccatctgcagatccggctggttgcccaccacgtgatcaatgaagttcagcttggtggagggcaatccgtttagaaggacatctttgggcgaccgctggaatccaggcaggaaatctccagcgtacccattgcgctccacgaaagtgtgggtagtgtcgccgtactgcattcaagttaaggattaatccttaaatattccagaatgaaatccacggacttaccgtcttgatggtagcgaatctcacgaatccctgatcatcgctctcctcccagatgtcgcggaccacttcggccccacgggacacggccagtgtgaaaatggcattcaaatcctccacttcgaaggctacatccttgacaccgtcgccgtggcgcatcaggtggagtccatgctcctcgtcatccggcgtgtaggcggagacgaacacaaagacgatcttgttctggcggacggcatgcttggcgaagcgtcgctccccggtctctaatccctgatagccaagtggttcgaagcccagtcgagtggtatagtagctggccgcctgcttggcgttgccaacgtagaaggttaagtgatcaaagcttagaaatttgccggcttcaggctgaaagtagtgaagaaagtaggttggcattatacgctccaatattggcatacgctttcgaacttactttggttcctttgtcagtatagctggtctgttggtagttaaaaagaaataatagaagtcattagaattagatcaccttgaaatggatccttagaaagtctgtataattatcattggtttatccgcttttgttagacagtatttgttataaatcctgtttgagaactctttaaagtccatttaattcgcactaaagggctgttacataaccacatagccaccacatgtcccatcgtctcatttaccattatcactcagactcaatttatgcaaatcctctcctcgcacgcgatatagatttcttcgttccgtcgatcttacacgatcttcaaattgattatggcctgagctcagccagtcggaggctttttatagggcgctcaggtaggtggatcaggtgaaaatcctgtactaatttaaatataagccaaactagtattttgtttatttcgaatgccatattatcggaatatcttagctagctggttattgatcgcatatttaagctaaacctgcatggatttgtttactagaacaggtggattacttaattaatgcaatctcgagcggaatgaattgcaatattgtaatgcgggtcgggcctccaatctgtttacttcgtatctgagcggcgctttgcaagttctgcgttcgaaatttcacttccttaagctcgttacatgaagatacagataactatgtgttcgttatgcaaaagttcggcccatgtcagaattcagctaaatattcatgaagtcaagtctagtgagttcgaaaatcggttgccaagtcgtactaaacttgattccagtttcgagcccccaaaaacgcaaacaatgggccaactgagtgttaatgctatctgaattgttattgttattgccattgttacacagtgcataatgtggggcgttattgaagttgttttgcattagaaccgctttgcaaggttctcaaaacaaatgtacaaaaactggttaacaaatctgtttgttgttacgatctaataaagcggcacacgctagtcacaaatcatctaaattgatgattgcctttatcggtttttaattgcggggataatagctctaagaggattggaaaaggatttcaaatcattagcttgatggttattttctttatttgaaagcgcataattcagttgtatttaaatatagcaagactggttttgggaactggattagttatttaagcaagttctattatttttataggtatttaggaatatcttgcttatagatgaatgagcgttttagtgatcgttattctttagtttaaagttagacaacatcactataaatg

SEQ ID NO: 40880 - DNA, 1215 bp, DROSOPHILA
taagatcgacggaacgaagaaatctatatcgcgtgcgaggagaggatttgcataaattgagtctgagtgataatgaccagctatactgacaaaggaaccaaacctgaagccggcaaatttctaagctttgatcacttaaccttctacgttggcaacgccaagcaggcggccagctactataccactcgactgggcttcgaaccacttggctatcagggattagagaccggggagcgacgcttcgccaagcatgccgtccgccagaacaagatcgtctttgtgttcgtctccgcctacacgccggatgacgaggagcatggactccacctgatgcgccacggcgacggtgtcaaggatgtagccttcgaagtggaggatttgaatgccattttcacactggccgtgtcccgtggggccgaagtggtccgcgacatctgggaggagagcgatgatcagggattcgtgagattcgctaccatcaagacgtacggcgacactacccacactttcgtggagcgcaatgggtacgctggagatttcctgcctggattccagcggtcgcccaaagatgtccttctaaacggattgccctccaccaagctgaacttcattgatcacgtggtgggcaaccagccggatctgcagatggagagcgtggcctcctggtacgagagaatcctgcagttccaccgcttctggtccgtggatgactcgcagattcacacggaatactccgccctgcggtccatcgtgatggcaaactacgaggagacggtgaagatgccgatcaatgagccagccaatgggaaaaagaagtcacagatccaggagtacgtggagtactacggcggcggtggtgtccagcacattgctcttaatacggatgacattatcgaggcggtgagcaacctaaaggctcgaggaaccgagttcctgaccatcccatcctcgtactacgagatccttcaggagcagctctcgcacagccgcaccaagatcaaggaggacatggaggtcttgaagaagttgaacattttgattgacttcgacgagaacggatatctgctgcagatcttcacaaagaactgccaggatagaccgaccctcttcctggaagttatccaacgctacaatcacaatggatttggcgctggcaactttaagtccttgttcacggccattgaaattgaacaagccaagcgaggaaacttgtga

SEQ ID NO: 40881 - protein, 380 aa, DROSOPHILA
MTSYTDKGTKPEAGKFLSFDHLTFYVGNAKQAASYYTTRLGFEPLGYQGLETGERRFAKHAVRQNKIVFVFVSAYTPDDEEHGLHLMRHGDGVKDVAFEVEDLNAIFTLAVSRGAEVVRDIWEESDDQGFVRFATIKTYGDTTHTFVERNGYAGDFLPGFQRSPKDVLLNGLPSTKLNFIDHVVGNQPDLQMESVASWYERILQFHRFWSVDDSQIHTEYSALRSIVMANYEETVKMPINEPANGKKKSQIQEYVEYYGGGGVQHIALNTDDIIEAVSNLKARGTEFLTIPSSYYEILQEQLSHSRTKIKEDMEVLKKLNILIDFDENGYLLQIFTKNCQDRPTLFLEVIQRYNHNGFGAGNFKSLFTAIEIEQAKRGNL

SEQ ID NO: 40882 - DNA, 3123 bp, DROSOPHILA
gtgcactagtgctgctgttgggtgtcgaggttaccgcgaacgatcgttggtagcgccgaaatagcctcgaaatctttaatttccgaaatctatttctgctaaatacttttcacagctaacaagtatgaaaatttcttcgtatgctgttgcgtgagtgcgggcgggatggcgagtgtgcttctagctgatgttgccacactgccggaagtcgcggatatggccagataatagacgccatcttatctaatcgataacatgcaaatatagtgcataatcgataacgaagttgctgtaatattactcttattacattaaggacatttccaatccattgcaagagttccgcaatagctctacttttatattttcattcgaaacgggtcttctcgaccctatagtggctcgaaactgctgttagtaatcgattaaacgcatggcgtccagttactctatttcagcggtgtggcagcctgatcagggggacactagccatcccgcttgcactcaggcacgcctggcatgacttactgtggaaaagagatgggagactgatgcatttggcgaggctattcgatataccggtaacaaggggatatttaaatacattggaaattcaaataagccaataagaatattcgtttacagaacataggttaattcattttccttattggaataacttccacatgagttatgatttaaaatgccaaatttcccttaaattctcacaaaactaaataatatattgatagatatattaacaatcacactatgtaaaaattttgtatgaaatgtgctcatgtcttgttatcgataattcgatactctatgcatttcctgcctacgcccgctaatcatttaattaactgttaaataggcgggtttcaatttaatcaaaatgctgttaaacgatatcataagcggaaaattagttgattccgtctatattatagcggaaattggccaaaatcaccaaggttgtgtggaaacagcgaagaaaatgatatgggaggccaaaaaagccggttgccactgcgtcaagtttcaaaaatcggatttgccagcaaagtttacgagatccgctctagatcgcgaatatatcagtgatcacgcctggggaaaaacgtacggggagcacaaggagtacctggagttctccaaagatcagtatctccagctgcaggcccactgcaaggagttaaatgtggactttacggcttccgccatggatgaggttgatattaattaattgttaaccaattactactactaacaattccttttttcccttgtttcttgcttaaatagttattaatgtgtgtatatgctattttaaacagagatcgttggagttcctttctgctctaaatgttcccttcatcaaaattggttccggagacgcaaacaactttccgcttctcaaaaaggccgccaatttgaacttgcccctggtgatctccaccggaatgcagactatgcaaactgtggagaggattgtgcaaactatgcgggagtcaggaaaagaggactacgctctaatgcactgcgtttcatcgtacccaactgacccaaaagattgcagcttgcagttgatatccgtcttaaggacacgctttcccaatgtggcaattgggtactcgggtcatgagctgggagtgatcattagccaggccgccgtcttgctgggagcacgcatagtggagcgccactttacgctggacaagagtcagaagggctccgatcatcgctgctccctagagccgcaagaattaaaagctctgactacagccatcaccaacttcaaactctcttcagttcccatgcctccacaagaaatagttaaaaagttaaatggagatgaggaactagaggcagctcttcagcacgttgagtctaaaaccattttgccgtgcgagctgccctgccgaaataaactgggcaaatctattgtggcagctaggaatctcaataagggttacaggttgcaattggcagatatggccattaaagtcagtgaacccagcggcctgacagcggaggatttcttggacttggtaggcaaggaattggcagacaatattggtgaggatgaacccatacttgggaatagtataatcaattgaatcatgggttgggaatttaaatacacttgtaaatgaatagcttggtctgtattactcggcgccatcgtcgctgccctcttcttcgttctcattctcgatcatgtcgatgtcctcctcgaggtcgccctccttcttgtccgttggcttctcgtagacagcggtcagcggggaaatgcacacgccgttccagacggacatttcgcgcacaacgctggtgttgccctccagtcccaaaatgtgtttgtatccgccgtgggccagcacgcgcagtagtgtctgcgatgtgtagcagcacacatcctgctgctccaatgtcatggcagtgtgcacacggatgtgtcccggctcggtgggatccgtgatgccggccgagcccggcaggaagagcccggcggagagtagctgaaagacgcgacggaaggccaggttgatgggcagtgcctgtcgcgacgggttgttcatgatggccaaatgggcgatcaggtccagcatccaggccgacagcggcgaaaaagcgtcgaaacgcctagtgagatccttgagaatgcgaatgagcacctttatcgaggagtggtgggcattttcctcaaaccagcgcgtgtgccgaatggcagccagatggctctgcatcagtttgtgatccaaatggatctcaggctccagcttgcgaagattctgcggcaaggtggcgatcagaatgcgcaccttggcatgcacgttggcgatgtcgaagccccgctcatggatctgtacggtgtgctgatcgcccttggtcagaacttcagtcttcatgctggccttcaggtcggcctccacttttttggccagcgcatcgacggcctccttggtgggcagggttttgaggataaccaccacatcggctacattgttgcccgtcagtatggtgcccttcttgaaggagccaacctgacgcacttcctccagttgctgtggaataatcagaacagtttaaacatgcaaatcacaaggagttgtgtaa

SEQ ID NO: 40883 - DNA, 1017 bp, DROSOPHILA
atgatatgggaggccaaaaaagccggttgccactgcgtcaagtttcaaaaatcggatttgccagcaaagtttacgagatccgctctagatcgcgaatatatcagtgatcacgcctggggaaaaacgtacggggagcacaaggagtacctggagttctccaaagatcagtatctccagctgcaggcccactgcaaggagttaaatgtggactttacggcttccgccatggatgagagatcgttggagttcctttctgctctaaatgttcccttcatcaaaattggttccggagacgcaaacaactttccgcttctcaaaaaggccgccaatttgaacttgcccctggtgatctccaccggaatgcagactatgcaaactgtggagaggattgtgcaaactatgcgggagtcaggaaaagaggactacgctctaatgcactgcgtttcatcgtacccaactgacccaaaagattgcagcttgcagttgatatccgtcttaaggacacgctttcccaatgtggcaattgggtactcgggtcatgagctgggagtgatcattagccaggccgccgtcttgctgggagcacgcatagtggagcgccactttacgctggacaagagtcagaagggctccgatcatcgctgctccctagagccgcaagaattaaaagctctgactacagccatcaccaacttcaaactctcttcagttcccatgcctccacaagaaatagttaaaaagttaaatggagatgaggaactagaggcagctcttcagcacgttgagtctaaaaccattttgccgtgcgagctgccctgccgaaataaactgggcaaatctattgtggcagctaggaatctcaataagggttacaggttgcaattggcagatatggccattaaagtcagtgaacccagcggcctgacagcggaggatttcttggacttggtaggcaaggaattggcagacaatattggtgaggatgaacccatacttgggaatagtataatcaattga

SEQ ID NO: 40884 - protein, 338 aa, DROSOPHILA
MIWEAKKAGCHCVKFQKSDLPAKFTRSALDREYISDHAWGKTYGEHKEYLEFSKDQYLQLQAHCKELNVDFTASAMDERSLEFLSALNVPFIKIGSGDANNFPLLKKAANLNLPLVISTGMQTMQTVERIVQTMRESGKEDYALMHCVSSYPTDPKDCSLQLISVLRTRFPNVAIGYSGHELGVIISQAAVLLGARIVERHFTLDKSQKGSDHRCSLEPQELKALTTAITNFKLSSVPMPPQEIVKKLNGDEELEAALQHVESKTILPCELPCRNKLGKSIVAARNLNKGYRLQLADMAIKVSEPSGLTAEDFLDLVGKELADNIGEDEPILGNSIIN

SEQ ID NO: 40885 - DNA, 2955 bp, DROSOPHILA
cgtccagcaactccaccacaaccacgagggccacgcagaactcgctggcttcgccagaggcagcagcggctagtggccaacgcacaggtaactcccatcctcgacagaatcagcgggatgacggcagtgtactggcaactgaaggtatgccacttgtgacttttaaaagcaatttgcgcggaaacggtacatatgcattatattttttatgatttaactactattctcaaatgtgtatatggcttatttggcatttggtctattgtactctcacgtatttattgtcttgtttagttatgttgggcatatggtgtaagcgctgctagtagtccatttgagagtcatttgctagattaaacctctattgtttgtttgtttctcacttctagctgaggctgcgggtttcacgcaagagtggtcagctaacttgagcgaacgtgtggctcgtcgccagattgaagttcaaagtactcagagtggaaacgctcagcgctccaacgagtataggacagtaacagctccggatcagaatcatccggatgggcaagaagaacgtaaatatactatatacatatagaagtgtgtaaaccataagcgattcctgatgaacgattttatgtaggtggcataaagcttggcctcggcgacttcatcttctactcggtattagtgggcaaggcctccagctacggcgactggacgaccacaatcgcttgctttgtggccatcctcattggactctgcctcactcttctgcttctggccatttggcgcaaggcgctacccgccctgcccatctcaataacgttcggattgatattttgcttcgccactagtgcggtggtcaagccgttcatggaggatctatcggccaagcaggtgtttatataaacttgaaaagacaaggacacatcaagtgtcttacagtatcatagtctaacaaagctttttgtaatccaattctttatttaacaaaatgcatagtaacaacctcgactaattattgcttgcgcttaatgatcgttttgtccactatgttgatcagccagccgggttccaggccgtagaatacttgccttggatccttcgctgtggtgagcatctcgtacgcggaatcttcctcaattttgggcagctgatagccgtacttctgggccagaactaggcggtcctggctgatcgcctcgggattggccaggtagccgcgattcttgggatccgtatagtagtccactgcatcctggggcggcagcatgcggctaggaataggtactcccttttcgaaccacttcttcggattggccagcatgtgaaggctgcgtggatcgtaataggccgtacggattacaccgccgttcttctctatggccgctatgaccgcctcgctggcgtgctgcacctcaatgttgatcttagcctggaaattgtccagcccatcgtccgtcagctggaaaccgtactccatttcagcgggtttcagtttcaggaggccagagttacacagcgtgctgatgtcgatgggctggctgatgtctatgcggttcgtgtcgatgagcacttgcagttggagcagcgaaatgggcggatactggcgctttaggtggtgtcccttgtagtagggctcgtagggaaatctcaagtagaagggctgattgcccgtttcatagcccaatcgcatgaagttctgccgctgaccggatcccttgttgcccgctccgtgcttatctcctccgtgttgtgccctgccgcgcttgtcctgccgagaaaataagcaatatatttgttaatagtttattgacgactgcatgctgttattcaaccactcacattctgttttgagtttggatttggtcgcagattgccgatttgaacgcgcggtaaagtacgcaacagcttcagcgccttgtccgaggtctcccgcaggtgtgccataccgaagttaacttaatttatttaataaaattatgtttatcgggtgaaaaataaaatttacacgagagtaagtatgtaagtaagaccgcagttggtcggctaacaaataccaaccggcttataaaatataccaacttttaggtctgtgcttcagctatgcggtattcaggttagctgcgaccacactgctctgccgacgcgcaaaagcaaaccaaaactttatcaaataaaatccatttatacatagatctcttcattaaaatagtaaaattttattaagttgtaaaaaagatgacgtgcggaaaatgtcgcggtcacaaggaaaggagcgtgaagtgccttttagccgctttggacacaatcaaagagcacgccttaagtaagccaaatatatttatatttactcatttaatttaacatgttccactttttaaagtgatgcaacgagactcagaggaaagttcgaggaccatagaacagctaaagatccacaatgaaaagctgcacaaggccttggacttgctgaaggagcggcaggcatccttggtccaggcggagaagcgcaggaagctgttgcccacgaagatcaaggatgacatatcgccgcagacacaaagccaaaactcccttaacatgaacatagccattagcaacatagatctatccgacgaggaccaggaagtggaggaagacgagagcattaccgaaacggagaccactgtcctcagcccgcgcaaactacgattgccaagtcgaaagtcggacatccgggatctggagaatgtgcagccgagcaatgtttctgcggtgggaaatagttggacccgcaagacacccaagaatcagggagtccttacaaagctatcactcacacacaagagcaacaacttgaacttgaagcaaactcgccttaaattcgaagcaaataggacgagcaccagtgaaaaggaagtcatagaggagagtcccaatttgagcaccaatctgaagagatctaggccgccgagatctttaatgcagagg

SEQ ID NO: 40886 - DNA, 884 bp, DROSOPHILA
aaataaattaagttaacttcggtatggcacacctgcgggagacctcggacaaggcgctgaagctgttgcgtactttaccgcgcgttcaaatcggcaatctgcgaccaaatccaaactcaaaacagaatgacaagcgcggcagggcacaacacggaggagataagcacggagcgggcaacaagggatccggtcagcggcagaacttcatgcgattgggctatgaaacgggcaatcagcccttctacttgagatttccctacgagccctactacaagggacaccacctaaagcgccagtatccgcccatttcgctgctccaactgcaagtgctcatcgacacgaaccgcatagacatcagccagcccatcgacatcagcacgctgtgtaactctggcctcctgaaactgaaacccgctgaaatggagtacggtttccagctgacggacgatgggctggacaatttccaggctaagatcaacattgaggtgcagcacgccagcgaggcggtcatagcggccatagagaagaacggcggtgtaatccgtacggcctattacgatccacgcagccttcacatgctggccaatccgaagaagtggttcgaaaagggagtacctattcctagccgcatgctgccgccccaggatgcagtggactactatacggatcccaagaatcgcggctacctggccaatcccgaggcgatcagccaggaccgcctagttctggcccagaagtacggctatcagctgcccaaaattgaggaagattccgcgtacgagatgctcaccacagcgaaggatccaaggcaagtattctacggcctggaacccggctggctgatcaacatagtggacaaaacgatcattaagcgcaagcaataa

SEQ ID NO: 40887 - protein, 286 aa, DROSOPHILA
MAHLRETSDKALKLLRTLPRVQIGNLRPNPNSKQNDKRGRAQHGGDKHGAGNKGSGQRQNFMRLGYETGNQPFYLRFPYEPYYKGHHLKRQYPPISLLQLQVLIDTNRIDISQPIDISTLCNSGLLKLKPAEMEYGFQLTDDGLDNFQAKINIEVQHASEAVIAAIEKNGGVIRTAYYDPRSLHMLANPKKWFEKGVPIPSRMLPPQDAVDYYTDPKNRGYLANPEAISQDRLVLAQKYGYQLPKIEEDSAYEMLTTAKDPRQVFYGLEPGWLINIVDKTIIKRKQ

SEQ ID NO: 40888 - DNA, 2866 bp, DROSOPHILA
atttaattattaaataggctatgtgatttagtattttttggcttaaatgtaagggaatttgagggaattgaagttgtagggtaagttgacccacttttaccacccaccctcgacagcagcccccagaaacagctgttcggaagtaggacatgcgcatatcgcgtgtttatctcgcatttgccgcactcaccggtcggctttcaacaagtgcttgttttggtctagccaatgtaaatatttactattttcagtcgggtccggagtttgcgcagattgtgctcaatgttggtaaacatcgcccagctgtttatcctgatatgcaactggtgtgtttcagattttccaaagtactgacacgagataagaaaactactcattcttgagatatatctatatctacctctttggaactgagccaagaaatttgcactggtatactgatactgaaataaagtttaaaataaaactttctgcacccttattccttaatagcacaccttccaacaattaaatactcattacgtgatttagttagccaacttttgggggtggctcatctttagggcttccctcgaaagtgaaaacctcaaataattctcgggcttgtctggctcatgcggcaccttttaaccccactgtttgcaacgcaaaacatgaaactcgtttaggtaatcaaaaccccccagtgaagacgttttaacaaccgatttaactgaactctgtgaccccttagacgaacaaaaacggatggatttaccacaaaggatgacatgacaacatactggggtcttgtatgtgtttatttcgtgagctcggaattatcatttgtggaatcaaagcgaaaatgtttgttcttgtatgtatgtcagttagcagggatgtgtttgaagagtatatattgtgtaaggttgaatcagctccctaactgatttctaaacctttgcctcgagatcggtagagatactagacatcgggtttgattagtgttagttgaagacggctaaatggaagccgcattctcgtgatcattggtagacagctggccgccctctaaggcactgacaatctcctgaccggatgccttgctggcaacacttttgttgggcttcgggttgggtggctccggatctgtgccacgttccatttcatcgtgctcatccttgactgtcggctgaggatcggtatcgggatcttggcttactggttgcagttcatggacttcttcagactcgttatcctctttattggcattggtctgccctaaagctgcgttttggcgctggctcttctgccggttgaacagtatcttccagtaggatgaaatggatgtcttaatcgtgggctttgcattcggcaacggcttatcctgctccacgggttcgaccaccgagctcgaaggatcttgaacatctggcaagtggggtttatgattattcaagaagagctccttttaattgtaagtcattaggcaatcatttttttttcaacaaatcatatttaataccagtcaaaagagcttacccttattggctcccttcatccgggtaaagaagcgacttatagtgtttgactttcccaggtccttgttgtcctgggaggatgtctcgtcgtcatcctccacttggtcgcgcatcattggcttcttgctgatcttaaagaagcgcttcaaggaattggactttggagcgggggccacctcgggaccttccacagacaggccctcggggtcggcaagcggaatatcttgcagactggacatcttcgtccaatatgtccaccgaaattttatcgaattttatttacaataaaatatggctcggttttgtacgaaatataagattaatgtgactggtgttgttgaattgaacaccagatgcaaagtgtcagaaaatccagagtcaactagttcttgtcaccttttatgaaaagtagaattcagttaagtgagtttaaaaaggattttacagccttataagtttgagattggtactttacatatatattgtaattttaacaactcatgtagataaaaacaatatcaatttcgatttctgctgccacgtttttttgcattttccttggcaatttggctacgtttggttaacatgtgttaacaacgacatcgaaacaggtttcaaattgatacgactttgatttcattttctcccgcaatcgaactgtttcccggccaggacaaagccaaactggactgaagcctgcagccccagaaaaaagagctgaaatgaaagccaaaggcaattcattcaatacgtgcacacaataccccttgttatgctactgctgctgctgccccattgtctcaaatgttcgaacttcgaagtccgtcgtccgttgtccgccgtccgctgtccagttagtgctgcagtgttccgtttctgagatggggcccaccaacaaagtgctttcgcaaaatcaattgaagagctggtggcgattcctgctgtcgacactgcgccatccctacgtctctggcccgatccctttccgtggtcctggtcctggaatcgaggtccgttaatttatgtagttatgtattgccggttggttggccaggatacccgaaacaatggacaattgctgcggcacttgcagcatgctattgtctggcgaaggtgttgaaattctgaaaaacagatatacattatcgtaccaatttgaaagccattaaaattcatcaattacttactataagagtgcaataccgtgcatcagaagaagaccaacgaatggtgaatgaaaacaacgtttaaaacattatacatgtatcttgtttaacggtagtagatacttcatatgtttgccctttaatttggcagttttcataacccttgaagtgattgctcgt

SEQ ID NO: 40889 - DNA, 755 bp, DROSOPHILA
tcaattcaacaacaccagtcacattaatcttatatttcgtacaaaaccgagccatattttattgtaaataaaattcgataaaatttcggtggacatattggacgaagatgtccagtctgcaagatattccgcttgccgaccccgagggcctgtctgtggaaggtcccgaggtggcccccgctccaaagtccaattccttgaagcgcttctttaagatcagcaagaagccaatgatgcgcgaccaagtggaggatgacgacgagacatcctcccaggacaacaaggacctgggaaagtcaaacactataagtcgcttctttacccggatgaagggagccaataaggatgttcaagatccttcgagctcggtggtcgaacccgtggagcaggataagccgttgccgaatgcaaagcccacgattaagacatccatttcatcctactggaagatactgttcaaccggcagaagagccagcgccaaaacgcagctttagggcagaccaatgccaataaagaggataacgagtctgaagaagtccatgaactgcaaccagtaagccaagatcccgataccgatcctcagccgacagtcaaggatgagcacgatgaaatggaacgtggcacagatccggagccacccaacccgaagcccaacaaaagtgttgccagcaaggcatccggtcaggagattgtcagtgccttagagggcggccagctgtctaccaatgatcacgagaatgcggcttccatttag

SEQ ID NO: 40890 - protein, 215 aa, DROSOPHILA
MSSLQDIPLADPEGLSVEGPEVAPAPKSNSLKRFFKISKKPMMRDQVEDDDETSSQDNKDLGKSNTISRFFTRMKGANKDVQDPSSSVVEPVEQDKPLPNAKPTIKTSISSYWKILFNRQKSQRQNAALGQTNANKEDNESEEVHELQPVSQDPDTDPQPTVKDEHDEMERGTDPEPPNPKPNKSVASKASGQEIVSALEGGQLSTNDHENAASI

SEQ ID NO: 40891 - DNA, 3580 bp, DROSOPHILA
tgccagcgaaacatcatcagcattatcatcgttttcactgttttcggcggaactgcgactttggcgcagggcctgcagagtctgccaattcctgattgcattcgcacaagccattgcttctatgataaaagtgaccgtcatgtaactgatgatggccagcagaacaatgacgatcagggaaagcatccatcctgccctggcaaagactccgggtagcgtcagcgctccggttccaacgattagattgaaaatgaatatgaagccaacctgtggatagaaaaggaaattttaactcacggagcgacaggtgttcagattgtggaacgaaaataagtgcacacaacgcaaaaattgtgcaagtgggcgttatggagtagattcttatatttccactggcacacctatatgtacttaaggcgttttatacaaaaatataagcacaaatctttctgacttttgtaaaaatgcacatttgttgcgcaaacagcataacaaacatgcaacaaatgcatacaatcctttgttttggtgaaaggagtcgctggctccacacattgaagttcaacttaccagattcgagtacgtgggcgcggcttcgcggccattgacaaggcgaggcatctttacgctggttctttgtcttttcaccaggcttctatccaatccgattcaatcaaactcttaacaaaaagaaaacaataatagaacagatagtgcactcaatgcagtgtgcccaactgttttgacgaaatagagtatacacacaatttcctaacgccacagaattaattatttaaacacccaattggcgcgtaattttaaaagtatgtttgtacaccacaggagacgaattacttcatttaaagctaaaaacaattcgattttatttcaaaacagtaaatttgtcgtctaatatatacattgcacaacatgcgcgtgtgtagcgaataaaaggctaaactaaagctatccatgatcgactaggaaaggcttagaaattttactgcttcttgggaacttcagtgtcgttttgcctcttcttgcgattctccaatatacttgtgatgaagaactcgccggctttgtaggagctgcgcaccagcggtccactggctgtgtacaggaaacccagttcgttgccgcgctcttcccagtgcttgaacttctcgggcgtgacgtattcgatgaccttgaggtgcttattcgtgggctgcatgtactgacccagggtcacgcaatctacgccggcctcccgcagatccttcaaggtgttctcgatctcctcgtcggtctcgccaagtcccagcataattgaactcttggtgatgagattggggttgaatctcttcgcttcggttagcacttgcagggtctggcggtagtgggcgcgccggtcgcgcacatagggagtgagcttctcaaccgtctctatgttgtgcgcataaacatccagcccgctgttggcgatcgtcttcacacactccagatttcctcggaaatcaggtactaggcactccacaaagatgtttgagttgctagacataaagtatagattaggttcgaacaaatttaataatgaattcgtcttaccgcgccttaatttcgcgaacagtttcggcaatgtgctccgagccaccgtctggcaaatctatggtagtaaaggcattttaagctatggcaagtcaaaaaccactccagtacttaccatctcgatcaactgaggtcagaacaatgtaatccaatccccaggaggcaattgccgtggctgtgttcacgggttcgtttacatccagcggtggtggtttgcgtgccgttttcaccgaacaaaatctacagcctctggtgcaagtgtcgcccataagctaggtaaaaaatgtattgtgaaatggtgtagttaagaagtattggttcgtcaatattcgttgtctggttgctttaaaatgaattgtagtttaagtgactttcataatttaaaatttaaaaatttaaaaagacgcctaagctgtggaaaataatgttcagactatctgagcatgttcggttatcagcaaaggtcaccatggggggtccctcaccataatcgtggctgtctgggtgccatgctcgccgccgccccagcactcgccgatgttgggacaccgggcctcctcgcagacggtggacagcttgagctcgcgcatctgggccttgattttggcgtagtttttgcccacgggaatggtggtctttaaccaaggcggcaatcgcagtcgctgctcctcgcccttttcgcggcgtagctttccatcgtactgttcccactcgtttctggtgttgtccggattctgcacaaagtcatggaaattcggaccctttgccagacgttcacgaatctcctcaagcttctccgcattcgttgatgccgcacgctgttattattcaatcaaaataagttgtttttatatgtacttttcaagcgtttgcttacggtggcaactacaatgggggcctccgcgtgagtttttaaagctcgcaacatgacatacatatgaattattttacaattattaaaatataaacgatttattttgcttgtcgaaacttatgaaatatttagtaagaccgtttgccacttgctgttttcatgggcactttttgtggagaacagctgtttctataagaagcgcgtttatggtatttagttggaaaaaatttatcgctagcagtattttaaacaaagatttagaaaggggttccttttagagtcataaaaaattgtgagttgacaaagtcgccacttttaatttgtgcatgattgcatgtagaagttattctaaatacttgtaccttaaatatattaatcccttcgcaaattaatcgaacatcgatagttcagccggacgagcgcactgccatcactagtatatgagtcgctttaaaacaaaagaaagtttttaccagctacatttctttggtttccttaactgtgagtagtccaactcctgcgagtgtcaagctcggtcctaatcggtggtgctccccaagaaatcccatcacacaactacggcttcgcagggggaggcgtccagcgctacggaggcgaacgaacgcacaccactgatggctgctgtcaatctccaggcttcgtgctcctccgggctcgcctctgaggatgacgccaatgtgggcagccagataggcgcggcggagcgtttggaacgacctccaaggcggcaacagcagcggaacaactacggctccagcaatcaggatcaaccggatgctgtgcgtataccgaagggaaactttgttgcttacacattcaactatcgaatcccctttcctgccaggccatacttgctgtgcccaatgtggtgatgcgtgaaccttgtggctcgcgcccttcaagactgaccggtggaggaggcggcagtggtggtccgcccacaaatgaaatggaggaagagcagggcctgaaatacggggcccagcatgtgatcaagttattcgtccccgtctccctttgcatgctggtagtggtggctaccatcaactccatcagcttctacaacagcacggatgtctatctgtagggtttacc

SEQ ID NO: 40892 - DNA, 1196 bp, DROSOPHILA
tttcgacaagcaaaataaatcgtttatattttaataattgtaaaataattcatatgtatgtcatgttgcgagctttaaaaactcacgcggaggcccccattgtagttgccacccgtgcggcatcaacgaatgcggagaagcttgaggagattcgtgaacgtctggcaaagggtccgaatttccatgactttgtgcagaatccggacaacaccagaaacgagtgggaacagtacgatggaaagctacgccgcgaaaagggcgaggagcagcgactgcgattgccgccttggttaaagaccaccattcccgtgggcaaaaactacgccaaaatcaaggcccagatgcgcgagctcaagctgtccaccgtctgcgaggaggcccggtgtcccaacatcggcgagtgctggggcggcggcgagcatggcacccagacagccacgattatgcttatgggcgacacttgcaccagaggctgtagattttgttcggtgaaaacggcacgcaaaccaccaccgctggatgtaaacgaacccgtgaacacagccacggcaattgcctcctggggattggattacattgttctgacctcagttgatcgagatgatttgccagacggtggctcggagcacattgccgaaactgttcgcgaaattaaggcgcgcaactcaaacatctttgtggagtgcctagtacctgatttccgaggaaatctggagtgtgtgaagacgatcgccaacagcgggctggatgtttatgcgcacaacatagagacggttgagaagctcactccctatgtgcgcgaccggcgcgcccactaccgccagaccctgcaagtgctaaccgaagcgaagagattcaaccccaatctcatcaccaagagttcaattatgctgggacttggcgagaccgacgaggagatcgagaacaccttgaaggatctgcgggaggccggcgtagattgcgtgaccctgggtcagtacatgcagcccacgaataagcacctcaaggtcatcgaatacgtcacgcccgagaagttcaagcactgggaagagcgcggcaacgaactgggtttcctgtacacagccagtggaccgctggtgcgcagctcctacaaagccggcgagttcttcatcacaagtatattggagaatcgcaagaagaggcaaaacgacactgaagttcccaagaagcagtaa

SEQ ID NO: 40893 - protein, 380 aa, DROSOPHILA
MYVMLRALKTHAEAPIVVATRAASTNAEKLEEIRERLAKGPNFHDFVQNPDNTRNEWEQYDGKLRREKGEEQRLRLPPWLKTTIPVGKNYAKIKAQMRELKLSTVCEEARCPNIGECWGGGEHGTQTATIMLMGDTCTRGCRFCSVKTARKPPPLDVNEPVNTATAIASWGLDYIVLTSVDRDDLPDGGSEHIAETVREIKARNSNIFVECLVPDFRGNLECVKTIANSGLDVYAHNIETVEKLTPYVRDRRAHYRQTLQVLTEAKRFNPNLITKSSIMLGLGETDEEIENTLKDLREAGVDCVTLGQYMQPTNKHLKVIEYVTPEKFKHWEERGNELGFLYTASGPLVRSSYKAGEFFITSILENRKKRQNDTEVPKKQ

SEQ ID NO: 40894 - DNA, 16931 bp, DROSOPHILA
caacaatctggagtggaatggcagaaacacggacgagggcgcccatgtggacgacattctggacagcgatgatgaggtggagatggatccgctgcggattatagcgcagggaacaatgcacgagaagaaggtcaaggttttgcctccgccaacgagtttcattacggcagatgatctggcggatatcgaggagtttaagaaaccaaccgactccccagattccgccttggcaggacatagtgacaccagttcccttcctgccgagatcgtagaaatcgacgccagtcaagtggccgcaaagctgagcagggagctgcctcccgatcagcatgccctctacctcatcgataagacggaaacaaatgtgaatactcctagggaaaagtttatgccattccgaaccaccaagtccaatgtccacaatcccgacaaggagcgcgtgcgcaaaaagggcaagcattgggaaataacggcagcaactccgccactcatccagcacaaagaggcccagttggtgccattggctgagtcggctgcgttacagattgattacatgcaaagagtaaaggtaatttcattgcttatggtctacataattcgatgctaaatacactttatttgtaggaggttcgcattcagcaggctgaacagcggctggccaggcttaaagactctcgactccgacttggcctgcccgaggaatcgattgtgaaaaccaaggaatccttccgcaactaccgtgatccccaagacacttttctcatcgagggcaggcaaaaagccagcgaagcgaatgaagtgcaagatcctactgttcaagacagaggatcgtccgccagtggcattcattacacggtgttcgagtaacctatgggcagagcatgagatagaatctatgctattcgatttccaagaaacattgtgtactatttattcgcgtaggcaacaattaccaaataagactgcatacataactatactgtgtatactctgtgaatacttagattgaatagaactgcgtggctgtggaggcttgcaactcgatctggcccatcttgaactgcaagcgctgcagccatttgagcagagcctccgacttgtacgtttgctgctcctcgtagtccggtgcatagtctcttacgttttgcaaccggacgtgcaaagtgtccgagagttgcgtctgtgacgagagtacggggctccacatgggtagcagtttgcccagcactgtggaattggtgtccttcaacgcctccaacagactaaggaagtgcagattgaccatctcggacagcttggagttagcactctgcgtctgaaagtccaggggggtctgcggctgatccttattgactgtcggcttggcgtgggacaccaattgcaagatgcagggcgtcacctttgcccagaactcaaaaagaacgcctaacgtgctgccctccgcattgctattggtattgtgggccatctgctccaagtacaccgtccacagttgacatagagtgaatgcatggaatagcgaggacatgtgcagcacggaggtcttggactgctccgcaaatccggcaaagatcacctgaatgtgatcggcgatgtggcaggaggcttcctgcggcaccggttgcgaataggtcactccttgatgctgataatgtacgctggctgcaggaccggtgccctgactattctgctgcggcaagggcgtaggaatgctatgtgtctcctggcgccgctgcatcagagccatgtgagtgagggagccaaggagcaaccaggacagcaggcgcatgtgacccacgcattctgtgaactccttgggtctaaataaacgtttatttgtgttattcaagggagatgttaatcctgatctggaacttacccttgctgaagggacgatggagcattgtttagccagggaagatagcgagaaacggctttgttgtcccttgagttaccacgcgacatttccagagccaagtattgggccaccgctcccttgaggactccgcccaaagtgtcttcgcccagtccactgcttgtctggccgttcttgaagttctattacaaaaaaaaattaataaataaacgataaatacttatatgaataaatcctaccttaatcttgctaagcgtgtggaaatcggccagaaaatcgatgacatcgttgatatactgcctcaaacaatccgcagaattggtggtcatcatgggtgccgcgtcaggcaagccgggagcagcacctggaggcagagttccgccagcatcaaggagcacaaaaccaataatcgtgagtagattgtggtccggaatattcgacttaaacttcagagcctggacgaactcgaagatcatttgacgacacagcaagttcttatcccgatccttgctaaacgatctaatgttcagagtgcacagctcgtatagcgtttgatattccagattggtatgctggacgcaataggccatgatcttggagtacggatcgagcagcgtctttggcacacaattgagcctcaaggtggccgccatgatgtccagcatgtactccgcattggtgagactgggcataatgacgattacttggcgaagaagcgactccatggcctgcatggcttgtgaccaaacggctaagcccacacccgcttccgtgggaacgcactggagattcaagtactcggccatgttgcggaaaatcaccggtagctgttcaatgggtaatgacttcttggaggtcagtgactcgcagaccatgtagatgggactggtggagttcaaatcctggaaatcctgtagcgctttggcaatgctgcggaaatggtgatgacggattttcacttaaaagagagaatattattaaataacttccttcatattagatcattgcttacttttcatttgagtttggaacacctgcaagaagattccgttgggtgctaactggtgaagcacgcatcggaagaactgacaggccaccgcctgggcactgctggccaaaggtggaccattctcgccttgccaggcatgggtgctacttaagcagatcctaaaatggaggcgaatgtaatctgagacttatgcatttactagtgattccactaaccgtgaagtcatggtgagaatctcgggcaggaatggtgctgccatggcaggttctcgatgaataaaggttcctaggattactatgaagatgccgatctcctcatccgtgtactcctcaatgtgggcaccgcagtcggagcagcgttccacgatggtgtaatctccaacacgacgagagctctgcgggattaaatatttataattaaataccccactgagtagttaaattaaaatgactcaccccacgtggagcatgaggggttgagtggattccatgcccattggaggcctctgcaccgatctcatcgtcatcatcgggttctggatccacgggctgaaatggaggcggtggccaggagccagcaaaccgagatcgaatatccggaatagcattgctgtccacattgaagggagccagtttttgacgaggacgcttgatactgttgctggtggtgagtccattaccttcgggggcattctgcttcagatcctgctgcacattcttgagaatagaggtgtgcaaatcggctgaaggttgcgacggaagctgagcatttggattcggcggagattccagggccacctgcttaataagccgtcggggagagttcgtcctactgctcggggtaacatcatccttggtgctctccgacacatcaaggctatcctgcttgagatgactgatgtccggcaggttgaggccatctctcacccgctccacaagggtggccaccgtgtcctgtgttccgatgggcagcagacgctccggagtgggaatctccaaggcagcaatgctcttgggtggcggcaagctttgcatgctctcatccatttcatccctcggatttggcatcacgctcatcttggacagcggtgagtccggcgagccgtagttcttatccgtgcgtctcagggatttggtttgcgatttcttttgccgcgaatcatccgccgaggagctcgagtttccggcactgcactccacaatcgtcttgtgtcgtccaatgggtttgctagcagctgccgaagatgatgcctggatagcagctggagcacttcctccactgccatttccgcttccgttggccgaacgactaccactaccgctgctggatgcggcttttctttccactgccgcaggcatgtcctgcaaagcgcccagcgcctttaggtgattagtggctatggcggcaaacatcttcgatgtggaggcggctgcattctccagggacttgttgcgcaccgtcacagcacgatggacatccactggtggactcacaattgccgtctctgtggtttccgcgcccaccaagggcgtgactatcatgcgaacaccctcctgcaaactgtgcctggtgtgggtggtcaccaaagtttcactggtagtggtggccttgattttggttgtgtacgtatcgccgaccttggtggtgatcatggacttgtgagactttgtggatttctgttttggataattctagctttagtatttagagaataacctgcaatgtaatcttctcacctcttcggtgtattcaagagctctacggttgcgtggcatgacgtcctcgaagtgtatggtatcatcaaaggaaccctgcaatataatatacatatgatttaaagtataatatattacaagactgataacaaaccggtgcactgctgccgtgtaaagtgctatctgagagatcgctttccggaatggctaccagttccgattccgtttcatctgcatcgaggctggagtcgttgtacttccggaacgcatgctgcaatttcggtgtgaaggccacattacccttgctcttggaagcggcactggttccctccgatggaaacatgggactggccggcggactggcctccttgtcatccggatccgtgccaagcgacggctggctgacatcgcgggatcgagcagcgccgcctacgccctggatgtccagaatggtggtggtcggtatgcgccggcactggtggaagtgaccacgcaagctgttcatgatcaagcggatcccagcgatgacatatccactgagtggaggctgagtgtacgagtacttgtagagcaccaccagcaaggtgaagagccagttgcgtcgcggatactgctccaggtgccacagggaatagttgaagactatgttctggtaggattcacccgaggtgctcgtcggatttggcgcatagagaatgatttgcatgacagagggcaggatgaggcccccaatcagatggttctggtccaaaacttgcggaagattggccaggaaagcattgaaaacggccgaaaccctaaagataaatatggatgttattcaccacagcattatcaactcaaaatatcaaatacctcagagattccggagtggtatggaaggtcttgtcgatttggttgtgaccgagcagtaggaacaggtgcttcagaacaatattctgggtcttggtcatcggtttctcctcagacggataagcctgatccgtgcgggacatgaactgcatcagcatgaagaccaacaggtgaatggtttcccgatctgactcctccagttctgtgattctcgaaaggagtccaatgaggttgtcatcgttcaagccgcccaatgaatggatatgaccatctacatgtgaatttagaggatagaaatatttcataatttagaatctctataaattgaatttggataaggggaagagggaaaaacaccaatatctttttgattttttttttttttttggtcacagccacatgccaattccacaattagattgatttttgcttatgttgatttaaaattttgtatgattcttgtataatatacagttatgtctctcgagtcgagtaagcgccaatttccattcaatttaaacttgacgagggaaattcaaaagtattgaaacagagacggttggaggtagaaagagtagagttttcttatgtagagtggaccgcgatagaattgttagcatacataccagttcgaagggggaacacacttaaacgacatttcttatgaaaagcagagtaacacacacaactagaacctcagctggataatacagatataacacccatatagaacatgtagaacagtgtgatgcagatagatcgatgtagaatggtcgatggcgatgctatagatgtgcttataggtagaacatgctcttatgtttgggatgacagggtatgtcttaaaaaaaactcatgcttcaattacagttcttaaattagtaaatcataattataatatatataaaaaccttaaaggagtgataatgtaaaaaagaaagcacgataaaacttataaaaacaaaatgttgttataatagaacctataaaatttataagatactgccaattcgaataaacataaaaatagtttcttaatcacagtacttctccgatcttggttgttctgaatgataatgcaaatggtgtttacacactgacaaagccaaagcaacaccgaaaatgggatacaccactcacgaggatgggtttcttaatattattatttactctatatatgcttaaaaataatattaaagtagttcttgtaaagtaacttaatatgtatatttgcgtgcactatagttggtgaaaccatgtctattaaataatttacactcgaaagtattataaaatactttggatagtaacttaaaaatctacggataagcaatgtttaaaactgcaaaaaaaaaattcaaaatatcaaaaataaataattcttttactgttgaatacacttccttgtgagtggtgtaggcattttgctagaacaccgatcatcagacgccaccgaggggagggtcacaattacaaaacgaactgacacaatggaacacacgtgctctagcacctacctgggttcgccgcgctgccggtggccgccgcacccgagacctgaggatgcggatgtggtgcggcatcacaggtgcagtgcatggggaaggccagagtcgaggggctgggactgggggccggcggcgggggcagcagattgggtgccgacggatgcttttggaagtgggagtgaaaagagtgatggggattcgggtttcccgcactgcctccggctgtgcccgttcctaccgccgctgcttcctggcccggatgaccaagggatccaccgaatgatccactcgctgcggcagcatcggcggccgcctgggaccggagcagtgtttccgcctcctgcagcgtgggcatcggactgtggtgactggggggcacacagtgcaccaggtactggtggctctggctgtgcgtcgagactagaccggccgaagtggtggcggtggtggctacgtgtgcactactaccggcatgatgatgcggatgatggtgtggatgggggtgagggtacggatggtggccatgtggatggtggtggtgggtgtgatagggaaaggccgtgtgcgctgactggtggacgggacaaggcggcggcttgggtcgcgaagagctcgctgccgttgtggccgggttaacggactggctgctgccagaagcccccccactactactgcccaggaactgacccagtccaaagcgcgaggtcttccgcttgagtataggcgctgagacctggcggctgtagatcttctccttctcgggaactgttttgaagggaggattagaaggcttgtgatgctcctattgatagagaactcaccgaacttgctatcctgtcttggagccatgctggccggagcggacatggtacgcttatagggccacttggtgccgaacgatgcgcttagcgtcttggccatgcctccactggtgtccgactggctgagtgcctctctcgccttttgaatcttagccgagagcgcctcgctgccgttgtccgagttccgcagatcacgaaggtacgagatgtcgccgcatttctccagattgatttgcgcctccacgaagagcgtgtcgaatcgattcaggaagaactcccagccgagcattttgcgatcggatagggagttgtgcaactggtagaccgactgcagcaccaccggacggtccacgatgaagagatcgaactgggactcaaggcagaagagcagcgaccgaattgccgtgtcatggattgtaccaatgtagagggtcgcccgctgcgccacgtacacattgatgtcgtccatgctggcgatcaggtggcaaaaggcggtggccagggccgtctgaagacccacctcggagcgcaggggagtggagtccatgaagcgggtaatcacggtaactcgctccactgccgtgaagcggacgcgccagtccgtgtcgtggaaagcctcctgcaccacgcgccaaaacacatccgatccgagtggcagcgtgatgcagtgcagcagcagcggcacgcccacctggcatatgtgagagtgctccgcgttgcagagctcccaaaggctggaaattatagattgttccatgggttactaacgcatattccctgaaaatcacttacttcttgatcagaaggttctcctggcaccagatgaagaagcctctctgctccctcgccgctttggccaaagcatcgccatgcaaagccatcgtgttcaggcactgaagaacatagtacaggatctccggcttcttgatggtaggtatttcctttgggaacaagaggattgtggctattaatacttgtttataacccgaaggagctttgaaggagttcttttaacaaagactatatcctaccgtgagcagttgatggatgtactgcagcggctggggcagcgtgtccagggtgaacttgaacttgcccacggaggtgtgccagaagtcgtcgctgtcctcttcctcctcgtcttcctcggatccgcttccgttctctccgccgccacaggcccctccgccattggcaccgttctcacccatgaccgaggccttggtcacgctgacattggcgctgcccacgtccgcgtcggaaagggttatagagcgggctatggcccggtctgtgggcaggatggaggccaggtcgagttgctctgaaactgtttctaccgtggccgtcatgatctgcatgagacaaaggatgttggattagcaaggaggcacagtgccatttactcgcaacaggtttacatcgtatatacacgtggtttacatggtgtgtacggtatgctacattcctttgacaacacatgtagacaaatgcaatgttcgggaagttttgacgtttcgtttacacttacatatccgtcttaagattcgtttaggtaacaagataatttacatcaagaacgatacatacacacgtaaaattgcataaattttgatacattttctgtgcattgctgtgattatagtaatattacatctcattttttattgattggtggtggggggaaggtaattaactgtgaaagtgctgtacattgaacatgctcttcaacaatgatccataaaacaaatgaattaagtgttaggtgaataaaattagcatggaacgcaatatttacatgttaaataagatatgtaaaatcgagattgacttaaagaaatgtacatttatataactcgttttttcgatttcttggtcgatttacgataatttgtaatttattttcacacacatacaagatactttgagacacagtagttgaataaaattattagaaaactagtaaagaaaaaaaagtaatgaggaatctatgactcggatcgcaatgctcttaactattaactattagttagtaaaaacgcttattttggagtattttctctaatagaaagtactttttcaggtttcgtgaataatgtcaaatctttaatttttatcagtataaatatctaaaaactttaaaataaattcaaattaattgtcactaatttagcttacgtttcgtcattgctcgaacctatttgtcatctataatgtctctaagtttaactttaaaaggatgtctgtatagtgcttgcaatattctaggactgcagtattcaaaaataaaaaaattctgaacgaaaagtttaatttttaaacaaaaataaaacttaaccaatatcgggaaaaacactctgtacatttatttacacttaacacgaagagtacgatttgttgactggacataaaaaactatagatattgaaaaacgagttgtacaattatcggatcgcatggatgtttaatagttgggcaaatgataaaacttaaatttgaaacaaagttgtataaattttgttggttgagttgtttgtcttttgattggtattttttttttttttttttaagaatgcacaaagtacctcgtctgtggcgtgaacttttctcaattcattactatcaactgaatgcccattttcgttattctataaaaaatatatgaagaaatgaaaacgtttgtataatcgttcgacaattatcgattttcaattttcgaaagtaaaacgttgaattggaatttgtgttaaggaaaacaaaagtgaatcgaatacagattatgtgtgtcgattaaatgaaataactcgaatgctcactttaacttagtattgctttttcttgctgtaattaattagtttgaatatttatagcaaatatataaaatatatatgtatatatatggggtgtttcaaaatacctacaatcaacgcataatattttaagttacatttcttattcttattcttttgtttttttttttttctttctttcttttgttttatttcgtttgtagtgtgtaagaaactttaaattcgagtatggtggtcgtcaattaaggagtgacaactgaagaacataatgtgtacggttggcattgcttatgatcgaaatacatacggaacagacgtggggcatgtggacgagcactccgccaacggagtgcggttctggttggggcacggccactggcacaggacctttttcaaagagaagtataaatggggattagaatcagatcggtacagattgtaaggcgagtccagctaaaaatgaaattcgcttagtggtcatacaacatacaactgtttggcattcacaaatcaaccatgcatacgtatagaaatcctacaagtgtcattcggatagttagaaaataagtgtatcgatgaaagaatctcatgcagggttttttttttttgagcaagtgatgtacattactgccaatcgtgtcgggtactacgcgtggattattcgtatccggttttgaaatatattcagaaccaacggaaggatttaaactaggcactcgtactgccaaccgaaaatcaaagatagtgtaaaattcgtgtggcttcagtgcatctgtggtgttggattaaaaactcgcagtttgtgtttcatttttgggaggaacactatagccgaaccgaaaggatatcgatcgatcgattgttgcataacagaactgaactctctaggggcgggcggtcaatctacggaggtcaactagatataattaaagcttggatattctaaatcatatactctagtaacgctaaacagagatagagagagtggtgtggcgtgtgtttgtggagacaaagttaagttggttagagtgatcgagcggaactattgttgtctttttctgttggttggtttgtttgagtgaagtaacgaaatgtttcaacaaatgcttcataatgtaatgtaaatttgttatttgtatttttgatttttgtttttttttttttttttgtaacgaatgaaaaattttcttgtggtgcatcacctgccattataataatttttccatcgtctgaaaagaattgatctagcttaaagatatctgataatgattgatagattttaaatttagtacggtattagttttgtagtatttcatgagtagatattagttgtagattatttttgggcatagacgagaagttttggagtgtgagagagacagacagtttcgtacgcgcggaagagggtgcgatcgagcgagagagagagagatagcgttagttatgttatttttgtacaggcagacgcggagtagaatatgttagagatagagagagagaaacaaatatacatatttatgtagagagagatagcaagatagacaaatagttatggcttaaaagataatgtacggatgagatcgggatgacggtaatgtaatttcacgaatgatcgtttagatggctgttaattcatactgctgagattgtttgatttagtctgaggattgtttatttgggtcaagttggtagttgtttacaaggcatagcagtgcaggtttctagttgtaggttgaaacaaagttcggtttgcgttttaacgtgggttttaggctaagttaggttgtttatagggacgctcgacgggcgagtcgccattccataccattcacccaaaaaattgtataatattttatatagaccaggctcaagtactgtctacatttagctactttttggtgacgtttcactgctttactgttacggtggttagtttatttataagtgggtaggttttgggttggttttggaaaagaaactttgttgggactttatagactttatgatacaacgggggttcgtttaagggtcttgaagtaaagggggaaatgcgttgaaaagcctggagcgtacctgcaaatcctcctaaaggtcccagcggaatgggtagtggagccatcgagagggaaacatctcgatcacgggtcttttccttgtcggattcgggtggagatttgcgcgaggacttttcttcctcaatgatgtcctcgatgggaacctggaagatcactcataagaaggttaagcttctagttaagacgacgatttacatctggtggccggactggattcaatggggccatgaactggaccaacttggtagctagctgatgccacatgatggatgcctcgcagtaagcacactctgccacctaataaattgatttattcgttaaattttatgggattaattgagttaaaacacgatttactcacctttaaggcgcagacatgactactgagacccactcgagctgcagtgaccatgcacttgatcagcctggagacgttctcgcagacactcgtatggatgcccatgtgctgctccacgtcctgtagttccatttgcttcagaagtatgtccagcatgaggatgcaacaggtgagattgtgctcagcatccgtggagaattccgtgtgacgattcgtgggcgcctcgtcatccgaaatggcagacgtattaccagagtcatcctcgacaacaggagctattgaaagaatgtattatacttagtgataaaatgttagtggaaggcatattcacaaatagagctacgcctgggcggattggccatatccgctttggtctccttgctctctttacacggggtcttgggagccttggccagggactgagattgggcatccttctcgcgcatcagctcgtgctggatgccgtatttcattatgcgaacaccatcgccgaacatggcgaacaactggaccagtggaatgagaatctccagcttggtgaggatctgcagccagtggagtgcctgctgctgcacctttgccgttgtcttctcaaatcgaatggccacaaagttgtacatggttttggcatcaaagcccagaggcgacatttccggatcgaggatcttgctgagcacaatcttcagctcgttcagttccttctcggccacgtcgttggtgatggcctccatccagtgcggcatcacatagtcccaaatttcggaagtgataacctcatatggcaccaggcatataagccgctgaagaccctctttcaagtggcttgttcgcgacgccaaggtctcccagtggcctccaacacgggcatactccgggggatgtggcagcaggcaggatatgaaaacgttgtagtgtatgcggcagatgtctttcagccagttgcaaacgtgatccactttgagcttctcaatggtactttccacttgtccggcagctgaaaacaaatgttgatggttgatggtaaaaataattcatcttaacataccatcgtatgagtaagcggttacatgaaaccagtggaagagcatgctcagaatcctgcccagaacttctacgggagtatctgcagtgggtgtacagcgacccaccagtagccagataccatagcgtcccagtctctggcgttcctccagagaaatattgtcagctgtgatgccggagccgttctttttggactcggacgacgaggactccttgccgggctcaaagtttagtggcttcgcctctcgcagaaggcttaccaccgactccaccatgtgcatctgcatctctggatccatctgccaggcgggctgcagactgcgatggaccacgtgatcgccacctcgccgggaattgtgcctattactgtggcactggctgcagtagcggatcggatggttgccattgaagctggcacactccgtggagaagcagatggagaaggcggacttctcgttggagcgacagttcttgttttcgcacaccatcgatacctgctgcatgggatgcagaatgtcgccgaactccaggcttccgtgctcccgatgaatctcgttggcgcactcgatgcacaggtaaaggggcggtggacaatcgggcgcgtatgcgatgctaatgctgtggtcgtagcacacctttgctgcctccgcattcccggagttcggacagtgctcccgttggcaggtgaagggcactaggtcatctattcgggattagaaggatgaggtaagataataggagtaatcatatgaaataaactcactggttagtttggagagtaggactttgcgatcgaacagattggcgttaaaggctggccagtagtagaagagcagcttggcagccgaggtgcgggaaacagcggttccgtatgccacaacgcagaggatgtccttgacgacattgtgcttaagagtcatcaggcactccaggagctggcaatgatgcgctggattgttggagtactggagcaccatcatgatgaccgaggacactgattggcaggcctgacattcctgttcgtcggagctgcgacgagctaaagattgaaaattaaaaattatcaaatagtttctttaaactagggaagtagtcactactcacttatagtaaaaggcaagatatagtagcatagagcattgatgatgcattggtgcaacgctggtggtagtactgatatagtagagcttacaagatagggtagattatcgataagatctttgtccagaaagggaaggatgcagcttaggcactgcaatagagcttttccgaacactgaaaataaaattaattagaatattatgagcattaagatgtcttaagctcaccgatttggccgtactggatgcaaggtgccacatcgatgagcattgtaagagcattgtagaggttgccatattcgagattgggataggcagacatgcgagtgggatcttcaagaggatcgcggataagctcgtgcggcgaagtgcgcacatccttaaggacagctgtaaatttaaagatatttccaataaattggtggcttagaaaatgctaacaaggccaaaataataggtaataatactatcaagagttgggactgagataattacataggttactctaacctctatagatacttacttagtagagtttgagaaaagtatttgatattgttagcaatatcgacgccagagggcgcaggcaagacgttgtgcagtagacgaacgtggtattcatgaagggctctcagttttgcctgaactgaaagcagaaaaaaaggtcctttgagcaccctagaaagttgagacttctgtggacaaacttacaggcggcagcgcgagtgcccatgttgatgagttgcaccttaaagctgccagtcattatatcagacaaatccttcgcattgccgaaactgctgccgagggacttcgcattctgcaattaggcaaaaaaggattgcattttgaaaacatttaacatttcacgcccagaattgcgtaatgtatcgcccagaaagatgctgccagtgaaaaagtgctcaagcgcacgaaatttcatagaaaactctgaattttcatacaatccggttgcgaaacgaacttaagttaatatttttggtcaacttacctcgaaattggttagttttttcaatagatttgcaattttttacgggttttacagcaagctacgaccacgaagaaaaatctctataactaaactgagtttatggtgtgtatctgtgcaagaatttcgctatctgttggacgccccttgaccccctccttaccaatttggcttttatacaggcttatacatacactttatcaagcggtttaagctagaatatatttcaaatatatttaattattaaataggctatgtgatttagtattttttggcttaaatgtaagggaatttgagggaattgaagttgtagggtaagttgacccacttttaccacccaccctcgacagcagcccccagaaacagctgttcggaagtaggacatgcgcatatcgcgtgtttatctcgcatttgccgcactcaccggtcggctttcaacaagtgcttgttttggtctagccaatgtaaatatttactattttcagtcgggtccggagtttgcgcagattgtgctcaatgttggtaaacatcgcccagctgtttatcctgatatgcaactggtgtgtttcagattttccaaagtactgacacgagataagaaaactactcattcttgagatatatctatatctacctctttggaactgagccaagaaatttgcactggtatactgatactgaaataaagtttaaaataaaactttctgcacccttattccttaatagcacaccttccaacaattaaatactcattacg

SEQ ID NO: 40895 - DNA, 8877 bp, DROSOPHILA
atgactggcagctttaaggtgcaactcatcaacatgggcactcgcgctgccgcctttcaggcaaaactgagagcccttcatgaataccacgttcgtctactgcacaacgtcttgcctgcgccctctggcgtcgatattgctaacaatatcaaatacttttctcaaactctactaactgtccttaaggatgtgcgcacttcgccgcacgagcttatccgcgatcctcttgaagatcccactcgcatgtctgcctatcccaatctcgaatatggcaacctctacaatgctcttacaatgctcatcgatgtggcaccttgcatccagtacggccaaatcgtgttcggaaaagctctattgcagtgcctaagctgcatccttccctttctggacaaagatcttatcgataatctaccctatcttgtaagctctactatatcagtactaccaccagcgttgcaccaatgcatcatcaatgctctatgctactatatcttgccttttactataactcgtcgcagctccgacgaacaggaatgtcaggcctgccaatcagtgtcctcggtcatcatgatggtgctccagtactccaacaatccagcgcatcattgccagctcctggagtgcctgatgactcttaagcacaatgtcgtcaaggacatcctctgcgttgtggcatacggaaccgctgtttcccgcacctcggctgccaagctgctcttctactactggccagcctttaacgccaatctgttcgatcgcaaagtcctactctccaaactaaccaatgacctagtgcccttcacctgccaacgggagcactgtccgaactccgggaatgcggaggcagcaaaggtgtgctacgaccacagcattagcatcgcatacgcgcccgattgtccaccgcccctttacctgtgcatcgagtgcgccaacgagattcatcgggagcacggaagcctggagttcggcgacattctgcatcccatgcagcaggtatcgatggtgtgcgaaaacaagaactgtcgctccaacgagaagtccgccttctccatctgcttctccacggagtgtgccagcttcaatggcaaccatccgatccgctactgcagccagtgccacagtaataggcacaattcccggcgaggtggcgatcacgtggtccatcgcagtctgcagcccgcctggcagatggatccagagatgcagatgcacatggtggagtcggtggtaagccttctgcgagaggcgaagccactaaactttgagcccggcaaggagtcctcgtcgtccgagtccaaaaagaacggctccggcatcacagctgacaatatttctctggaggaacgccagagactgggacgctatggtatctggctactggtgggtcgctgtacacccactgcagatactcccgtagaagttctgggcaggattctgagcatgctcttccactggtttcatgtaaccgcttactcatacgatgctgccggacaagtggaaagtaccattgagaagctcaaagtggatcacgtttgcaactggctgaaagacatctgccgcatacactacaacgttttcatatcctgcctgctgccacatcccccggagtatgcccgtgttggaggccactgggagaccttggcgtcgcgaacaagccacttgaaagagggtcttcagcggcttatatgcctggtgccatatgaggttatcacttccgaaatttgggactatgtgatgccgcactggatggaggccatcaccaacgacgtggccgagaaggaactgaacgagctgaagattacaacggcaaaggtgcagcagcaggcactccactggctgcagatcctcaccaagctggagattctcattccactggtccagttgttcgccatgttcggcgatggtgttcgcataatgaaatacggcatccagcacgagctgatgcgcgagaaggatgcccaatctcagtccctggccaaggctcccaagaccccgtgtaaagagagcaaggagaccaaagcggatatggccaatccgcccaggcgtagctctatttctcctgttgtcgaggatgactctggtaatacgtctgccatttcggatgacgaggcgcccacgaatcgtcacacggaattctccacggatgctgagcacaatctcacctgttgcatcctcatgctggacatacttctgaagcaaatggaactacaggacgtggagcagcacatgggcatccatacgagtgtctgcgagaacgtctccaggctgatcaagtgcatggtcactgcagctcgagtgggtctcagtagtcatgtctgcgccttaaaggtggcagagtgtgcttactgcgaggcatccatcatgtggcatcagctagctaccaagttggtccagttcatggccccattgaatccagtccggccaccagatgttcccatcgaggacatcattgaggaagaaaagtcctcgcgcaaatctccacccgaatccgacaaggaaaagacccgtgatcgagatgtttccctctcgatggctccactacccattccgctgggacctttaggaggatttgcaggtcctgtgccagtggccgtgccccaaccagaaccgcactccgttggcggagtgctcgtccacatgccccacgtctgttccatcatgacggccacggtagaaacagtttcagagcaactcgacctggcctccatcctgcccacagaccgggccatagcccgctctataaccctttccgacgcggacgtgggcagcgccaatgtcagcgtgaccaaggcctcggtcatgggtgagaacggtgccaatggcggaggggcctgtggcggcggagagaacggaagcggatccgaggaagacgaggaggaagaggacagcgacgacttctggcacacctccgtgggcaagttcaagttcaccctggacacgctgccccagccgctgcagtacatccatcaactgctcacggaaatacctaccatcaagaagccggagatcctgtactatgttcttcagtgcctgaacacgatggctttgcatggcgatgctttggccaaagcggcgagggagcagagaggcttcttcatctggtgccaggagaaccttctgatcaagaacctttgggagctctgcaacgcggagcactctcacatatgccaggtgggcgtgccgctgctgctgcactgcatcacgctgccactcggatcggatgtgttttggcgcgtggtgcaggaggctttccacgacacggactggcgcgtccgcttcacggcagtggagcgagttaccgtgattacccgcttcatggactccactcccctgcgctccgaggtgggtcttcagacggccctggccaccgccttttgccacctgatcgccagcatggacgacatcaatgtgtacgtggcgcagcgggcgaccctctacattggtacaatccatgacacggcaattcggtcgctgctcttctgccttgagtcccagttcgatctcttcatcgtggaccgtccggtggtgctgcagtcggtctaccagttgcacaactccctatccgatcgcaaaatgctcggctgggagttcttcctgaatcgattcgacacgctcttcgtggaggcgcaaatcaatctggagaaatgcggcgacatctcgtaccttcgtgatctgcggaactcggacaacggcagcgaggcgctctcggctaagattcaaaaggcgagagaggcactcagccagtcggacaccagtggaggcatggccaagacgctaagcgcatcgttcggcaccaagtggccctataagcgtaccatgtccgctccggccagcatggctccaagacaggatagcaagttcgttcccgagaaggagaagatctacagccgccaggtctcagcgcctatactcaagcggaagacctcgcgctttggactgggtcagttcctgggcagtagtagtgggggggcttctggcagcagccagtccgttaacccggccacaacggcagcgagctcttcgcgacccaagccgccgccttgtcccgtccaccagtcagcgcacacggcctttccctatcacacccaccaccaccatccacatggccaccatccgtaccctcacccccatccacaccatcatccgcatcatcatgccggtagtagtgcacacgtagccaccaccgccaccacttcggccggtctagtctcgacgcacagccagagccaccagtacctggtgcactgtgtgccccccagtcaccacagtccgatgcccacgctgcaggaggcggaaacactgctccggtcccaggcggccgccgatgctgccgcagcgagtggatcattcggtggatcccttggtcatccgggccaggaagcagcggcggtaggaacgggcacagccggaggcagtgcgggaaacccgaatccccatcactcttttcactcccacttccaaaagcatccgtcggcacccaatctgctgcccccgccgccggcccccagtcccagcccctcgactctggccttccccatgcactgcacctgtgatgccgcaccacatccgcatcctcaggtctcgggtgcggcggccaccggcagcgcggcgaacccagatggtcatatccattcattgggcggcttgaacgatgacaacctcattggactcctttcgagaatcacagaactggaggagtcagatcgggaaaccattcacctgttggtcttcatgctgatgcagttcatgtcccgcacggatcaggcttatccgtctgaggagaaaccgatgaccaagacccagaatattgttctgaagcacctgttcctactgctcggtcacaaccaaatcgacaagaccttccataccactccggaatctctgagggtttcggccgttttcaatgctttcctggccaatcttccgcaagttttggaccagaaccatctgattgggggcctcatcctgccctctgtcatgcaaatcattctctatgcgccaaatccgacgagcacctcgggtgaatcctaccagaacatagtcttcaactattccctgtggcacctggagcagtatccgcgacgcaactggctcttcaccttgctggtggtgctctacaagtactcgtacactcagcctccactcagtggatatgtcatcgctgggatccgcttgatcatgaacagcttgcgtggtcacttccaccagtgccggcgcataccgaccaccaccattctggacatccagggcgtaggcggcgctgctcgatcccgcgatgtcagccagccgtcgcttggcacggatccggatgacaaggaggccagtccgccggccagtcccatgtttccatcggagggaaccagtgccgcttccaagagcaagggtaatgtggccttcacaccgaaattgcagcatgcgttccggaagtacaacgactccagcctcgatgcagatgaaacggaatcggaactggtagccattccggaaagcgatctctcagatagcactttacacggcagcagtgcaccgggttcctttgatgataccatacacttcgaggacgtcatgccacgcaaccgtagagctcttgaatacaccgaagagaaatccacaaagtctcacaagtccatgatcaccaccaaggtcggcgatacgtacacaaccaaaatcaaggccaccactaccagtgaaactttggtgaccacccacaccaggcacagtttgcaggagggtgttcgcatgatagtcacgcccttggtgggcgcggaaaccacagagacggcaattgtgagtccaccagtggatgtccatcgtgctgtgacggtgcgcaacaagtccctggagaatgcagccgcctccacatcgaagatgtttgccgccatagccactaatcacctaaaggcgctgggcgctttgcaggacatgcctgcggcagtggaaagaaaagccgcatccagcagcggtagtggtagtcgttcggccaacggaagcggaaatggcagtggaggaagtgctccagctgctatccaggcatcatcttcggcagctgctagcaaacccattggacgacacaagacgattgtggagtgcagtgccggaaactcgagctcctcggcggatgattcgcggcaaaagaaatcgcaaaccaaatccctgagacgcacggataagaactacggctcgccggactcaccgctgtccaagatgagcgtgatgccaaatccgagggatgaaatggatgagagcatgcaaagcttgccgccacccaagagcattgctgccttggagattcccactccggagcgtctgctgcccatcggaacacaggacacggtggccacccttgtggagcgggtgagagatggcctcaacctgccggacatcagtcatctcaagcaggatagccttgatgtgtcggagagcaccaaggatgatgttaccccgagcagtaggacgaactctccccgacggcttattaagcaggtggccctggaatctccgccgaatccaaatgctcagcttccgtcgcaaccttcagccgatttgcacacctctattctcaagaatgtgcagcaggatctgaagcagaatgcccccgaaggtaatggactcaccaccagcaacagtatcaagcgtcctcgtcaaaaactggctcccttcaatgtggacagcaatgctattccggatattcgatctcggtttgctggctcctggccaccgcctccatttcagcccgtggatccagaacccgatgatgacgatgagatcggtgcagaggcctccaatgggcatggaatccactcaacccctcatgctccacgtgggagctctcgtcgtgttggagattacaccatcgtggaacgctgctccgactgcggtgcccacattgaggagtacacggatgaggagatcggcatcttcatagtaatcctaggaacctttattcatcgagaacctgccatggcagcaccattcctgcccgagattctcaccatgacttcacggatctgcttaagtagcacccatgcctggcaaggcgagaatggtccacctttggccagcagtgcccaggcggtggcctgtcagttcttccgatgcgtgcttcaccagttagcacccaacggaatcttcttgcaggtgttccaaactcaaatgaaaatgaaaatccgtcatcaccatttccgcagcattgccaaagcgctacaggatttccaggatttgaactccaccagtcccatctacatggtctgcgagtcactgacctccaagaagtcattacccattgaacagctaccggtgattttccgcaacatggccgagtacttgaatctccagtgcgttcccacggaagcgggtgtgggcttagccgtttggtcacaagccatgcaggccatggagtcgcttcttcgccaagtaatcgtcattatgcccagtctcaccaatgcggagtacatgctggacatcatggcggccaccttgaggctcaattgtgtgccaaagacgctgctcgatccgtactccaagatcatggcctattgcgtccagcataccaatctggaatatcaaacgctatacgagctgtgcactctgaacattagatcgtttagcaaggatcgggataagaacttgctgtgtcgtcaaatgatcttcgagttcgtccaggctctgaagtttaagtcgaatattccggaccacaatctactcacgattattggttttgtgctccttgatgctggcggaactctgcctccaggtgctgctcccggcttgcctgacgcggcacccatgatgaccaccaattctgcggattgtttgaggcagtatatcaacgatgtcatcgattttctggccgatttccacacgcttagcaagattaagaacttcaagaacggccagacaagcagtggactgggcgaagacactttgggcggagtcctcaagggagcggtggcccaatacttggctctggaaatgtcgcgtggtaactcaagggacaacaaagccgtttctcgctatcttccctggctaaacaatgctccatcgtcccttcagcaaggacccaaggagttcacagaatgcgtgggtcacatgcgcctgctgtcctggttgctccttggctccctcactcacatggctctgatgcagcggcgccaggagacacatagcattcctacgcccttgccgcagcagaatagtcagggcaccggtcctgcagccagcgtacattatcagcatcaaggagtgacctattcgcaaccggtgccgcaggaagcctcctgccacatcgccgatcacattcaggtgatctttgccggatttgcggagcagtccaagacctccgtgctgcacatgtcctcgctattccatgcattcactctatgtcaactgtggacggtgtacttggagcagatggcccacaataccaatagcaatgcggagggcagcacgttaggcgttctttttgagttctgggcaaaggtgacgccctgcatcttgcaattggtgtcccacgccaagccgacagtcaataaggatcagccgcagacccccctggactttcagacgcagagtgctaactccaagctgtccgagatggtcaatctgcacttccttagtctgttggaggcgttgaaggacaccaattccacagtgctgggcaaactgctacccatgtggagccccgtactctcgtcacagacgcaactctcggacactttgcacgtccggttgcaaaacgtaagagactatgcaccggactacgaggagcagcaaacgtacaagtcggaggctctgctcaaatggctgcagcgcttgcagttcaagatgggccagatcgagttgcaagcctccacagccacgcagttctattcaatctaa

SEQ ID NO: 40896 - protein, 2958 aa, DROSOPHILA
MTGSFKVQLINMGTRAAAFQAKLRALHEYHVRLLHNVLPAPSGVDIANNIKYFSQTLLTVLKDVRTSPHELIRDPLEDPTRMSAYPNLEYGNLYNALTMLIDVAPCIQYGQIVFGKALLQCLSCILPFLDKDLIDNLPYLVSSTISVLPPALHQCIINALCYYILPFTITRRSSDEQECQACQSVSSVIMMVLQYSNNPAHHCQLLECLMTLKHNVVKDILCVVAYGTAVSRTSAAKLLFYYWPAFNANLFDRKVLLSKLTNDLVPFTCQREHCPNSGNAEAAKVCYDHSISIAYAPDCPPPLYLCIECANEIHREHGSLEFGDILHPMQQVSMVCENKNCRSNEKSAFSICFSTECASFNGNHPIRYCSQCHSNRHNSRRGGDHVVHRSLQPAWQMDPEMQMHMVESVVSLLREAKPLNFEPGKESSSSESKKNGSGITADNISLEERQRLGRYGIWLLVGRCTPTADTPVEVLGRILSMLFHWFHVTAYSYDAAGQVESTIEKLKVDHVCNWLKDICRIHYNVFISCLLPHPPEYARVGGHWETLASRTSHLKEGLQRLICLVPYEVITSEIWDYVMPHWMEAITNDVAEKELNELKITTAKVQQQALHWLQILTKLEILIPLVQLFAMFGDGVRIMKYGIQHELMREKDAQSQSLAKAPKTPCKESKETKADMANPPRRSSISPVVEDDSGNTSAISDDEAPTNRHTEFSTDAEHNLTCCILMLDILLKQMELQDVEQHMGIHTSVCENVSRLIKCMVTAARVGLSSHVCALKVAECAYCEASIMWHQLATKLVQFMAPLNPVRPPDVPIEDIIEEEKSSRKSPPESDKEKTRDRDVSLSMAPLPIPLGPLGGFAGPVPVAVPQPEPHSVGGVLVHMPHVCSIMTATVETVSEQLDLASILPTDRAIARSITLSDADVGSANVSVTKASVMGENGANGGGACGGGENGSGSEEDEEEEDSDDFWHTSVGKFKFTLDTLPQPLQYIHQLLTEIPTIKKPEILYYVLQCLNTMALHGDALAKAAREQRGFFIWCQENLLIKNLWELCNAEHSHICQVGVPLLLHCITLPLGSDVFWRVVQEAFHDTDWRVRFTAVERVTVITRFMDSTPLRSEVGLQTALATAFCHLIASMDDINVYVAQRATLYIGTIHDTAIRSLLFCLESQFDLFIVDRPVVLQSVYQLHNSLSDRKMLGWEFFLNRFDTLFVEAQINLEKCGDISYLRDLRNSDNGSEALSAKIQKAREALSQSDTSGGMAKTLSASFGTKWPYKRTMSAPASMAPRQDSKFVPEKEKIYSRQVSAPILKRKTSRFGLGQFLGSSSGGASGSSQSVNPATTAASSSRPKPPPCPVHQSAHTAFPYHTHHHHPHGHHPYPHPHPHHHPHHHAGSSAHVATTATTSAGLVSTHSQSHQYLVHCVPPSHHSPMPTLQEAETLLRSQAAADAAAASGSFGGSLGHPGQEAAAVGTGTAGGSAGNPNPHHSFHSHFQKHPSAPNLLPPPPAPSPSPSTLAFPMHCTCDAAPHPHPQVSGAAATGSAANPDGHIHSLGGLNDDNLIGLLSRITELEESDRETIHLLVFMLMQFMSRTDQAYPSEEKPMTKTQNIVLKHLFLLLGHNQIDKTFHTTPESLRVSAVFNAFLANLPQVLDQNHLIGGLILPSVMQIILYAPNPTSTSGESYQNIVFNYSLWHLEQYPRRNWLFTLLVVLYKYSYTQPPLSGYVIAGIRLIMNSLRGHFHQCRRIPTTTILDIQGVGGAARSRDVSQPSLGTDPDDKEASPPASPMFPSEGTSAASKSKGNVAFTPKLQHAFRKYNDSSLDADETESELVAIPESDLSDSTLHGSSAPGSFDDTIHFEDVMPRNRRALEYTEEKSTKSHKSMITTKVGDTYTTKIKATTTSETLVTTHTRHSLQEGVRMIVTPLVGAETTETAIVSPPVDVHRAVTVRNKSLENAAASTSKMFAAIATNHLKALGALQDMPAAVERKAASSSGSGSRSANGSGNGSGGSAPAAIQASSSAAASKPIGRHKTIVECSAGNSSSSADDSRQKKSQTKSLRRTDKNYGSPDSPLSKMSVMPNPRDEMDESMQSLPPPKSIAALEIPTPERLLPIGTQDTVATLVERVRDGLNLPDISHLKQDSLDVSESTKDDVTPSSRTNSPRRLIKQVALESPPNPNAQLPSQPSADLHTSILKNVQQDLKQNAPEGNGLTTSNSIKRPRQKLAPFNVDSNAIPDIRSRFAGSWPPPPFQPVDPEPDDDDEIGAEASNGHGIHSTPHAPRGSSRRVGDYTIVERCSDCGAHIEEYTDEEIGIFIVILGTFIHREPAMAAPFLPEILTMTSRICLSSTHAWQGENGPPLASSAQAVACQFFRCVLHQLAPNGIFLQVFQTQMKMKIRHHHFRSIAKALQDFQDLNSTSPIYMVCESLTSKKSLPIEQLPVIFRNMAEYLNLQCVPTEAGVGLAVWSQAMQAMESLLRQVIVIMPSLTNAEYMLDIMAATLRLNCVPKTLLDPYSKIMAYCVQHTNLEYQTLYELCTLNIRSFSKDRDKNLLCRQMIFEFVQALKFKSNIPDHNLLTIIGFVLLDAGGTLPPGAAPGLPDAAPMMTTNSADCLRQYINDVIDFLADFHTLSKIKNFKNGQTSSGLGEDTLGGVLKGAVAQYLALEMSRGNSRDNKAVSRYLPWLNNAPSSLQQGPKEFTECVGHMRLLSWLLLGSLTHMALMQRRQETHSIPTPLPQQNSQGTGPAASVHYQHQGVTYSQPVPQEASCHIADHIQVIFAGFAEQSKTSVLHMSSLFHAFTLCQLWTVYLEQMAHNTNSNAEGSTLGVLFEFWAKVTPCILQLVSHAKPTVNKDQPQTPLDFQTQSANSKLSEMVNLHFLSLLEALKDTNSTVLGKLLPMWSPVLSSQTQLSDTLHVRLQNVRDYAPDYEEQQTYKSEALLKWLQRLQFKMGQIELQASTATQFYSI

SEQ ID NO: 40897 - DNA, 3506 bp, DROSOPHILA
cgacggcctccttggtgggcagggttttgaggataaccaccacatcggctacattgttgcccgtcagtatggtgcccttcttgaaggagccaacctgacgcacttcctccagttgctgtggaataatcagaacagtttaaacatgcaaatcacaaggagttgtgtaatgtactcacacaagttgtcagatccccgggtgcaaccaccagattgtcgagaacagcctgcaccttggtcactagattgccaatagccgtctgctcgctgggagtgggactcaggtcctggttacgcttcagcagcgcctgaaatgcaattgttttcccattgcagacaccttggatacgcaagtaatttattgatttaccgcagtcaaagcagaatcgtcaacggcgccggcggatggaactttgggaaagaagacctccgcgagggtcagatcgaaggggtggcgcggcacgaatgtctttttgaacggcggacgtatgccgccgcgcatggggcggccacctcggagagctccgcgaaccatattcctgtggggatgaatttttaataattttcgcaacgccggagcgttctgttttttttaacagataggtaaacagtgtgaccgaagctggaccggtaaggaaacgacatcaaagatgggctaagcgcgttttcaaagtataccgcataaaatatttttagagggcaaacattttgaacatttaaacattttactacattagaatgcataaattgattgaattaaaatacggagactggtgtttttaatctgcataattttgtagttgtagctagtgcaacaaggtttctatcagttccaggaaaacgctttgtttacaagcaaagtgctgatttttatgttgatggtcttacccttttgttgtacaaaattccggtgctaaaatcggattaaaagcgcatgaagttattcgtaagtagttgaaaatcgcactagagatgaatcctaatgtttatagttttcagaactatggatctggcgaacgtagatcaacgccccgtgaaggacgaaccacctcaagaagacactttcgaagaagaattaatcttcatttctaacagcgacttcgaagagcttgaaagcgaaataaagattgagaacttctgtagttatggcaaagatttggagccagttaaaggcgtcccgtcgaagctgaagacgtgtaaatccaaaatagcaaagaagcgccccttgcgaaagcaaacagatacgtttaagtgtacccaatgccaaaagacgtttacaagaaaggaaaacctcgaatcacacttgcgacttcacgcagaagaacgtccgttcgagtgttcccactgctccaagagctttggacgcaggacgcattacaagcgacacttgctcaaacacgaaaagcgacctcataagtgttcccactgctcaaaaacctttacccagaattcatcgcttaaacaacatctgcatgagcacacaggagagcgcccctttaagtgtacccagtgctcgacgtcgttcgcgcgaaaatctcatcttcaggtacacttacgtacgcatagtgaagaacgaccctttgagtgtacccattgcgaaaaggcatttaaaaacaattcacatctccaggaacacttgcgaacgcatcaggaggcacggccctttaagtgttcccactgctcaaagagttttaagctaagatcaattctacaaaagcacttgctgacgcacgccgaacgatcctttaagtgtacccagtgcccgaagacttttctgcagaatgatagtttgcaaattcatttgcgagtgcacgcgggcgaagacccgttcaagtgtccccattgctcagagacctttgcaaggaattcgagacttcaactacacttacttgagcacgctggaaaagagcccctgaagtgttcccagtgctcagccacctttgccatgaggtcactttatcgagtccacgtgcgtttgcatacaagagagcgacagtacaagtgcgccgaatgctcgaaatctttcttcaagaagtcacatcttgtggagcatcagcaagtgcatacgggagagcggccctttaagtgtacccactgtttcaaggacttcaaatgtcgtacgcatcttcgggtgcatatgcttgatcatattggagaaaaggtacccaagtgttcctactgctcgaaggagtttaaactaagctcgcaactgctggtgcacctgcaagagcatactggaaaaaaccaattcgagtgtccccactgctcgaagtcctatacaactagctcgactcttcacatgcatttgcgaacgcacacgggagaattgcccttcaagtgttcgcactgctcaaaattgtttgcgagaagcgcagaacaccaggaacacttgcgaacgcatacgggggaaaaaccctacaagtgttcacactgctcaacccgatacacacaaaagtccagtcttgggcgacacctgcggcgaaccctatgcggcactaaatcggattaaaaccaattagtttagaattaacttagaaataatgtaataagaagtaaagtaggcgaaaataaataaatgagtttaaatatttttttaagtttagaaatcggtagtgtgcccatttgtttagtccccctgatcgacctgtaccatatttggcattcagcattcggtcacactgccgcccaattgctgtgtcatttttgtttctgtgcgaaataagtcggctttttcattttacacatcaaatcactgcatttgcggcccaggaaatatggctaccgaacgatacagcttttcgttgaccacgttcaggtgagagcatcgctatagccggagcggagcattcgcttcgccccgcgcaacacaaactgccgccatgactgggcaataagtacaattttctaccgtttgcagtccttccggaaaactcgtccaactggagtatgcattggcggccgtatctggcggagctccctccgtgggcattataggttagcatgccgcacagccagtcagcctgtcagccagtactgtgcattcaactaacacactattatttatttttcttggctgtagcttccaacggcgtcgtcattgccacagagaacaaacacaagtcaccgctgtatgagcagcacagtgtacatcgcgtggagatgatctacaaccacatcggcatggtgtactcgggaatgggtccggactaccgcctgctggtcaagcaggcccgcaagatcgcccagacgtactacctgacctacaaggagccgattccagtgtcacagctggtgcagcgcgtggccacgctcatgcaggagtacactcagtccgggtaagtgtgcgcgcttttctcgactttgggttcccatagataatcgtatgcaatcccaccaacagtggcgttcgtccctttggcgtttccctactgatctgcggctgggacaatgatcgtccgtatctctaccaatccgatccttcgggcgcctacttcgcctggaaggccact

SEQ ID NO: 40898 - DNA, 1506 bp, DROSOPHILA
atggatctggcgaacgtagatcaacgccccgtgaaggacgaaccacctcaagaagacactttcgaagaagaattaatcttcatttctaacagcgacttcgaagagcttgaaagcgaaataaagattgagaacttctgtagttatggcaaagatttggagccagttaaaggcgtcccgtcgaagctgaagacgtgtaaatccaaaatagcaaagaagcgccccttgcgaaagcaaacagatacgtttaagtgtacccaatgccaaaagacgtttacaagaaaggaaaacctcgaatcacacttgcgacttcacgcagaagaacgtccgttcgagtgttcccactgctccaagagctttggacgcaggacgcattacaagcgacacttgctcaaacacgaaaagcgacctcataagtgttcccactgctcaaaaacctttacccagaattcatcgcttaaacaacatctgcatgagcacacaggagagcgcccctttaagtgtacccagtgctcgacgtcgttcgcgcgaaaatctcatcttcaggtacacttacgtacgcatagtgaagaacgaccctttgagtgtacccattgcgaaaaggcatttaaaaacaattcacatctccaggaacacttgcgaacgcatcaggaggcacggccctttaagtgttcccactgctcaaagagttttaagctaagatcaattctacaaaagcacttgctgacgcacgccgaacgatcctttaagtgtacccagtgcccgaagacttttctgcagaatgatagtttgcaaattcatttgcgagtgcacgcgggcgaagacccgttcaagtgtccccattgctcagagacctttgcaaggaattcgagacttcaactacacttacttgagcacgctggaaaagagcccctgaagtgttcccagtgctcagccacctttgccatgaggtcactttatcgagtccacgtgcgtttgcatacaagagagcgacagtacaagtgcgccgaatgctcgaaatctttcttcaagaagtcacatcttgtggagcatcagcaagtgcatacgggagagcggccctttaagtgtacccactgtttcaaggacttcaaatgtcgtacgcatcttcgggtgcatatgcttgatcatattggagaaaaggtacccaagtgttcctactgctcgaaggagtttaaactaagctcgcaactgctggtgcacctgcaagagcatactggaaaaaaccaattcgagtgtccccactgctcgaagtcctatacaactagctcgactcttcacatgcatttgcgaacgcacacgggagaattgcccttcaagtgttcgcactgctcaaaattgtttgcgagaagcgcagaacaccaggaacacttgcgaacgcatacgggggaaaaaccctacaagtgttcacactgctcaacccgatacacacaaaagtccagtcttgggcgacacctgcggcgaaccctatgcggcactaaatcggattaa

SEQ ID NO: 40899 - protein, 501 aa, DROSOPHILA
MDLANVDQRPVKDEPPQEDTFEEELIFISNSDFEELESEIKIENFCSYGKDLEPVKGVPSKLKTCKSKIAKKRPLRKQTDTFKCTQCQKTFTRKENLESHLRLHAEERPFECSHCSKSFGRRTHYKRHLLKHEKRPHKCSHCSKTFTQNSSLKQHLHEHTGERPFKCTQCSTSFARKSHLQVHLRTHSEERPFECTHCEKAFKNNSHLQEHLRTHQEARPFKCSHCSKSFKLRSILQKHLLTHAERSFKCTQCPKTFLQNDSLQIHLRVHAGEDPFKCPHCSETFARNSRLQLHLLEHAGKEPLKCSQCSATFAMRSLYRVHVRLHTRERQYKCAECSKSFFKKSHLVEHQQVHTGERPFKCTHCFKDFKCRTHLRVHMLDHIGEKVPKCSYCSKEFKLSSQLLVHLQEHTGKNQFECPHCSKSYTTSSTLHMHLRTHTGELPFKCSHCSKLFARSAEHQEHLRTHTGEKPYKCSHCSTRYTQKSSLGRHLRRTLCGTKSD

SEQ ID NO: 40900 - DNA, 2936 bp, DROSOPHILA
gaacttgataattcccatgccctggtagtcatcgtcgatgggtatgtttcgggcccacaccttgcagctgaagaaggtcttcgcattctcgggcatcttgttcatctggatggccaccacgcgcgtcactcctctcatgttctcggaggcctcgaaatatggacccggatagaagaccatttcgggcttgggcccattggtcacctcgcaggtgatccaaatcttgggcgtgttgcccagcttgcccacggtgtcctgaaggctcgctggcgcctccttgggcaagtcatctggcgtgtcgtaggtctccggcacatagccaataaccttgttcagcttgatgaagacggtcggcttttcggtggcgtagccccacgtagtgtcctggttgaaatcggcgaagaagtcaatggcattgtcgttcaatttgttcaggaaatcgtcgatgcggtccgcaatcggattgacctcactcatgatgtgcgtaaagtaggccagcacggatcgattctggttgggcaccatcgacagacccggcggacccttgagccagcgcggcttattcggatcaatgatggccagcataaagatgcccaaccaaaaggccacaatgcacacgattagggcgtatagtaccaggtagaagccagtgatacgcatccaacccagagctgtgcgtccgaacaatttgtgctcgtctatgtcgaatatcctcttcgaccacggcaggtccttcttgcgacgtgtctcctggttccggcgtatctgcttgaccagcttgtagtccccagcgggcaccattacgtcctccggcatcgtggcgatcgttccggttctgatttggctactggttacgtgggcgtaagtgggaaatattcgaagcttgtagcttcggttcactatgaaatctaaagcggagtaaactataattctcaaatagttttattattttgttaagtatttattaatacattaataaatccagctgagttagctgatctcactcgtaccactcgtccagcaccaatggagtggttggatgaactggtgccgtcagacgcaccagcatcttgaccgttaccatatggagcggtatgttcttagcccacgccttgcagtggatttggatgtcctcgttgatcggaatgttgctcaaccgaacactgatgatgcgcctgaggcggggatcctccttgtaagtaggtccgtcgtcgtccgaagactcgttgagaaagacattgccggaggtgaagagctcttcggcatcgaagaagcgaaccggatggtagtcgaactgaatgtccactcttggctcaataacctggcaggacacccagatgcggttgaagcgctcctccgagcccaggcccaccacatagtcgaatagctcatccggagcgtactcgggcagcgttagggcgtcatcgtaggttaccgcctggaagcccaatgcctgggtgatctttattagaatgcacggcgtgccggacatatagccccaactgtcgtctatgttacagcccatcaggcgcttcgggccttcgagaccgtatcgtttcaccgttcgcattatcgcgcgttgtatgttagccacatccttaatgttattagggctccacataatttgcttctgatcaccgacatggtgtccgggtgcggttgctagtccggggaactttttgcatcccggcctatccggatatatatgattcgcaatcatcacgagggccaatccggttgtgaatacgcccaaaacgaaaaagaatccgatgaagtagagcagcagtttgataaaacggcacacggtcatctcgggatccgcattgcgtgtgcgaatggaacgcctgtagaggtactccgccacacgcatatcacgacgccggcgaaggcgtcccaattcgtagggaccagaatagattatcgcgtcgttaggcatggaataataatatatgggtacttaattatatcttatggaaatatatgagggatttcagaaagctagcttggggtggattagaaatataggaatgtattccgcacagaaatcagaagcactaatgtatatttttgaataacgcgcctttttgtcgataacgataggcgttaagtgaactcctgtagccctttgcttcgtagcagcactaagtattttatcgcaaccacagcacggtcatactaagcttatgagcaaaataagtgagccaaaatgggcgataatgtgattcctgctccgcttagccgtatcccgggcaccagccaggcgaaggagaagcacagcaaggacctgaagacccttacctatccgcagctgctggagattaaggacaggcagtctcactttctgtcgttcaagtgagttttagtttccacctgtggagttccctgtgaatttatcttatttaattttatctctatttagaaagcgtttgcaccaactgccggacaagggaaagcgtctgcaggagtcgtacgacaaattactggccgagatcaggaggcgggatgaagtagaggaagcgactcgaatgttgagcggtctcaacattgtcgaaaagggcaaaattgctctcaacaatctggagtggaatggcagaaacacggacgagggcgcccatgtggacgacattctggacagcgatgatgaggtggagatggatccgctgcggattatagcgcagggaacaatgcacgagaagaaggtcaaggttttgcctccgccaacgagtttcattacggcagatgatctggcggatatcgaggagtttaagaaaccaaccgactccccagattccgccttggcaggacatagtgacaccagttcccttcctgccgagatcgtagaaatcgacgccagtcaagtggccgcaaagctgagcagggagctgcctcccgatcagcatgccctctacctcatcgataagacggaaacaaatgtg

SEQ ID NO: 40901 - DNA, 936 bp, DROSOPHILA
atgcctaacgacgcgataatctattctggtccctacgaattgggacgccttcgccggcgtcgtgatatgcgtgtggcggagtacctctacaggcgttccattcgcacacgcaatgcggatcccgagatgaccgtgtgccgttttatcaaactgctgctctacttcatcggattctttttcgttttgggcgtattcacaaccggattggccctcgtgatgattgcgaatcatatatatccggataggccgggatgcaaaaagttccccggactagcaaccgcacccggacaccatgtcggtgatcagaagcaaattatgtggagccctaataacattaaggatgtggctaacatacaacgcgcgataatgcgaacggtgaaacgatacggtctcgaaggcccgaagcgcctgatgggctgtaacatagacgacagttggggctatatgtccggcacgccgtgcattctaataaagatcacccaggcattgggcttccaggcggtaacctacgatgacgccctaacgctgcccgagtacgctccggatgagctattcgactatgtggtgggcctgggctcggaggagcgcttcaaccgcatctgggtgtcctgccaggttattgagccaagagtggacattcagttcgactaccatccggttcgcttcttcgatgccgaagagctcttcacctccggcaatgtctttctcaacgagtcttcggacgacgacggacctacttacaaggaggatccccgcctcaggcgcatcatcagtgttcggttgagcaacattccgatcaacgaggacatccaaatccactgcaaggcgtgggctaagaacataccgctccatatggtaacggtcaagatgctggtgcgtctgacggcaccagttcatccaaccactccattggtgctggacgagtggtacgagtga

SEQ ID NO: 40902 - protein, 311 aa, DROSOPHILA
MPNDAIIYSGPYELGRLRRRRDMRVAEYLYRRSIRTRNADPEMTVCRFIKLLLYFIGFFFVLGVFTTGLALVMIANHIYPDRPGCKKFPGLATAPGHHVGDQKQIMWSPNNIKDVANIQRAIMRTVKRYGLEGPKRLMGCNIDDSWGYMSGTPCILIKITQALGFQAVTYDDALTLPEYAPDELFDYVVGLGSEERFNRIWVSCQVIEPRVDIQFDYHPVRFFDAEELFTSGNVFLNESSDDDGPTYKEDPRLRRIISVRLSNIPINEDIQIHCKAWAKNIPLHMVTVKMLVRLTAPVHPTTPLVLDEWYE

SEQ ID NO: 40903 - DNA, 3215 bp, DROSOPHILA
cactgctcaaagagttttaagctaagatcaattctacaaaagcacttgctgacgcacgccgaacgatcctttaagtgtacccagtgcccgaagacttttctgcagaatgatagtttgcaaattcatttgcgagtgcacgcgggcgaagacccgttcaagtgtccccattgctcagagacctttgcaaggaattcgagacttcaactacacttacttgagcacgctggaaaagagcccctgaagtgttcccagtgctcagccacctttgccatgaggtcactttatcgagtccacgtgcgtttgcatacaagagagcgacagtacaagtgcgccgaatgctcgaaatctttcttcaagaagtcacatcttgtggagcatcagcaagtgcatacgggagagcggccctttaagtgtacccactgtttcaaggacttcaaatgtcgtacgcatcttcgggtgcatatgcttgatcatattggagaaaaggtacccaagtgttcctactgctcgaaggagtttaaactaagctcgcaactgctggtgcacctgcaagagcatactggaaaaaaccaattcgagtgtccccactgctcgaagtcctatacaactagctcgactcttcacatgcatttgcgaacgcacacgggagaattgcccttcaagtgttcgcactgctcaaaattgtttgcgagaagcgcagaacaccaggaacacttgcgaacgcatacgggggaaaaaccctacaagtgttcacactgctcaacccgatacacacaaaagtccagtcttgggcgacacctgcggcgaaccctatgcggcactaaatcggattaaaaccaattagtttagaattaacttagaaataatgtaataagaagtaaagtaggcgaaaataaataaatgagtttaaatatttttttaagtttagaaatcggtagtgtgcccatttgtttagtccccctgatcgacctgtaccatatttggcattcagcattcggtcacactgccgcccaattgctgtgtcatttttgtttctgtgcgaaataagtcggctttttcattttacacatcaaatcactgcatttgcggcccaggaaatatggctaccgaacgatacagcttttcgttgaccacgttcaggtgagagcatcgctatagccggagcggagcattcgcttcgccccgcgcaacacaaactgccgccatgactgggcaataagtacaattttctaccgtttgcagtccttccggaaaactcgtccaactggagtatgcattggcggccgtatctggcggagctccctccgtgggcattataggttagcatgccgcacagccagtcagcctgtcagccagtactgtgcattcaactaacacactattatttatttttcttggctgtagcttccaacggcgtcgtcattgccacagagaacaaacacaagtcaccgctgtatgagcagcacagtgtacatcgcgtggagatgatctacaaccacatcggcatggtgtactcgggaatgggtccggactaccgcctgctggtcaagcaggcccgcaagatcgcccagacgtactacctgacctacaaggagccgattccagtgtcacagctggtgcagcgcgtggccacgctcatgcaggagtacactcagtccgggtaagtgtgcgcgcttttctcgactttgggttcccatagataatcgtatgcaatcccaccaacagtggcgttcgtccctttggcgtttccctactgatctgcggctgggacaatgatcgtccgtatctctaccaatccgatccttcgggcgcctacttcgcctggaaggccactgccatgggcaagaacgcagtgaacggcaaaactttcctggagaagcggtaagtaccaataatagtacaccaattaaagtcgcaagtcactcatattttcatcaacctgcagctacagcgaagatctggagctggacgacgctgttcacaccgccatccttacgctgaaagaaggttttgagggaaaaatgactgccgacaacattgagatcggaatctgcgatcagaacggattccagcgtctggaccccgcctcaatcaaggactacttggccagcatcccctaaacttaaacgccccgctaagattaccacaagctaagctttcttaataagtacgggacattaaaaaaccaataaaattttacaactggtgttatttgatattcagatttttataaataagccctttgtggtaaattcacttcgctccgatggcctcaacgtatccggcacaagtctctgggtcaaaaacgaacagattacggtgtggcgcctccaatttagtaaccaccttgatgacctcttgtgccacaacgccgccgacaacagcgaccgctggcgagatctgtgcaaaaatcagacctagagcttcgtcgcccagtatagagttgggcagcagttcgtcgcgaattccgcgaagcaattccaggtcagcttctcgggtcttgtagctgggatcccgcttgtgggttgtgcggaacttttgcaggacacttaatagcaaaacacccgggccattgcgcttcaattttcgcaaataactaggctcggtaacatcgaaatcaagccaggcagagtagccgggataatccacatcacgctgcgttggaatggacacggtttcatacttctttttcttctccgaattggctacgaccttgtgcttaataacatccctggaaaaaaggtggacattaagttagcaatgggcaatggtaggtagggaacctactcgacgtagctgtgcttctgcagactggcaaagtagaacccgaaggtgccccacacatcggtggctatgaacttgacgcccaggtcccggcaaatggtgtcaatgcgcaacagttcctcgttggtcgcgccattgaccaccacaacgtcgaactgaccgaagaactcagaggtcttctccttcaagggctcgcggtcggcggagatgtccaccatgggattgagagcacgtgcccgtgtcaatgatgcttcggcccggttggtgttcagcgattcacgggggacaaggaattgtgaacaaaagtcctcctcggttacgtccttgtcatccagcagcttcacggagttcactccggacaggatgatgttcttggttatctcggcgcccaggccgcacagtccagcgatgagaatcttggccgtgcgaag

SEQ ID NO: 40904 - DNA, 899 bp, DROSOPHILA
acactgccgcccaattgctgtgtcatttttgtttctgtgcgaaataagtcggctttttcattttacacatcaaatcactgcatttgcggcccaggaaatatggctaccgaacgatacagcttttcgttgaccacgttcagtccttccggaaaactcgtccaactggagtatgcattggcggccgtatctggcggagctccctccgtgggcattatagcttccaacggcgtcgtcattgccacagagaacaaacacaagtcaccgctgtatgagcagcacagtgtacatcgcgtggagatgatctacaaccacatcggcatggtgtactcgggaatgggtccggactaccgcctgctggtcaagcaggcccgcaagatcgcccagacgtactacctgacctacaaggagccgattccagtgtcacagctggtgcagcgcgtggccacgctcatgcaggagtacactcagtccggtggcgttcgtccctttggcgtttccctactgatctgcggctgggacaatgatcgtccgtatctctaccaatccgatccttcgggcgcctacttcgcctggaaggccactgccatgggcaagaacgcagtgaacggcaaaactttcctggagaagcgctacagcgaagatctggagctggacgacgctgttcacaccgccatccttacgctgaaagaaggttttgagggaaaaatgactgccgacaacattgagatcggaatctgcgatcagaacggattccagcgtctggaccccgcctcaatcaaggactacttggccagcatcccctaaacttaaacgccccgctaagattaccacaagctaagctttcttaataagtacgggacattaaaaaaccaataaaattttacaactggtgttatttg

SEQ ID NO: 40905 - protein, 234 aa, DROSOPHILA
MATERYSFSLTTFSPSGKLVQLEYALAAVSGGAPSVGIIASNGVVIATENKHKSPLYEQHSVHRVEMIYNHIGMVYSGMGPDYRLLVKQARKIAQTYYLTYKEPIPVSQLVQRVATLMQEYTQSGGVRPFGVSLLICGWDNDRPYLYQSDPSGAYFAWKATAMGKNAVNGKTFLEKRYSEDLELDDAVHTAILTLKEGFEGKMTADNIEIGICDQNGFQRLDPASIKDYLASIP

SEQ ID NO: 40906 - DNA, 10724 bp, DROSOPHILA
gtttaattcaaggattcctcttgtttgggcatttcagatattggcagttatctagtgttgtttggtgtctttgaaaactgttcgaaaatggaataacaaataatcttgggcaattcccattacaatatgaagttgttattcttcgcagccagatggactgtaatgcaatcgtagatcacagctaactccactcgcaagcggttcataaatcattcaagctaacccatgaaaggcaactgtttgccaagtcaatccaggccaagaccccccagactctcctcgtattcgtggttatcttgggattggattgttatacattgactttttgaaatgcaaatcacatgcagaccacagatgcatagccaatgaatgcaaatagacaaagacctgcataggctcctatttacatacatgttctcagaaaatcacatattcaaactgctcctatctcccacctcttgccctcccctgcaggtcggatgtttgcgtttaactttttacattaactgtcatttggtttatttcacaatttacaaaatgcaacttaaacaatggtcttagacgtggtgctggccatgcgtggaggagagtgtcgtcaacagatgtcctttgtgttgttcggcatcctggttacattttacatacagtgcagtggaaggaacttaactaacttactgcggttgcaaccgtttctcgggttctttaatttgttgtcgtgtgctacactagtactaagctttgctgctgcggttgccgtacacttggtgttcgcttagtttgcctttgtttcagttgacgctgctgtggcttcacattgctttaattttgtttcattttgttttcatggtgttagtttatatcgtaaatttatttatgcaattttatctcaatttcattaatctgttttgctttgttttgcttttctttgccttttagttttgttttcttgttttgcctgatttttacatacacatattttgtttacaattttctactagacttaatcggcatccgcgcgcataccccgcacctcgcccacctgccgcgccttgtccagctcctccttcgtctggtcctcgatggcgcgaatgtcctccattgttagaccgtaccagcgatcggttgaacagaaaacttggctaaaaatagaaatgaaaagacgatcaataaggagtttccatccagggcatactaaaaaggtattcatgcatatcgaactttatagattttaagcagttcaaggatatacaatttcaagactattaccgatggaagtttgtaaagaggcgacgctccgatttctgtatgaaattctctactcttgtttgcaggccgaaccatttgaactcgcacgtgaccagcttgtagcaggtcatgacaggattaacatgctttttccagtcggatcccaccaggggaccgcggcccgtcttctttgactggtagctgaaaggatgatcgaaacgtaaatttctaattcacatcacattattcaatattaacgcttacgtggttggatcctcatcgggcttgtagtccgcgggcagcaccggatcgttggcaatgtcgatgtgcactatctctcgcactttcagcttatccggcgtcagctcgtgcacctgcaatatcgaagagccatggcgatatatcttagatccatacattttattaacttatcgaacacaaaaagcgtttactacatagacatgaacatggatcgatggcggataagaactacaaagccgaatcgagcagagacagcaaatgaaatacaaaacaaacgaaacttacgttgtcaacagtgccaaggtcattttctatgtgttgcgaataaatgtctattttaaagtttttatccatataaccaggattcttaatcgataaccaaaggattacaaaaccaaaccaaaaaagccaaacaaaatgatggtaggattttgacaaaatcatattgcaggatgatcgagttagtagttagttttcacaaataaatgtagggttgagatgtgatgatgttatggagagaaaagaagaaaacacacgttagtcatatcatgctgtggattcttgacttacattttctgaatcgcccgcatctccgacgtgcagagtgtcgatgattattttgaaagcatctttcataaacttggggttctagaaattcaatataatcacagtaatcatcaggttgcctcacattgcagtacattgctaatgctaaaccaattcatttgttgatttgtttctaacccccattttgttacaactattaaatttaagtgctctccccatttaccgtgataatcgttcgacaatagggataggcattccatgcctcctcgtggatctccaatgagcccttgggtgccaatagtcttatgtaggctggaacttttgattgcagatggtagatcttatatgtatattgaccggaattgtatttgccacctgtaggaatcgaaaaactctctgttagcccgcaactattcattaccaatcggtatttgcttacccagcaggggaaaatcttcgaagggttcgttttttaacacctcgatgccctcgccgccacccgtattctcctttgacgcctcggccaccgagaataattgtgcaacttgatactgtggagcagaaaaaaaaaggagttgggaaaattgttatcctcgtgacaaggggctttttgcccagttaactctcttacctcttccacagtcaatggcaaagtcacacggctgcaacgagaaaaaaaaatgaatatgtcagcgaatgtgtgtgtaaaggctacgtgattttaattaagtttaatataaccattttaattaaataccatgcctgtgcataaaaagctgttgatacctttcgcgctacttcgggtgtatggagtatatcgagtttagtacgaggcggaatatacaaattattagcaataaccagtgaaatgcaaccagttattattgctctatttaaaggagcggtattcagactacgttttagtagtaaatatgccagtgtcttttgtgcaaataaattaaatatgcattcagaaacaataaatgtcacccactcactacatgcaaatagtttagactgcatttcttttagtttacaacaggtgtacttaaatctcgatggtttttctgtttgtcaataaataatccgctttgtaataggaacgctttcctcttaaggccaactttgaattgtctgttccactttaagttctaagtagcaaggcacacaaattgcctcaaattacaagccctctactctggttttacattttctaaggcaatcaactcaagccccaaagtatgcagcacctattcaaacaaggaatcttgagactacttgcaagaatgaccatcggtaattttggctagagccaatcaatcgtggccaattgatacttgttgagataagatctcaggtaatttatatgagcacttaatacaaactgttgaaaaaggttaatatcactgcacgatttaaacgatatatttttaattaaaagcttacacgagtgggcggagcattggcattgaaaagaaacaaaaacaaagggtttccacagcataaaagcttcacaagcctttttgcattttatttgcatgcatatgagtttgaacacgccaaaccgaaaacccacccacttccgggccacatactcatcctctaattaccaaaaaggttgccaggcagcaaaagagtaggaaaaagcggcgaaaagtgttctgggacctccatatacataattatgccagccttgaaacttgtacgcatcgcttgacttttgttgcggttttggcggggacaatttaattgcaaaaaattaattttttacaacgaatatgaaatgctcttaaaggatggaaaaaagtctattaacttttatagctttgagtttagaaactttactttaatagaacaaaagaggattaaaacctgtaacctatattatcatcgctttataatctcctgccaatgtttccattttgagagttaatgacgcaaaaatgttctatgcattcccaaacttttttgatggttttttaatttttttttatagagaaatagttaggccaaagttctttaattttgatacagcaagcataaaactgtgatgagtgaaaaagaggagcataaaaacctctggtatttcgccttgatctctgggaatttacaacccgtagtcgcaatgttgaaatttagctacaaactgtaagccaaggaaagtcaacagtcaacggcttggcaaatgaaatattccccggcaaataaaggccaaattgctccccggtgcgagggaagccttggaatgcattcgcaaggtgcgaactggagctccttggccataaagaacctgaacctcgtgctggcccggctttatgggctgtcagccgttctcgcctccccacacataatacacataatacacggcaaatgccaaacaatgagacacaagaaaacacgacacgactcgagaacaatcaaagtgatgtggcgaaagtgggggaaattcgggcctttgcttgccggttgtcttgcagacgcaattaaccttttggcccactgttgacactcgtaatgatgtgtttcctaattgccagtcgactcgagcaactggtgggcgtggcagagggacagaaccaggcgctttaatgctgcctactcaaaagttggccaactacgcgccggccctgaaaaggttaaagttctaagagcactctttttatggcggtaggggatcaagttcaactttcggccgagttcatctggggggttattctccaaacaaggtggatgatttaggagtgtgtgcgtgtcgggggaatggggctccaaaaagttggaactataaagggacttagggagaggtagaacattgtattgcggtgtttaattgttaatgaagttattcggaactttacttaatcattgcataatcaagaggaacgatttgagctcttgtggtgtgtgtgtgttcaacgggttggaattaaagttttcgcttaagtcatttaaaacggaaattctaaggtaaattgcttatgctttgcatttttggtcaattaacaacagcccatctatacttatgtaaataaatgcctaagtaattccaaataaatattcgaaatggttaccatccaatttaattacccatttatgtgccaacgtatcatcaattcatttaattatgcaaacagtataacttttcttttcaacaaatttccacgcagcatttgtcgttcaatcaaatctgattgtaaaactttagcgcaaaaaattgcccataaaaattggtcttctgcacaaacttttcctgttccgcaaaaaaagaaagcatttcatttcttgaaaggcaaaaaaacttgctaaagcttaaaacccagaagagggaaaaccattagaggacaaaccagaacgtgtttttgtgacaaaatcgctgttccaataagtttagtggtaaataaatttccctgaaattgtcgaaacaacattcaactgggttgaacaacatcagcaaatgcgagagatcaaacgatatagtcgcgtttctccatggggtttttgggtttcctatgaatcacagcacaatcagagcattgaagaaattatgcaaatcaaaaatagaaacatacaacaaatccccacacatgaatggtggtagaggggggccaaaaagtacaaaagtacaaaagtaaagcaaaaacaagcgtctgagaatattgaagaactcttaatgagaccaaagttgccgaaagaaacactcgggagaccccttggcactcaaccctcttttgtggccatgaacaagggaaattgtttgctcttgttggcataattgaaaatggaaagtgattgtttggggctctgtggtcttcgcatcccaaagaggtggtgtgtgtgtgtgtgtgtggtgtgtggtgtgtgagttgtgtgggtgggtcgaggggaaagctagtggccaaggctcttgtggtggccattattgagcgacgcccactggccattgtcgcaattgaaggccgaagccaagtaataattgatttacccgcaataaagatgtcacacagagattgctcagtcgattgttcagtgaataaggcagcaacgagtcattcgagcttgaaattaaagcatttgtgctaaaccttcgtctaactaacaatacatataacaaaacgatattatccctgttaagcagtaggtgtttgcattaacataagtagatattctgatgtgtttataatttaagccatttacaagccataagtaattagctatctaaatagccaaaccatttatatactattcttaagcgtaactgataactgacaaagctcatatggaaatcaagtgaaattataatatggccatgcaccattgaagagaagttgttttttaaatcaaggccgcatttcgcggtttgcccccattcggataatagcatactatgtatctccatatttggagcccaattatgctggcgcttagtagccggcacgctcaattgccaaacattttcgaaacaaccgaagcccgaaacactcgaaacgtgtaatgagtacagtgccgatgtgaagtaaaacgacgcattgaagtcgaaagccaaacactgcgtgttatcttatcgcagtacataaaaaagcgcacaaatggcggaactaaattggagctcgtgccattttcaaattgattgctggctgggcgagcggggagggcgaagggagaactgtatctgacggatacatgtgtggtgtacaaagaggccaatcagtttggggcagtaaaagtcacgctacagctggtttatgacgagcaccataaaggaccgacattgaaaacaacaagcttttgctttcagagatcaaagttgagacggttgaaagttgaaaaaagaaacctgcactcacaccaactttattgtcgcaaaaacgtggcctatggacgagggtaaatgaatttgcttgatggttggccgtacagcaataagatcgatttcattaaattctaagaatatataatctatttgaaccattgtttatttatttaaactttccagccaattgctgatataatcacgtaaatatagttaacattattggcttgattccacaataaattctgtattctaaattcactagctatatttactatgtcaacaaataaagtgcagcactttaaacattttgtgaacaataaaacacaatttcagataaatcatgccaagtgcagactatcacaattcgttgttgttaccttttcagctgctttttattcatttggccactttgcccgccggccattcaaaattgtttatcagcctgcagcaacctgtgatgcggcacgcgttgcctttatttgcacctttgtttttcatttaatgacgatgctgaaatgttcattgccaaatggtttacacgccaacaggcggcagacgaaaaaaaatgcgaaaatctggcaggaaaaacattttgaaatgcaaatgctacgggcttcggattcgtgttgggattacggcgtcgagaacaattaaacattaatgcctctcgtgaagactgcccgtcaacttatgcgtatttaaataaataaaataaaaaaaattttattgtgcagtaaaatgcagttgccttaaatcttccatattctctgttaaaaatttcgagcaatacaaaacgttcccagaaatgtatattatttaaagaccggcagaagtatattttcacctatacttcatgagctttagtttactttttggtcgttgcacacttgaatacatatcgtacaccatatgataaatattaatgatataaatacattttatgggtaatctaaataggaattgtgtacatttctgtgaacgaacgctgtaatgaactaccaaatgccacggatttttcgctagcttttaaaaattttccattttaaaatttttccatatcatttcttctttatgattaatgatatacctatgtttttgttgcaataatattcttaaatgatatgtaattaaaaataagctatacaatacaagcttagcaacacaaaagtagaaatcgatttctgtgtactttaagccagaaaccgatcgtatgagaattaatagcttacaaaaccgatacacttaacacctatcagtaaaaggtgctgtttatatacaattgagtttccattataagattgatgcgaatgattgcgcatacgaaaaatgataagaccgagattgtgtgtttgagctttcagtttcaatctcctgtatgcaagccgctcggattttccttgattttccgacagctgtcaaagtcaaagcaattataagccgagccatttgatgtcagacttttgacaatttccgttaataaattaaaagtatcattgccaaaatgggaatgtgagggtggcaaacgtgagccatttgcaaatgagaagaatgtatgagaagaatgtcacctggtgctttgcgaccgaaaaggattaaagatgcacgatgagtcagtttagtggggttaacgcaacgaccttatcgcacttaacaacttgtttgattaaaatcgcagggcccaaagccgaaaagagagtaatgggaaaagagaggcgcaaaagagagtgactcactgaaaaagtcgacaacgtggcgtcgccgagcgcctaaaaagcattatctttacgtatatagtatagattatcgatgattcaaaggagtttccaaaactaattagcagtggcattggttataagaagtaagttttggcttacgtagctccaaaatgtgacttaaactcattacgtcatcgccacagctgcaaaatacctgagatagagcgagatggaaagagagggggtgtgcggaaaagggggcgtcagggggctgataagaaaacggttctgttgttgttgcggaaaatgcccgcaaacttaaatacaacaaaagcaactactgagagaactgagagagcagcaacacacgcgaccagagagaaatggagagagcgaatgtcacgaagagagtgtaaaatcgatttgtcacaaataatttgcggcttgcccagatttttttttgcgatttaaacatcaaataatcacaggtaaatggtaaaaacatacagttttgtactcacaattctttgatctgcatctttgccaattattatccggtattttcctgcttgattcgctgcgagagagtacaaaatacagaattagatttaatgcgaattcgctggcggatttcaactaaattgtagcatttattatttccaaatataaatgcacttgcactctacgcttaaccttcgcacgcactttctatatttaatttacatatatatctgccaataacactttggtgtttttgtttcgctgccaaatcgctgcgcccgcactttttgtttatgtttggccaagccaactttagtttagttagccaattgggattctaatgctttttctccaattgtcggctaaacgcacgagtcatatgcacacacacactctcttgcaaatacacacgcacacacagcgggcggaatatcaatagcaatttatgcgatttgccgctgatttattacttaagtgatgacgtacaactggggagtgcgattggcctggtatcgggatcggtacgcgtttgcaaatcggcggcagtaatatactagtaatgagtttgttatttagctactgcgtgtccggagcggagctaaagttcgatgttcgtgcaaaacacttcgattccgataggcggatgctatcgatttcggcgatgccccttggtcacacttggtggtgggcgctgcccgtcgccgactatcgatagcacaagcgggttatctaggtgtgcgcagcttgttagggtgactcatgctgttaaaattattataaaaagttaatgaatataatatagttataataaaattatatataaatctataagatcaaagatcatcagttatcatttatcatttgattatatgaaaaacaagaacagaaacaagatttaataggtttttgaaatgtgaaaatgtgggttacccccaattcttattcgaaattaaataacctaaagaacacctacacagataggtaatttgcacataagcaaattttgtctagaattccaaatggtaataatagtagtaatagattccaattcttataagcttggtggctccgtcatttcctccttcttggcatcatttcccattgcgtctagtgcgtccttctcatcctctggcggtggcggcaattctaatcctccgagcatactttctggtcgatttggagatggcggttcgggaacgagctcttcggattcgagatctatttcgcggggtgccttacgagtggagggcctttcgaaatccggattgccgtcatcatcggtgcgcatgctcagcgcgaacttgataattcccatgccctggtagtcatcgtcgatgggtatgtttcgggcccacaccttgcagctgaagaaggtcttcgcattctcgggcatcttgttcatctggatggccaccacgcgcgtcactcctctcatgttctcggaggcctcgaaatatggacccggatagaagaccatttcgggcttgggcccattggtcacctcgcaggtgatccaaatcttgggcgtgttgcccagcttgcccacggtgtcctgaaggctcgctggcgcctccttgggcaagtcatctggcgtgtcgtaggtctccggcacatagccaata

SEQ ID NO: 40907 - DNA, 994 bp, DROSOPHILA
ttttgcacgaacatcgaactttagctccgctccggacacgcagtagctaaataacaaactcattactagtatattactgccgccgatttgcaaacgcgtaccgatcccgataccaggccaatcgcactccccagttcgaatcaagcaggaaaataccggataataattggcaaagatgcagatcaaagaattccgtgtgactttgccattgactgtggaagagtatcaagttgcacaattattctcggtggccgaggcgtcaaaggagaatacgggtggcggcgagggcatcgaggtgttaaaaaacgaacccttcgaagattttcccctgctgggtggcaaatacaattccggtcaatatacatataagatctaccatctgcaatcaaaagttccagcctacataagactattggcacccaagggctcattggagatccacgaggaggcatggaatgcctatccctattgtcgaacgattatcacgaaccccaagtttatgaaagatgctttcaaaataatcatcgacactctgcacgtcggagatgcgggcgattcagaaaatgtgcacgagctgacgccggataagctgaaagtgcgagagatagtgcacatcgacattgccaacgatccggtgctgcccgcggactacaagcccgatgaggatccaaccacctaccagtcaaagaagacgggccgcggtcccctggtgggatccgactggaaaaagcatgttaatcctgtcatgacctgctacaagctggtcacgtgcgagttcaaatggttcggcctgcaaacaagagtagagaatttcatacagaaatcggagcgtcgcctctttacaaacttccatcgccaagttttctgttcaaccgatcgctggtacggtctaacaatggaggacattcgcgccatcgaggaccagacgaaggaggagctggacaaggcgcggcaggtgggcgaggtgcggggtatgcgcgcggatgccgattaa

SEQ ID NO: 40908 - protein, 272 aa, DROSOPHILA
MQIKEFRVTLPLTVEEYQVAQLFSVAEASKENTGGGEGIEVLKNEPFEDFPLLGGKYNSGQYTYKIYHLQSKVPAYIRLLAPKGSLEIHEEAWNAYPYCRTIITNPKFMKDAFKIIIDTLHVGDAGDSENVHELTPDKLKVREIVHIDIANDPVLPADYKPDEDPTTYQSKKTGRGPLVGSDWKKHVNPVMTCYKLVTCEFKWFGLQTRVENFIQKSERRLFTNFHRQVFCSTDRWYGLTMEDIRAIEDQTKEELDKARQVGEVRGMRADAD

SEQ ID NO: 40909 - DNA, 2719 bp, DROSOPHILA
ctgaccccactcactcccctctccaccgaagcttttacattcgaagatgtcacgcccactggaggcgttggcaggaagggtaccgcgagatacggactctttggaatgccgaagaacaataatcttacggttcctaacagtcgaccggcattgtccgggttaaaacgactatcggaatccactttgccccgtcgattttcacagaaatttatgcgcacgcgttccgtattttcgcccacaagtcaaagtacccttataaatggggagaccaggctactgggagaatctggagattcgaaactactgagaactaagagagaagacagaccaaagccggatatccgactgcagcaggaaacgcggctgaggcaggaggaatccaagttgaaaagtgcgcgaaagattaaagtggaggacccaagaagtcccactcccagtatccatcattcacgctataagccctgctccccggtggagcaccccactttgagtcctcgggtcaaatccctgctcgatcgcaccggaaacgcgcatctcacagagctgttcacgcgccaggagatcgacatcgaggtgctcatccaaatgaccctggaggacttggcggcactgggcgttcgcggcgcccgggagatccgattggccatgaatattatccaactggccaagcaattcttctgattttatatcctgtaggatttctgctaattttaaactgttttatgtcatgtggatttgaatttgtatgtgagattttaataaatgtttaatgtggtcttgaagtatttttgcgcggtgattggggcttgggattggaactctatttttaatttaatattcatttaacattaagtaataatttttctcagtgtatgaacttagctaaaaacattagtaaagtcacaaaccatagagtaagtcgcattaatccatgtctgaacggtatttattttagtatatttttgcggcacgctagtatgcttcaaaagtcgatccgcggtcacactgaacacgtgtttcgaacaaaaagccgtttaaacaaaatatccacgtttttatcaaaaaagcaatgggcaaagtgaaagtagagcgctccgaggatgccgatgagtccgttgtggccagcggcgatgttaccatcaaggaggaggagtcctacgacgacaagctgatctttgtgaacgccatcgcgaaaccgatggcaggtaaaaaactggccaaaaagtgctacaaactggtgaagaaggccatgaagcacaagactttcctgcgaaatggacttaaggatgtacagactcgcctgcgcaagggcgaaactgggtaagtgctgcgtgatccgtgactgcaagacaacaagaaatatacccacatcttctccagcatttgcatctttgctggcgacgttacacctgtggacatcatgtgccacttaccagccgtctgcgaggagaagggcatcccctatacctacacccccagtcgagcggatcttggagctgccatgggcgtgaagcgcggtacagtcgccctgctggtccgccagaacgaggagtacaaggatctgtacgacgaggtcaaggaggagctgtctgcactaaacatacccgtctagatctgtaggattagttccatcggctaattaagtacctagttaagttcaaaaagtaccaataaacttcggagaatgccgattcttttggcatcacgaaatcaatttgataaactcttgcatacgattttatagttttcgttgctatataaattataagagtctaggcagatggtgcttacatatatcctatagctgaataaacaatttttttttaactgccaaattaactattaacttgttccctcaataagccaagagatcctatatagtaagatatagtagttgttagttttgttaatagagatagtttcaaaactgctgatatggaaatggataattgcaagacagtaatttcgaaaccagttaagatggagtgacacagccggcaaaggaaaccaaaagtgcaagattttttttttgctgtcccttggggatcttttttgttttctcttttttttgggattttttataagtattttcagcgtagctggtttcatataaattgttttacatatacaatacagttgaaatggaggatttcgttaggcttctggtttctgaatctaaatctgtttcttttcattttctgttctcgtggtgctcgatgtgtggtgtttgctattattattattttttagttagttgctgtatgtgtgtggtgtctaaatttacatataatttaacactaaatgtgttcgtgtagcaatgcaatgtatgcaatgttatgtatttcctagaagatcgtttaacaaatgacatgagtggtgtggagagaggggggattattaaaagtacaatttcttgtttattaaatgtaatttttcgttcttttttgtttccgccttttagttggttgttatgcattacattggttaaataattacaattatataaagttaatatgtttacgctatccaagtcgctagccaaaatactacgataaaactcaaagattgattaaatactcttatcgaaaaattcttatatttttgtatgcttgcatttctccttcgtatgttttacatttaccagtcgtcaaatcggactaaacgatgagtgggggaggggtggggggattttgggttttataatttgaaaattgaaata

SEQ ID NO: 40910 - DNA, 659 bp, DROSOPHILA
tcacactgaacacgtgtttcgaacaaaaagccgtttaaacaaaatatccacgtttttatcaaaaaagcaatgggcaaagtgaaagtagagcgctccgaggatgccgatgagtccgttgtggccagcggcgatgttaccatcaaggaggaggagtcctacgacgacaagctgatctttgtgaacgccatcgcgaaaccgatggcaggtaaaaaactggccaaaaagtgctacaaactggtgaagaaggccatgaagcacaagactttcctgcgaaatggacttaaggatgtacagactcgcctgcgcaagggcgaaactggcatttgcatctttgctggcgacgttacacctgtggacatcatgtgccacttaccagccgtctgcgaggagaagggcatcccctatacctacacccccagtcgagcggatcttggagctgccatgggcgtgaagcgcggtacagtcgccctgctggtccgccagaacgaggagtacaaggatctgtacgacgaggtcaaggaggagctgtctgcactaaacatacccgtctagatctgtaggattagttccatcggctaattaagtacctagttaagttcaaaaagtaccaataaacttcggagaatgccgattcttttggcatcacgaaatcaatttga

SEQ ID NO: 40911 - protein, 160 aa, DROSOPHILA
MGKVKVERSEDADESVVASGDVTIKEEESYDDKLIFVNAIAKPMAGKKLAKKCYKLVKKAMKHKTFLRNGLKDVQTRLRKGETGICIFAGDVTPVDIMCHLPAVCEEKGIPYTYTPSRADLGAAMGVKRGTVALLVRQNEEYKDLYDEVKEELSALNIPV

SEQ ID NO: 40912 - DNA, 3872 bp, DROSOPHILA
agaatgtatggtaatgcaacagaaaaataaaaacaaaccgtggaactttagaggtggcagatattccgattggcagctcgatagtccaccgattaaaaccagaacaatggtcactctaaaactgattatccgtttttatccgaacaaaaacacataacagtacatttaaaaattgcacttttaaaaacttccctttgaaggaaacaaaaacggttttcatacattaattattttacatttaacacacaataaaaggaaaatttgttcgctaacattattatatgtaatttgtatattttaattgagcgatctcaaaaacgaatgcatacagaagtcttttcttttatttgtaggataaatacgtatagatcttaaatttcagtactgaactaaaaatattaactctttaagatgtatatatatatataactattttttcatacatttataagttgaagtttcgataatatttcaattattaaaaattggttatgctttcactttatttgaatttaacattccagatattatataaaaaatatattgaaaatttgtgtcacagccgatttcaatactgacttacgttgctaaaattcgattaatttacatatattctttattttatatgtacaactacattagtttgatagtatttctttaaaaataaatgacatgggactttactagccggtaataaactcaatgccgtaaaatatctccacattggcagataagataacttaactgaacaaatttatagataccaaacagacgcataaaattgaccaaatgaagacgaaaactagccaggcactggacttgaaaggacttttaaaacgattgactacgccgcttcccaggagctctgagcaagtgcgtctcgcaaagtaaaccaagaaaacggggataatgtattgaatgccagtgcctgcgtaggtgccagtaaatgccaccaaactggataaactttcagtgaaataggtgatacaaaaaggcggaattatggcgagcaaagggaagcacaggcgtaggataacgctataggattcatattgcgacatgtctaggaatagagattgaaggttgttcttcagcgttatggcaacaatgggaaaactggttgacagggtaaatatgggaaaaagtgcaaggaagtaatcaatgcaaatcaatagacctgaccaaaagtctacgtaggccacatcgtagggcaaaaaatctaatgtgtaaaggtcttcgattcgttcgaaggcaaaaatgcctgtcatggccagtagaatgtaaaatgcacaaatgattatgtagtcaatggatagaattttggaaaccattgacttgtgtctgatgggcgccagcaaactgggcagtgagtggtggcacatgaaggagtaaacacaggcgccgaaaagagagggaattccatatacattaaaggtcgctggatgacctttggcacctctggaaatcaaaagttttagcgatatgcagatcatcagggtaaaagctgaaataccacgttttaatatcttattagttgcacaaaattcgaagcttacccatccaccgaaaagcagcggtcagcatctgcaggtacttcgttttctgcacattaaagtacacaaatggaccaaagatcaatgtgaatcctatgagcaacaccctgtacatgttcaagcgagatatcgtgtgttccttccagcaggccagagatgtattgttctcaaagtctccgggccaatacatcaagttattagtatccgttccatttgtttggtcactgaaacaagacgatgaattaaattacattctcaaacgtatgagagaaaggttttcataactcggaaaacagtttccaaattagtttttgatccgatgtaagctgcgtgcggttctgagtacttaccatacgacgtcacgcagacttcttgccacggcggcggaatatatgctcagatccccgtaaagataaacaatcaggcagagatagaacattacgcggccaaactcattaaagaatagtgtcgccatttcgccaagttcgaatttgtgggacagctgatagtagtggaactcccggttttggatggtcagcggaacccgctcgaaatcgccaacttgctcggctcccgatgccagcgaaacatcatcagcattatcatcgttttcactgttttcggcggaactgcgactttggcgcagggcctgcagagtctgccaattcctgattgcattcgcacaagccattgcttctatgataaaagtgaccgtcatgtaactgatgatggccagcagaacaatgacgatcagggaaagcatccatcctgccctggcaaagactccgggtagcgtcagcgctccggttccaacgattagattgaaaatgaatatgaagccaacctgtggatagaaaaggaaattttaactcacggagcgacaggtgttcagattgtggaacgaaaataagtgcacacaacgcaaaaattgtgcaagtgggcgttatggagtagattcttatatttccactggcacacctatatgtacttaaggcgttttatacaaaaatataagcacaaatctttctgacttttgtaaaaatgcacatttgttgcgcaaacagcataacaaacatgcaacaaatgcatacaatcctttgttttggtgaaaggagtcgctggctccacacattgaagttcaacttaccagattcgagtacgtgggcgcggcttcgcggccattgacaaggcgaggcatctttacgctggttctttgtcttttcaccaggcttctatccaatccgattcaatcaaactcttaacaaaaagaaaacaataatagaacagatagtgcactcaatgcagtgtgcccaactgttttgacgaaatagagtatacacacaatttcctaacgccacagaattaattatttaaacacccaattggcgcgtaattttaaaagtatgtttgtacaccacaggagacgaattacttcatttaaagctaaaaacaattcgattttatttcaaaacagtaaatttgtcgtctaatatatacattgcacaacatgcgcgtgtgtagcgaataaaaggctaaactaaagctatccatgatcgactaggaaaggcttagaaattttactgcttcttgggaacttcagtgtcgttttgcctcttcttgcgattctccaatatacttgtgatgaagaactcgccggctttgtaggagctgcgcaccagcggtccactggctgtgtacaggaaacccagttcgttgccgcgctcttcccagtgcttgaacttctcgggcgtgacgtattcgatgaccttgaggtgcttattcgtgggctgcatgtactgacccagggtcacgcaatctacgccggcctcccgcagatccttcaaggtgttctcgatctcctcgtcggtctcgccaagtcccagcataattgaactcttggtgatgagattggggttgaatctcttcgcttcggttagcacttgcagggtctggcggtagtgggcgcgccggtcgcgcacatagggagtgagcttctcaaccgtctctatgttgtgcgcataaacatccagcccgctgttggcgatcgtcttcacacactccagatttcctcggaaatcaggtactaggcactccacaaagatgtttgagttgctagacataaagtatagattaggttcgaacaaatttaataatgaattcgtcttaccgcgccttaatttcgcgaacagtttcggcaatgtgctccgagccaccgtctggcaaatctatggtagtaaaggcattttaagctatggcaagtcaaaaaccactccagtacttaccatctcgatcaactgaggtcagaacaatgtaatccaa

SEQ ID NO: 40913 - DNA, 1252 bp, DROSOPHILA
aacagttgggcacactgcattgagtgcactatctgttctattattgttttctttttgttaagagtttgattgaatcggattggatagaagcctggtgaaaagacaaagaaccagcgtaaagatgcctcgccttgtcaatggccgcgaagccgcgcccacgtactcgaatctggttggcttcatattcattttcaatctaatcgttggaaccggagcgctgacgctacccggagtctttgccagggcaggatggatgctttccctgatcgtcattgttctgctggccatcatcagttacatgacggtcacttttatcatagaagcaatggcttgtgcgaatgcaatcaggaattggcagactctgcaggccctgcgccaaagtcgcagttccgccgaaaacagtgaaaacgatgataatgctgatgatgtttcgctggcatcgggagccgagcaagttggcgatttcgagcgggttccgctgaccatccaaaaccgggagttccactactatcagctgtcccacaaattcgaacttggcgaaatggcgacactattctttaatgagtttggccgcgtaatgttctatctctgcctgattgtttatctttacggggatctgagcatatattccgccgccgtggcaagaagtctgcgtgacgtcgtatgtgaccaaacaaatggaacggatactaataacttgatgtattggcccggagactttgagaacaatacatctctggcctgctggaaggaacacacgatatctcgcttgaacatgtacagggtgttgctcataggattcacattgatctttggtccatttgtgtactttaatgtgcagaaaacgaagtacctgcagatgctgaccgctgcttttcggtggatggcttttaccctgatgatctgcatatcgctaaaacttttgatttccagaggtgccaaaggtcatccagcgacctttaatgtatatggaattccctctcttttcggcgcctgtgtttactccttcatgtgccaccactcactgcccagtttgctggcgcccatcagacacaagtcaatggtttccaaaattctatccattgactacataatcatttgtgcattttacattctactggccatgacaggcatttttgccttcgaacgaatcgaagacctttacacattagattttttgccctacgatgtggcctacgtagacttttggtcagcgttatcctacgcctgtgcttccctttgctcgccataa

SEQ ID NO: 40914 - protein, 376 aa, DROSOPHILA
MPRLVNGREAAPTYSNLVGFIFIFNLIVGTGALTLPGVFARAGWMLSLIVIVLLAIISYMTVTFIIEAMACANAIRNWQTLQALRQSRSSAENSENDDNADDVSLASGAEQVGDFERVPLTIQNREFHYYQLSHKFELGEMATLFFNEFGRVMFYLCLIVYLYGDLSIYSAAVARSLRDVVCDQTNGTDTNNLMYWPGDFENNTSLACWKEHTISRLNMYRVLLIGFTLIFGPFVYFNVQKTKYLQMLTAAFRWMAFTLMICISLKLLISRGAKGHPATFNVYGIPSLFGACVYSFMCHHSLPSLLAPIRHKSMVSKILSIDYIIICAFYILLAMTGIFAFERIEDLYTLDFLPYDVAYVDFWSALSYACASLCSP

SEQ ID NO: 40915 - DNA, 3228 bp, DROSOPHILA
gtaatccgcttggccctatcaatgccctccagtgtgagctgcacggcatccaagtactgagctccgcacggcacagcaatgggccagagcacagcaccgatgtgattctgtcgcacctcgaagaggttgctgctgttcaggctcatggtgctcggtggcttccacgagccctcgatcagtggagactccgtcagcaggcggcggatgaaggcgagtcgggcctccaggagcgacgaagagcgcaactggagggccagcggaataccacccgccatggcaatgcacacgagcaccacaccaacgcccagcaaaatctttcgtcctcgtgatctctctggtctctccgcagaggactcgctgcaggagtccttcttggagctgtacgtggggatgcccccgttggagcacctaatcttttcatttccacctccgaacttggttatctccgcgggcagttcgatgtccgctatctccgtgaatacaaaacattgctgcttacagtgtggttgatgctggtgcagcggatgaacctccaggaactcgcggctcggtacgggattcattgcatcgtctggttcccaaactcttgcctacccgaggtttcctaccgtagattgtgattcaattcaacaagcttgcactgcgacgaaagctcgaaactgggatactatcgatttttcctgtgtgtcctgttcagtgttcacattttactcacaaggacatgcgcgctggatagttattttgtttagtatggcagcatcccagcgtgagcgggataaaagtgttttaaacatgtaatattcggtataaattgttgttttttaatatagttaaaccctttcttcttttaaccaaacaaacatttttgggcttaaaagatttgtaagcgactcaatgtttaattaataacgtcttagatctatttgtaaaagctacattttaattttaatgattaattactcgcattaaccgactgacgtttatagtgtttgatatttaactacttcttgtgcgcctctatgacgattttcatcagcttgtgtggaggtaaagattccaagaggcacagcagctggatctgattggtgatgcagttggagctcagggcgatttgcactgcttgggcgaagcgttccatgcacttctgatatgcggcatccgcttggggatcggtttttgattccgccagccgtgcgcagtagctctgcagggatttcacgatctgcataagatcttgactgggcagcgctgtcgattccccactgctgacaagctgttgcagagcacgcaggagggatagatgcaaattgctataggcggaacggttggagaccaacggcgccaggaccacccatcgaagcaggcctgctaggggagtggtaaagggcatggctatggctccggcgggcaggaccaaaggctgctgcgaggcctgacacaaagtgggattctccatcatccattcggttatggtgtccagcagagcatctggcggtggattcaatgtcggcgaacgctgctcattgaggtacagatccgccacggcgaccataaagttggccgcaaagtgcggacccaccatgggcagctgcttgagttgctcgggggttttccgggagtacgagataaagtcgctgactatattttgggccacttccaggctgagtggcgtcttgcaccccacctgttgcatccatgtgccggcagaggagagcagcggggccacggagccggaaactgctgtgctgatcagccgggacaacaacttggatcgctgcggtgtcaagtggcttccgaagagcgacaggaatatggcgttgcgggtggcatctcttcctggtcgcgaaaagtactcaatcagcgctatgatcagctggaactcctggaacagattcatttggctaatgggcagcgcctgcgactttcgcacgtcgccatccttcggggttctttccaggaatatgaactccgatataatttgcatcaccatgttttgcttgttcctgctggcaatcaatgtttctgcaaaattaaagcgtaagaaatgcttgggatttaaaataagcaactttacccagtcgcgtaagtgcctccaccgcacaagttggataattatccagcttcatatcgcccttccgtagcaagagcttattgctgtctatcgacatcgacatcctctagtcctttatcttgtacaaagcagtgacaggtttttaagaatgtatggtaatgcaacagaaaaataaaaacaaaccgtggaactttagaggtggcagatattccgattggcagctcgatagtccaccgattaaaaccagaacaatggtcactctaaaactgattatccgtttttatccgaacaaaaacacataacagtacatttaaaaattgcacttttaaaaacttccctttgaaggaaacaaaaacggttttcatacattaattattttacatttaacacacaataaaaggaaaatttgttcgctaacattattatatgtaatttgtatattttaattgagcgatctcaaaaacgaatgcatacagaagtcttttcttttatttgtaggataaatacgtatagatcttaaatttcagtactgaactaaaaatattaactctttaagatgtatatatatatataactattttttcatacatttataagttgaagtttcgataatatttcaattattaaaaattggttatgctttcactttatttgaatttaacattccagatattatataaaaaatatattgaaaatttgtgtcacagccgatttcaatactgacttacgttgctaaaattcgattaatttacatatattctttattttatatgtacaactacattagtttgatagtatttctttaaaaataaatgacatgggactttactagccggtaataaactcaatgccgtaaaatatctccacattggcagataagataacttaactgaacaaatttatagataccaaacagacgcataaaattgaccaaatgaagacgaaaactagccaggcactggacttgaaaggacttttaaaacgattgactacgccgcttcccaggagctctgagcaagtgcgtctcgcaaagtaaaccaagaaaacggggataatgtattgaatgccagtgcctgcgtaggtgccagtaaatgccaccaaactggataaactttcagtgaaataggtgatacaaaaaggcggaattatggcgagca

SEQ ID NO: 40916 - DNA, 1176 bp, DROSOPHILA
accatacattcttaaaaacctgtcactgctttgtacaagataaaggactagaggatgtcgatgtcgatagacagcaataagctcttgctacggaagggcgatatgaagctggataattatccaacttgtgcggtggaggcacttacgcgactggaaacattgattgccagcaggaacaagcaaaacatggtgatgcaaattatatcggagttcatattcctggaaagaaccccgaaggatggcgacgtgcgaaagtcgcaggcgctgcccattagccaaatgaatctgttccaggagttccagctgatcatagcgctgattgagtacttttcgcgaccaggaagagatgccacccgcaacgccatattcctgtcgctcttcggaagccacttgacaccgcagcgatccaagttgttgtcccggctgatcagcacagcagtttccggctccgtggccccgctgctctcctctgccggcacatggatgcaacaggtggggtgcaagacgccactcagcctggaagtggcccaaaatatagtcagcgactttatctcgtactcccggaaaacccccgagcaactcaagcagctgcccatggtgggtccgcactttgcggccaactttatggtcgccgtggcggatctgtacctcaatgagcagcgttcgccgacattgaatccaccgccagatgctctgctggacaccataaccgaatggatgatggagaatcccactttgtgtcaggcctcgcagcagcctttggtcctgcccgccggagccatagccatgccctttaccactcccctagcaggcctgcttcgatgggtggtcctggcgccgttggtctccaaccgttccgcctatagcaatttgcatctatccctcctgcgtgctctgcaacagcttgtcagcagtggggaatcgacagcgctgcccagtcaagatcttatgcagatcgtgaaatccctgcagagctactgcgcacggctggcggaatcaaaaaccgatccccaagcggatgccgcatatcagaagtgcatggaacgcttcgcccaagcagtgcaaatcgccctgagctccaactgcatcaccaatcagatccagctgctgtgcctcttggaatctttacctccacacaagctgatgaaaatcgtcatagaggcgcacaagaagtag

SEQ ID NO: 40917 - protein, 373 aa, DROSOPHILA
MSMSIDSNKLLLRKGDMKLDNYPTCAVEALTRLETLIASRNKQNMVMQIISEFIFLERTPKDGDVRKSQALPISQMNLFQEFQLIIALIEYFSRPGRDATRNAIFLSLFGSHLTPQRSKLLSRLISTAVSGSVAPLLSSAGTWMQQVGCKTPLSLEVAQNIVSDFISYSRKTPEQLKQLPMVGPHFAANFMVAVADLYLNEQRSPTLNPPPDALLDTITEWMMENPTLCQASQQPLVLPAGAIAMPFTTPLAGLLRWVVLAPLVSNRSAYSNLHLSLLRALQQLVSSGESTALPSQDLMQIVKSLQSYCARLAESKTDPQADAAYQKCMERFAQAVQIALSSNCITNQIQLLCLLESLPPHKLMKIVIEAHKK

SEQ ID NO: 40918 - DNA, 2853 bp, DROSOPHILA
ttttcaataaatacattaatttgcacagcaaacgactattgaagtaataaattactgtgcaaattttataacaaaatgtaaaattttttatgttttatggttaggcattttcataaaaaaaattgtcaatttttactccaagtgctctttatgaatattgtcattattgcacgcaagaattgtgaattttcggcgtcattaaattaacttaattgattattttcgttaaattaatttgcacgttttgtgcaacaattgtttacattttatcggttcatctgttgactgccaattcgcaaaaaaaagatttgtcgcaaaaacttcgacgcaaaaaccgaagcaaatcaaatcaaatcgcaccgcaaaagtaacgactgaaaaactggacaaactcgctttaattagaagcaaaataatattatgtagacggtataaaaacgatatttggtacttagacatgtgaaatggtaaatattaatgcgtggcgagttccttgaacttttattctaatttatttatttcacccaaatcacgagggtaaagtcagagatttaacaatagcaaaaaaacatggatatgaatattctaatgtgccagattaacgtttattcttaatcaattataaacaggcacaaaaaccttaacagaaacaaaacacatttttatatagtttctaaactctcgagttttttatgaattatttttactattgtagtttacaattagttattaggcataattcttatatcatatttttaagcactttgtgatagttgtgactgttgttgaaatttattttcttgaaaagaaatatacatattgtaatttagatcttaaaaactcattatatgatctatttttaaggatcgtttttcagcactgatcatggttctatgactaggattttatgagttgcctgatcacagaattttcggtaattttaaccgctcttaatgcggtcgcattaaaaaagcagttaattacagttagttgcattttgcaaatcttattgcacgtttttttttgtcgtcttttttgtgctcgtggaaaatattatttgtaaaattaccgaatggagcgctacaatcgcgtctatagaggtagtattgctaatacttttgtaaacaagtttaaaatatatcctttaactttcaatagatcccgcatccccactgaccccactcactcccctctccaccgaagcttttacattcgaagatgtcacgcccactggaggcgttggcaggaagggtaccgcgagatacggactctttggaatgccgaagaacaataatcttacggttcctaacagtcgaccggcattgtccgggttaaaacgactatcggaatccactttgccccgtcgattttcacagaaatttatgcgcacgcgttccgtattttcgcccacaagtcaaagtacccttataaatggggagaccaggctactgggagaatctggagattcgaaactactgagaactaagagagaagacagaccaaagccggatatccgactgcagcaggaaacgcggctgaggcaggaggaatccaagttgaaaagtgcgcgaaagattaaagtggaggacccaagaagtcccactcccagtatccatcattcacgctataagccctgctccccggtggagcaccccactttgagtcctcgggtcaaatccctgctcgatcgcaccggaaacgcgcatctcacagagctgttcacgcgccaggagatcgacatcgaggtgctcatccaaatgaccctggaggacttggcggcactgggcgttcgcggcgcccgggagatccgattggccatgaatattatccaactggccaagcaattcttctgattttatatcctgtaggatttctgctaattttaaactgttttatgtcatgtggatttgaatttgtatgtgagattttaataaatgtttaatgtggtcttgaagtatttttgcgcggtgattggggcttgggattggaactctatttttaatttaatattcatttaacattaagtaataatttttctcagtgtatgaacttagctaaaaacattagtaaagtcacaaaccatagagtaagtcgcattaatccatgtctgaacggtatttattttagtatatttttgcggcacgctagtatgcttcaaaagtcgatccgcggtcacactgaacacgtgtttcgaacaaaaagccgtttaaacaaaatatccacgtttttatcaaaaaagcaatgggcaaagtgaaagtagagcgctccgaggatgccgatgagtccgttgtggccagcggcgatgttaccatcaaggaggaggagtcctacgacgacaagctgatctttgtgaacgccatcgcgaaaccgatggcaggtaaaaaactggccaaaaagtgctacaaactggtgaagaaggccatgaagcacaagactttcctgcgaaatggacttaaggatgtacagactcgcctgcgcaagggcgaaactgggtaagtgctgcgtgatccgtgactgcaagacaacaagaaatatacccacatcttctccagcatttgcatctttgctggcgacgttacacctgtggacatcatgtgccacttaccagccgtctgcgaggagaagggcatcccctatacctacacccccagtcgagcggatcttggagctgccatgggcgtgaagcgcggtacagtcgccctgctggtccgccagaacgaggagtacaaggatctgtacgacgaggtcaaggaggagctgtctgcactaaacatacccgtctagatctgtaggattagttccatcggctaattaagtacctagttaagttcaaaaagtaccaataaacttcgg

SEQ ID NO: 40919 - DNA, 795 bp, DROSOPHILA
caaatcttattgcacgtttttttttgtcgtcttttttgtgctcgtggaaaatattatttgtaaaattaccgaatggagcgctacaatcgcgtctatagagatcccgcatccccactgaccccactcactcccctctccaccgaagcttttacattcgaagatgtcacgcccactggaggcgttggcaggaagggtaccgcgagatacggactctttggaatgccgaagaacaataatcttacggttcctaacagtcgaccggcattgtccgggttaaaacgactatcggaatccactttgccccgtcgattttcacagaaatttatgcgcacgcgttccgtattttcgcccacaagtcaaagtacccttataaatggggagaccaggctactgggagaatctggagattcgaaactactgagaactaagagagaagacagaccaaagccggatatccgactgcagcaggaaacgcggctgaggcaggaggaatccaagttgaaaagtgcgcgaaagattaaagtggaggacccaagaagtcccactcccagtatccatcattcacgctataagccctgctccccggtggagcaccccactttgagtcctcgggtcaaatccctgctcgatcgcaccggaaacgcgcatctcacagagctgttcacgcgccaggagatcgacatcgaggtgctcatccaaatgaccctggaggacttggcggcactgggcgttcgcggcgcccgggagatccgattggccatgaatattatccaactggccaagcaattcttctga

SEQ ID NO: 40920 - protein, 240 aa, DROSOPHILA
MERYNRVYRDPASPLTPLTPLSTEAFTFEDVTPTGGVGRKGTARYGLFGMPKNNNLTVPNSRPALSGLKRLSESTLPRRFSQKFMRTRSVFSPTSQSTLINGETRLLGESGDSKLLRTKREDRPKPDIRLQQETRLRQEESKLKSARKIKVEDPRSPTPSIHHSRYKPCSPVEHPTLSPRVKSLLDRTGNAHLTELFTRQEIDIEVLIQMTLEDLAALGVRGAREIRLAMNIIQLAKQFF

SEQ ID NO: 40921 - DNA, 3541 bp, DROSOPHILA
agattgtcaaccatctacatacacgcctccagtaactaaaacgcctatcaccacgcccaaaccccgttgctatccgggctccagtgatccatcttgccagcccgctacttatcttccaccaacaactgctagcaggtgctatcctggttccagcgatcctaaatgtcaacccgccacctatgctcctccctcgaccagagctcctttaactacttccaggcccaattgttacccgggatccacggataggcgctgtccccagacaccgccaacgacacctagaccaaggtgttatccaggctcatcggatcctgagtgcctgccaggaacaacgtccagacctccgattgccggaaccacgccggtatactgctacccaggatccatcgatccacgctgccccgactccggatacaggggcacaagccgaattccagccacatatctgccgccactgagtgatcctggctacgatagaaccattcggaatgcgaagactctgttcttcaatgaaatcaatcaattggccttcaccgacaacaacgtcttcgagctcgatgatgacgaagtcgagagctcgagggtcaagcgcgagttgaaacttgacgaggatgacctcctgtctaagaggatcataaagcgcgagtccaaccaggagcacaattccgaacaagaagtgatttccctgaccctcggagttagaactggcatcagtgtgaagtagtcgttgaaggtctagtagactgtaaggcatacaaatattataatatcatcatacaccgatatgtatttacctagaatgatattcattaaatataaactatgtacaaatgtaatctcttgaatcaattttgaaattatgcttagacagggtatcatcacttacctatttacggttattaattttgtgtacagcaaatctcttgtactttaataatttaattaaatattttagtaattatgtgagaacaatcgcttgagtctgtaaaagaagttggttctaagactcgggatatcggcaataggaattgctttcgatggactcgtgcggaatccactcctcatacaagggcaatcgattcttcagggtctcgatctcccgcagaatccgcatcacatttcccccaaccagcttcttaatagcagcattgccccacaccctatcccttgccagttcggcaagtaggagggcatagctcttcggagctcctccaagtccaatgtgatccactccggctaccttgcgcacatagttgattgcagtgatggcctcgcgaacgcccagtgtccgatcgccacaacgctccaggttgagcaagattacgcctccattttccggcaataggctgtgggatatatacaattaagagatgtcctataggactaaatgaaagctcacctgaggacgtggtctggaatggaagcaatgttgctgctattgcacatggacagcggtgtggcattcgtgagtaaaacaggagctttggcagttttcaaaacagccaacatggcagcctcgctgagcatcgaaatctccaccagcatgcccaggcggttcatctcaaagagcatggtctataaaagaaataaatgaatgaataaatactatcacaatggttgtgcccacctgtccaaattcgttgaatgaattcgtaacattttcctcaacaagataatcgggtctccggattgctgccgccgcccaaggagtggtgcactccaggctcgtaatcgagacgaatcgtgctcccagcaggtagatggaacgcaagacggccgtgctggtgcccagagcatggccaccactgatacccatgagaacagccacctcgccgcggatgtgagtctgctccatttcatcagctgattcgacgatgtgcatggaatctgtggcggcggtaatccgcttggccctatcaatgccctccagtgtgagctgcacggcatccaagtactgagctccgcacggcacagcaatgggccagagcacagcaccgatgtgattctgtcgcacctcgaagaggttgctgctgttcaggctcatggtgctcggtggcttccacgagccctcgatcagtggagactccgtcagcaggcggcggatgaaggcgagtcgggcctccaggagcgacgaagagcgcaactggagggccagcggaataccacccgccatggcaatgcacacgagcaccacaccaacgcccagcaaaatctttcgtcctcgtgatctctctggtctctccgcagaggactcgctgcaggagtccttcttggagctgtacgtggggatgcccccgttggagcacctaatcttttcatttccacctccgaacttggttatctccgcgggcagttcgatgtccgctatctccgtgaatacaaaacattgctgcttacagtgtggttgatgctggtgcagcggatgaacctccaggaactcgcggctcggtacgggattcattgcatcgtctggttcccaaactcttgcctacccgaggtttcctaccgtagattgtgattcaattcaacaagcttgcactgcgacgaaagctcgaaactgggatactatcgatttttcctgtgtgtcctgttcagtgttcacattttactcacaaggacatgcgcgctggatagttattttgtttagtatggcagcatcccagcgtgagcgggataaaagtgttttaaacatgtaatattcggtataaattgttgttttttaatatagttaaaccctttcttcttttaaccaaacaaacatttttgggcttaaaagatttgtaagcgactcaatgtttaattaataacgtcttagatctatttgtaaaagctacattttaattttaatgattaattactcgcattaaccgactgacgtttatagtgtttgatatttaactacttcttgtgcgcctctatgacgattttcatcagcttgtgtggaggtaaagattccaagaggcacagcagctggatctgattggtgatgcagttggagctcagggcgatttgcactgcttgggcgaagcgttccatgcacttctgatatgcggcatccgcttggggatcggtttttgattccgccagccgtgcgcagtagctctgcagggatttcacgatctgcataagatcttgactgggcagcgctgtcgattccccactgctgacaagctgttgcagagcacgcaggagggatagatgcaaattgctataggcggaacggttggagaccaacggcgccaggaccacccatcgaagcaggcctgctaggggagtggtaaagggcatggctatggctccggcgggcaggaccaaaggctgctgcgaggcctgacacaaagtgggattctccatcatccattcggttatggtgtccagcagagcatctggcggtggattcaatgtcggcgaacgctgctcattgaggtacagatccgccacggcgaccataaagttggccgcaaagtgcggacccaccatgggcagctgcttgagttgctcgggggttttccgggagtacgagataaagtcgctgactata

SEQ ID NO: 40922 - DNA, 1436 bp, DROSOPHILA
cagtgcaagcttgttgaattgaatcacaatctacggtaggaaacctcgggtaggcaagagtttgggaaccagacgatgcaatgaatcccgtaccgagccgcgagttcctggaggttcatccgctgcaccagcatcaaccacactgtaagcagcaatgttttgtattcacggagatagcggacatcgaactgcccgcggagataaccaagttcggaggtggaaatgaaaagattaggtgctccaacgggggcatccccacgtacagctccaagaaggactcctgcagcgagtcctctgcggagagaccagagagatcacgaggacgaaagattttgctgggcgttggtgtggtgctcgtgtgcattgccatggcgggtggtattccgctggccctccagttgcgctcttcgtcgctcctggaggcccgactcgccttcatccgccgcctgctgacggagtctccactgatcgagggctcgtggaagccaccgagcaccatgagcctgaacagcagcaacctcttcgaggtgcgacagaatcacatcggtgctgtgctctggcccattgctgtgccgtgcggagctcagtacttggatgccgtgcagctcacactggagggcattgatagggccaagcggattaccgccgccacagattccatgcacatcgtcgaatcagctgatgaaatggagcagactcacatccgcggcgaggtggctgttctcatgggtatcagtggtggccatgctctgggcaccagcacggccgtcttgcgttccatctacctgctgggagcacgattcgtctcgattacgagcctggagtgcaccactccttgggcggcggcagcaatccggagacccgattatcttgttgaggaaaatgttacgaattcattcaacgaatttggacagaccatgctctttgagatgaaccgcctgggcatgctggtggagatttcgatgctcagcgaggctgccatgttggctgttttgaaaactgccaaagctcctgttttactcacgaatgccacaccgctgtccatgtgcaatagcagcaacattgcttccattccagaccacgtcctcagcctattgccggaaaatggaggcgtaatcttgctcaacctggagcgttgtggcgatcggacactgggcgttcgcgaggccatcactgcaatcaactatgtgcgcaaggtagccggagtggatcacattggacttggaggagctccgaagagctatgccctcctacttgccgaactggcaagggatagggtgtggggcaatgctgctattaagaagctggttgggggaaatgtgatgcggattctgcgggagatcgagaccctgaagaatcgattgcccttgtatgaggagtggattccgcacgagtccatcgaaagcaattcctattgccgatatcccgagtcttag

SEQ ID NO: 40923 - protein, 451 aa, DROSOPHILA
MNPVPSREFLEVHPLHQHQPHCKQQCFVFTEIADIELPAEITKFGGGNEKIRCSNGGIPTYSSKKDSCSESSAERPERSRGRKILLGVGVVLVCIAMAGGIPLALQLRSSSLLEARLAFIRRLLTESPLIEGSWKPPSTMSLNSSNLFEVRQNHIGAVLWPIAVPCGAQYLDAVQLTLEGIDRAKRITAATDSMHIVESADEMEQTHIRGEVAVLMGISGGHALGTSTAVLRSIYLLGARFVSITSLECTTPWAAAAIRRPDYLVEENVTNSFNEFGQTMLFEMNRLGMLVEISMLSEAAMLAVLKTAKAPVLLTNATPLSMCNSSNIASIPDHVLSLLPENGGVILLNLERCGDRTLGVREAITAINYVRKVAGVDHIGLGGAPKSYALLLAELARDRVWGNAAIKKLVGGNVMRILREIETLKNRLPLYEEWIPHESIESNSYCRYPES

SEQ ID NO: 40924 - DNA, 11892 bp, DROSOPHILA
tgaatttcactggactttagcagcaggaatccctgcataagctgcagtttctcggccttgaaatagatcttgcttccgggagccacattgagattcagttggggaactggctccagctccaaggcctttatggaattctgcccatcactcagatccaactgaaggaggcgtggcgccgccttcgattcctcattcgccttgggagcggcaatatttcgcacacgctgaacctgcagcacaattttaccgggcaaagtggcatcttcgcgtttcgcgggcagtgcgccaccgccaatatcgcgcagatctcgctgcaaagtgtgagtaataggttataattaataattacacagaatgctgagcagccggttcgcctacaactcacattcagtgcatcattgactattttccggacatcctcgctgccgacggctgttgtcacgattttaaggccctcctctgtcaggtacctgcgtaaatcgttaagaagcattgtatgccacaatttaaaattgtacttaccacccgacttctcgtagtttcttgcctaattccattttttcatgaagacgatttttttgcaactccggactagggatgacaaaagtattagatgtgtgtactcgctagtgatgtgcttggcggcaactatcggctgacggtgcatactattatcgtttaagtttaggttgtttagtaatattaaatgctttcttaaaatctaaaaattttaatatttcttgcacacttattcaaattaaatataatatatatattatgtcccaagagataatgtcaaaattgggtgcaacacatatactagcatatatatttttgatagatgtacttatatatcgataattaaattttatcagttataaagaattggcattataaatcgatttaaagtcgtaatatctacatgtttagaacaaacaaaagagtaccctatacgcacagccactctaatgacagttctagtttaggtggtaaagcgaataaaatgcggtcacaccgcgccgcaatgaatgtataaaagggggctgccatccgcagagcgagtaaataacggttcgcgagcaacaacttttcatttcgagagcggagtaatttttccagccgaccgacaaacagtgattgaaaacccaaacgagatttatttcgaaacgcgacaagaaattgttacatcaaaggagctgcaacgactaaaatccgcgaagaaagtgcgagaaaataccttaaagagagaaaaaaccagtgacgcagtagcaacaacaacaaacagtcatcgaacgatttatagaatctaacgccgagtccaaagcatgaatctatcattcgctggctgcggattcctgggcatctaccacgtcggagtggccgtctgcttcaagaagtatgcaccgcatctgttgctggagaagatcggaggcgcttcggccggttccctggccgcctgctgtctcctctgcgatttgccattgggtaagtctcttcccacttgcttacatgggtgggtctagagagggaagctttcggaatcattaagatctgccaactatatgatagcgattctccaaggcgaaacaaaaataaattttttattttgctttgcataaatcttaatttgttaagtttcttgtttcttttcacactccgcgtctgaacttggcctttgcacaatgttttctgcttgggaaaacccctgtgaatattttctgcacccctctggtgttttctctactgctctcccctcttcgtgcagaatgcacacacacgaacacactcacacttgcgttcgcaaaacagctgagtgcaaaagcaaccacactgggcagttcagtgactctgtgagtgggagtgagaaagagagcgagtgggagtgggagagcgcgaaagatgctgcgaggctcaatataaaacgcattgaattgaattttattgataagcttgtttgcgtttgtaggtcgctaggaagtcaatggggatctttcataattgactgcgatagtgtgtgtgtgtttttgggcgtgtttgtccaatttcgaagggggctcgtcccatccgctcaaaagaaaactgcggcgcagttgaaaaaccttacgaaaacagaaaaacaagtttcgtatgcccgggacaacgcacttttgtaaagcggcacccgaatatatgggcaaatggttgggcacagcggtgggtatatgaatagcaacgcagtccgaaaacatttcatcaaatacttttgcaaagagaataaactaaatacttatgctatgagattagccagaaactttataaatctaaattgaagataaaatcactcacagcatatcttatcttcaattgccaatattaaattaaatagattaaactggccttgtgatttagaattgcgatttcttttgcgaattgattaaagttaatttgcgtcagaatgataaagtcatatccttcatacaacctttatacaaaacctataaggcactataattctgaccgcaactgtatgcacacaaaacctattttgatcgagatgcttgaaggtcgagtgcttatttatacatatgtatatatgtatgtatattttgtttatgcttaggaggcgcggtcatcgaaagccgcctaggaatttgagtcaaaagtggtgccactgtggaatcgggtctatatataactgcgaaatatatgcatacataatggacttgttcttgttgtcgattttcaaatgtaacgcttcgtttgtatcgtgggtataaacatgtcaatcactggggaactcaaaactagcgagggagcacaacaaatgtcagctggattactcatggctactgggctacaatgtccagatgcatctgtgtatatggcttatcgcttgaccagggtaatcgttagctataatctggaataacgtcagcagtggaggggcagcaggcagcatcattcgatcattaaaataatcaataatgtgccaatggagatgatagatgatcatcacccctaggggcttaacatgctcaatttccattgactttgctaccattgatgtggacataatcggcatactacgttctaaaattgggattctccgaccccgaaatataagtaaaatgcgtttcgcgagattacaataaagcgtttcaaaggaagctttcatctatgagatacgtagatacaatagatcttagcaacttataaaggccacgcttgacatcattcatttaccgacttaccccattctggacttttctcgtttgcatctttcgcgtggcaatccaggtttttactttggaactacctgatcttgatccccagctggtagaaagttcgttagcccgtgcagctgcggcaggtactagaattttcctgtaatttcagtttttccactttaattgcggcaattaaagttggtcggttgcattttgatctatgtatgtatgtagggccatttgattactcagcacgcagcgtgtctaatttggactttaaaatccgttgtgcactttcgggtcccaagtacaggcaggtaggtatacaaaaagtacagaagcgtttcacagacaaaagacgttctgttccgccgacagattagatttgtgaaagttcgtactcgttttcgggtttgccaacagtgcgacacaaaaaggtgcaactggtggtattggttttatattggataaatgcaaactatgtaaccagggcatttaatttgcaaattgcgttatcattgtgaagcaccccacttcctttctaatcaaaatccacagtgcttagatacttagatacttcaatactaacttgctaattatattactattgtcgcccgcttcatttgctttgtactcgaaatagctgctccaatccaagagttattcagatagggtgttggaaaaacacctcatctgactctttattaaacctattcattcatgacgactcttttatggccctatttattgggtgttcaccgcacttcctctttgttgttggcactcgaaccacttggacacgagtttgcggatcgccacgcgtacttgtcgccgtatcgtatgacgactctatcactatatataccataccataaatatacatcgaaatatatttatgaatatggcagatatcttcccatttcaccgccaagtggattgccccttcagataatcgcaatttccctcttcgaaatgcaattcatgccttagtgacagagcccttaaaaacaaatcgttatcagttggtggaaattgccgtgtttcgatggtttctcccttttttttcaagcgttggtttctaaatgcaaatctgtaaatacgatcattatttgttgttttttttttttaagtctacgtttattttaagtgtgaaagccaatggccgaccttcagtgtgtacggctatctggaaattttagaaatctcaactgcaattcatggtgctgttcgcatgcgagcacgatcgtacttatgtatggatgtacatgcatacatatatattcattgcttatcggttcgatttacctttatgggcacgttatcacgggggagtcatgttttgttgccgatttccgtcgattaaagtccaagttgcgggtgtatcagaagttcgcttacgtagtatatggacttctcaatggtcgttcgatttcgttgcagctggtaatgcgaaaatatgagtcaagtgcagtttcgcgatttgagtcgcacatcgagctctttgtttgattcgaattgatcgctatctatatggatgggcggcactacatatgtatgcatgtaaatatgtgatgcattcgattgacgtatttcctattcctattaccagatgattagaacacacaaagcacacactatctgcacatttacatgtggggctcgcagctgggtcttcgcccaatagcatgtacataatgctatcagctttgcgggatccacaatacgtggcgtatctgccagtgatctcctccgctcaatcaatcggccatgcaaatggggcttctcatcattatcgaacgcattattgttgattggcacacttacaaaactaatccacgatgacagttggtcacgagtcgggttttaaaaacgaattccttgaatagaaatttttactagtcgtataatacatcaagatttcgggtttcatatcaatacattcataattgagaaagttacgaatagaacccttggatcttttcgtattttacttgtaccttaattgcatgtaatcactaaccattcttgaaaagatcatacttatgttctacttcaaatcgaatggaacaaaaaattgcagctgccacagttcgtggataaaattccagcccacctttctcccaaaaccaccctgaaaaaaaaaggaaatcgaaacatccaaatgctttccaaaaatccgttgccaagtgaggagaattcatggcattgcaatgtgtgacctatataaataaatgtatttgtgtaacggctgcataaaaggcactcagaaaacttgcatagtcaaggtgataagtatgtgaacttggcataaaattacgtaaatttaaataattaaaacatttaaataaatgaaattcgtcaaaaaaaaagagtatttaaatggcatttaaagagtttatatattttatgtatatattaaataatctaatttcaaatgagttaacaagcataacagcttaaaatttttaacgaacttatgtacagttttaaattacttgggcatactgaaatgggagattttagaaatgcaatggcctgaacaataaacaatagttgtctagctgtaataaaattaaaggcggaaatgtaaaaaaaaaagttgtaagtcctcaccaaataaaaatagaatccaaaggcagacatattgcattcaaaatatcgaaataaagaagtcttacaagtcacaaaataaacaaaacagaatagtgtaaacataattactttgcacactgtaaacatatgtagcactacatacatacatagttatgcacatacacatgtacatatatgtatggtattctggttttcgtgctctttttgaatacaaccacaatatcacgtgatgttttttattcgtttttgttgggtgccctgtgagaagtgtagagagcggcgaagagcggaaataacttgacttttgggggtcaggccgcggaaatgggggtgtgtgcgtgtcgcgtttctctctctccctctcgttgagagtttgttgccttttcttttgccgtggaaagcaacaactgccactcccccttttccctccccctcctctctttctccagaaactggtttatttatccattgaagtcgagcccccaaaagaaatggtatttttggtgcagctgtttgttgtgtgcttgtggtatgtgtgtgcgcatgcatgtggctttagtgctcgcttcgccgttttcctcgttatgttttgtttacgattccgtcgcgttttggtcttcattttccatttgccgttattcacccggcctccaaagtaggcgttagttgcacttgacttgcggttatgatacacataacattagacgcccctactgtacattccacgcactgttgcggtcatggcaataaaacccattacttttaactaattaaatgcacacaagttgcataatatcagtttttgaaatagttaaaccgaatttggattagttgcgtagtataatttgcaaaatatgtgtagaaggctaaaaattgaaggtttaaatgggtttatctgcaaggtttcagtttggtggcagctggacgtttgtaattacattgcagtgcaaagttctctcacttgcattccaaatatataatttgaaaatgatgtgcagttctacccgcgattgtactttgcttcgaaggttgataggtgctaaacgagttgatttaacccagagcagccgccacgcccacttttctgattctgtttccgttgataaatgaagctcatttttacacgcagttgctgtttgcctaagcaaaacaaaaacaaataattaagagggcagcacgtaacgtgatagcgttgtttacttgcatttccctccctagtttattattgtcgctgacaatcaaaagcggaatggcgaaaacaaatttgatataagaccgagaattgggacccccgcgagtttctggggttctttgtagttccaaactccacccagaacaatagtggtgttcaatgtcatagcagctttaaatagtttaactgataagcgagcgttatgtgacttgtttgttttaactatgcttgttcccaactatatatacatatataaaatcgatggtgtgacataattccggggttttgggatggatcccaatcttagcttacgctattccgcgtttcatcttgtctgatggcctgatttccgttttacgtcaatttgttgaatacaattataatgaattcatgaacataacactatatagtgttcgtaataaccttatcataatcattgttgcaggccgttcggcatgcatctaatcaaaatatttggaaagttcgatcgtgtggcaccgcggggaacttgatttcttatcaacaaggcacatggcgcacgcgaaacttctatttttatgtgagagcataggttctgaaatgggtttcacaattacacaaatatacaatatagataacaaccaaatactttatacccgaagttcatcataaagaatttgccaaatgatggagaacatttgtgtttcttgaccataacatatgtatatgtaaatctatttccgaacttgagaaaccatgtttctgacttcccaatcaactagaacaggttctcgaatcgtacgataccctattatgaaataacccattttcgttgccccattgttgagctgaagttgtagcatatggtgggatccataattcaatagtcgcttatcagtgccataaactgtgttgggggtcgagtggcacatagaacaagacaaacactttcgagccactcaaggttcgtacgtcatttccccccataaacgagctggtaaatggctaacaacaataacactgccaagagcagcacttgaccctttggatgacacaatgacgcaaaagccgcgggcatcatcacacgtagatcggtaatcggatgaggagatagcccagtgaacccgaaaacatcaatatacatataatataagctcgattagcaagggtatacacttaagcacagtcaacgatcttttccaaacgagattttttactaatagagttatggattgatgtcatatgacatcatgtgcgtttttaacgattcggagttaatagcagttaaaatttctctaaatgccttgggggttcgcagcctttgtaatgcaaagttcaattaaaatgtcaattcttactaaaattccccttttttctattgtgctttccaggcagcatgacttcggacttcttcagggtggtgaacgaagctcgtcgctactccctgggtcccttcagtccctccttcaacatccagacctgtctgctggagggtctacagaagcatctaccagacgatgctcacaagcgggtgaatggacgactgcacatttcgcttacccgcgtgtacgatggcaagaacgtgatcatctcggagtttgagtcacgggaagaggtcctgcaggcgctgttgtgtgcgtgcttcatacccggattctccggcatcttgccgcccagattccgtggcgttcgctacatggatggtgccttctcggacaatctgcccattctggacgagaacaccattacggtcagtccgttctgcggcgagagtgatatttgcccgagggatcagagctcgcagctcttccatctgaattgggccaacaccagcatcgagatctccagacagaacatcaatcgcttcgtgcgcatcctttttccgccgcgtcccgagtttctgtccaagttctgccagcagggattcgatgatgccctgcaattcctgcatcgcaacaatctgatcaactgtcgacgctgcgtggcggttcagtcgacattcgtggtttccgaaacggtggcccagccccaggagttcgatcccgagtgcagggagtgcaagaagcacagaaaggtgaggcactaacaagtaactctcaaataaactttcactaactgacttcttaactcttccaggacgctttgagctcaaacatgccccaaacggtactggatgtcattcaggactatatcgaacaagccaataagggtctggccaactggattttcaagcatcgcggcattaagctgctttccctaccagccacagtgcccatggactttctgctggccaccatttcaaagtaggttcccatctctcattgttggaatattgcatatttaactatcatttctatttgatctatatttagaatatcagcactgacgcccaaacttaccaagcaggccagagtaatggtggaggacttaattttgcagttgaaccacgccatgcggatacgactgctaaataaattcacggtaagttaattaggtacctgtcttgtgatcatttgcttaagtaatcaattgaagtgcattaaggctgtcgctcacattttcataaatttgttttatttagaattgacggctggcaatgaatttgaatatgaaatgaattatactaacgaatgtgtttttattgcagctctatgaccagcctcacttcgatgccacaggacttcttcattccagccgcttatatggaccccgtgtttcaatccttgtggatgaatggtaagttaagcagtaggattaatcctccaaggaagcgtttaactaatcgtgccgttcttttggttttcagtggagccacaccgctagaggacgatgtcgacaactttgagcatgtcctcaagatgaccacgcacaacgacgctctatatgcctattactatactgacagcaacacgaacaaggtgaaagtaaccgagatctttgactttgacgaaataacggagcacgacaagctggccaccgatctgcagatctacgaaggctctgtcgaagatcaccccaatccccaccagcacagccacaatacggtggtcagcgaatggaatggcgtcgaatcaggttggtatttgtgaaacgaccgcactttcaattcaaaaatcacatcattacgtagagaaatcgtatcatttgaatcaacaccaaacattttttgcagtacaagtaatgcccacgactcctgaactacacgacgtagccttttaaagcacttacaaactaaacgactataaatgcacctccataacccttcacccactcaagcattaagtccaaattttaaatcgttggcgcaggtaaatgatctaaatttgcaatcactcccccgtatattcccataacaaaatttcattttatatagttcgctcttatgaatggttaaactaaactctgtcttactttctcatgctccacagacttcttcatcgatgcgcatacaccaaatgtggaggatagtaaaacatcagcgccacaattctcccgcctggacctggagaccgagtcggatgctagtgtgctaagtgatcccgaggttgatcagacttttagctccacggcctccacgcacagcagcgacatgtatatagaaattgaggggtaattagtaatggggagggggcaatcctcttaggaactgtatcgaaacatctccaaagcggctcgtagcaaagcgaaaagcctagtagcgtttccattagtctaaattagtcttagtacgaccaacgtatgtacctaacttaacttagccgtatgctgccattgtatcatcgtcagtttgtaagcggcaattagctaataattgcattcttgttattagtcaccctcacacgacttgtattacatccaaatccccatctgtgtttagcctaagttgataatgtataaacaataaaaaaaataaacaacaaatatttacagaatgtctggttgcgcatttactattaataaaataactaattgtgattaatggggaattcaaggaaggaaaaaaaaaaacaaacaaaaatatggtgcgcttcgtcactatgtaaactgtcgttcacagtgatatatatgcagtgcacttctttcatccatctataacaatttatataaattgttagacattcgcattcgtaatatcaaattttttaaatttcattttctttataaaatttaatcggcataaaaatttaatacttctggaaaagaataccgttctaaaaagtatcgatgccaatgaatggaataccccctacgcacctgccatttttagtgcatatttccagaaagctgaaacggccacactgcaacatttttcataaaacaatcttgttttgatattggtaaattaattgccagcaattagtttaaattgtgtgtaaaataaaaggccaactgggcaggcaacaagtaaactaatcaccatggaggcggtgccccgtttgcatatgctctggttcgccctaaaatcgagtcccgagggaacctcctttgcggctttgaaaaaggtaaaaggaagagagtgcgaaagggggagtgaaataattaagagagccagcaaaacaaagaggagacaacttggtgaaacggaattatcggtcaaattgggaaaatgcgttgcttattggattcatattggaatcgaaattcccattctcaccatgccatttgctccattgcattttccgttttcaccaacttttaagccccctttgtctggcggctgagtcatcgtcgtcatctgattaaattggcaaacaaataaaaagttataagcaaacactggcagtttgttgggttattgcacttaattccccatgaaaacccatttaccctaaaatatattcttgttttcctacactaaactccataacaaaaatccaacttaaaacatttcacgttttactt

SEQ ID NO: 40925 - DNA, 2412 bp, DROSOPHILA
aaaatgcggtcacaccgcgccgcaatgaatgtataaaagggggctgccatccgcagagcgagtaaataacggttcgcgagcaacaacttttcatttcgagagcggagtaatttttccagccgaccgacaaacagtgattgaaaacccaaacgagatttatttcgaaacgcgacaagaaattgttacatcaaaggagctgcaacgactaaaatccgcgaagaaagtgcgagaaaataccttaaagagagaaaaaaccagtgacgcagtagcaacaacaacaaacagtcatcgaacgatttatagaatctaacgccgagtccaaagcatgaatctatcattcgctggctgcggattcctgggcatctaccacgtcggagtggccgtctgcttcaagaagtatgcaccgcatctgttgctggagaagatcggaggcgcttcggccggttccctggccgcctgctgtctcctctgcgatttgccattgggcagcatgacttcggacttcttcagggtggtgaacgaagctcgtcgctactccctgggtcccttcagtccctccttcaacatccagacctgtctgctggagggtctacagaagcatctaccagacgatgctcacaagcgggtgaatggacgactgcacatttcgcttacccgcgtgtacgatggcaagaacgtgatcatctcggagtttgagtcacgggaagaggtcctgcaggcgctgttgtgtgcgtgcttcatacccggattctccggcatcttgccgcccagattccgtggcgttcgctacatggatggtgccttctcggacaatctgcccattctggacgagaacaccattacggtcagtccgttctgcggcgagagtgatatttgcccgagggatcagagctcgcagctcttccatctgaattgggccaacaccagcatcgagatctccagacagaacatcaatcgcttcgtgcgcatcctttttccgccgcgtcccgagtttctgtccaagttctgccagcagggattcgatgatgccctgcaattcctgcatcgcaacaatctgatcaactgtcgacgctgcgtggcggttcagtcgacattcgtggtttccgaaacggtggcccagccccaggagttcgatcccgagtgcagggagtgcaagaagcacagaaaggacgctttgagctcaaacatgccccaaacggtactggatgtcattcaggactatatcgaacaagccaataagggtctggccaactggattttcaagcatcgcggcattaagctgctttccctaccagccacagtgcccatggactttctgctggccaccatttcaaaaatatcagcactgacgcccaaacttaccaagcaggccagagtaatggtggaggacttaattttgcagttgaaccacgccatgcggatacgactgctaaataaattcacgctctatgaccagcctcacttcgatgccacaggacttcttcattccagccgcttatatggaccccgtgtttcaatccttgtggatgaatgtggagccacaccgctagaggacgatgtcgacaactttgagcatgtcctcaagatgaccacgcacaacgacgctctatatgcctattactatactgacagcaacacgaacaaggtgaaagtaaccgagatctttgactttgacgaaataacggagcacgacaagctggccaccgatctgcagatctacgaaggctctgtcgaagatcaccccaatccccaccagcacagccacaatacggtggtcagcgaatggaatggcgtcgaatcagtacaagtaatgcccacgactcctgaactacacgacgtagccttttaaagcacttacaaactaaacgactataaatgcacctccataacccttcacccactcaagcattaagtccaaattttaaatcgttggcgcagacttcttcatcgatgcgcatacaccaaatgtggaggatagtaaaacatcagcgccacaattctcccgcctggacctggagaccgagtcggatgctagtgtgctaagtgatcccgaggttgatcagacttttagctccacggcctccacgcacagcagcgacatgtatatagaaattgaggggtaattagtaatggggagggggcaatcctcttaggaactgtatcgaaacatctccaaagcggctcgtagcaaagcgaaaagcctagtagcgtttccattagtctaaattagtcttagtacgaccaacgtatgtacctaacttaacttagccgtatgctgccattgtatcatcgtcagtttgtaagcggcaattagctaataattgcattcttgttattagtcaccctcacacgacttgtattacatccaaatccccatctgtgtttagcctaagttgataatgtataaacaat

SEQ ID NO: 40926 - protein, 507 aa, DROSOPHILA
MNLSFAGCGFLGIYHVGVAVCFKKYAPHLLLEKIGGASAGSLAACCLLCDLPLGSMTSDFFRVVNEARRYSLGPFSPSFNIQTCLLEGLQKHLPDDAHKRVNGRLHISLTRVYDGKNVIISEFESREEVLQALLCACFIPGFSGILPPRFRGVRYMDGAFSDNLPILDENTITVSPFCGESDICPRDQSSQLFHLNWANTSIEISRQNINRFVRILFPPRPEFLSKFCQQGFDDALQFLHRNNLINCRRCVAVQSTFVVSETVAQPQEFDPECRECKKHRKDALSSNMPQTVLDVIQDYIEQANKGLANWIFKHRGIKLLSLPATVPMDFLLATISKISALTPKLTKQARVMVEDLILQLNHAMRIRLLNKFTLYDQPHFDATGLLHSSRLYGPRVSILVDECGATPLEDDVDNFEHVLKMTTHNDALYAYYYTDSNTNKVKVTEIFDFDEITEHDKLATDLQIYEGSVEDHPNPHQHSHNTVVSEWNGVESVQVMPTTPELHDVAF

SEQ ID NO: 40927 - DNA, 6988 bp, DROSOPHILA
agtgctcgaccacaggtaaaaatgctcgagcacggcgcacacagagccaaaaatcgggggtcttacgtacacgagtatatgtaggtggtatacatgcgaaagtccccgtcacgtcggcacatcagatgacagtggtgggacctccgcattcagcagctattcacaatattagtttactgctattgtggagcaaagtcgcaaatatttccgtagccaaagtcacgttcgcccacctgataacttccagtcactgggttgcattatcaggttgggaatctgctgctcggtaatgggaatctcagcaacaacaataactaatttgttgactttcgacactcgagagaattctcgattttgtgacgtgaactattcattaatctccttcatgaagaaaatagattggacagttttgttttcatatttttgaccaaacattatctgatcttaatcaaatgttgaattttactagtacacaatatgacgcatctagaaccaaaaaatcgtattttcccctgactcattgttttcatcttttgtagccttccgcttcttgagaatctagaatcttcatgttaagctcatagtctggttgactaattacacatttataaatatttacaatcttgtgtcaataaataaaaacagcgttttttaccccagagccctaaagaaacaaattcgaattattcttggtgagatcaaatttcaatgtattatgttcttttttgcaattttcacttacaagattttaagagtacacaaagcgtaatacagaagtattaaataataaataacaatttgcattcgttgcattttttaacatggaaactaatgtgttttaaagcccaaaagcaaatcagggcgactgtcctttgataagatcaacagtttgcaaaaaaattaaaatgttaaatgtattgtacataggtaggttttaggaagaatcggttgcagagaggaggctgcggagcggcgtgattcttgaacgaatcgaatcggggctgcagcgcgattggaaggcagtgagttcttgtgtgtctaagctttaagtctttgttggcagtaccacctgcaggaagacgacgtggaacgcagtcggagtcggcgcgacccggaaggccaggatgtccacagtgtcatatcatccgatatgcccagtcccggcggctaatcagtcggcattcagccggatgcagccaacgcgccagcgtgtcccagaatgcaacccgtgggtgactccacgagctccaatcagcccatgtccacatccgtatcgggttcgggttccgtggacagcccattggcattctgagccatttggagcgtggagcgcgtgtagtccaatggctccacgccaatgtcctcgtactcgtgcttgtcacccaagggacagagtccttcctcgtcatcatccatcgcatcggcggcagtgccttcgtcctcctccgcatcgctccagtcctcggccacctccacgtcgactggcaggtacatgtggaaggggcgctgctctcgcagccacggggtaaggaagatgtggctggcggtcattcgttccgtgtaatccttccgcagcagcgaaagcaacagccatcgcaccgacttagacagcgtcaggggtatctggacattcccgtggcgtatgacggtgatgaggttgcagttggccttctcgtagaacgggtactgacccaccaacatggtgtacaggatcacgcccagcgaccacatgtccgccggtttgcccttgtacgtttgctgggggcacagcagttctggagcggtgtacagtgggcaaccgatcttgtcgctcagagtatcgtcctcgccgtcgaggatcattgagccttccagtgattcatactgcagtttcgttctgtaattagcaaatgacaaaatcgaataaataatccgccaaaatagggtacaaaatatatgtttatgcttcttagaaataaaactaacagtcttttttttacccgtttctattaatatgttgagaactattgttgccaaagaagagtagatatgactgcaacttgagttggcactgccactattctgatcgcaactgtacccgttcatcagacccatcgtcgagctctacatcatgtgcaatccctgggacttgcataacccccgattttgtggggccattagctagcgcaatatcgaagagacttgaatcgatcggccacggagcttcagtttcagttgtagttgtctttggcgttggcgtattgacaagtcaaaaggcaaattggccgagagagcacattgtgagctgagctgagttgacttggattggtgacgaaagcgcagcttgcgacccccgacacccatgagcgagtgccgccgccgccgccgcctccgcccctgcactccactccactccccctccattgggccactccactccattgacattggcccacattcgaatgcaaaaagcaaaaaagtaacgaaaacgccagcgagcacagcgcatagatccaaagagagtccgctgtgtgagctgcgtgagtagtaaggtgaggtggagtgacgtatcgcaacttgttgctgcaacggcgcttctgctgggacccgagcaccactaccaacattgggtattccgccgatagcgaacggagcgatatacaaacacacggtcgccgcggtctggtatccaaacatccaaagagccaaacacaaagcaggccaaaaaaacctcgagctgaccctgaacaaaaacaagctttgaaaacgcgcctctcctcggcacaaatcacagtgtacactgaaagaaacaaattaccttcaacttgatagcaacaggtgggcaatcaataagagggaaaagagatagcgcatttaaataatatattcaaagaacacggttcttaattaagagcatgtttctatacatttgttttcgggtttcatttgatttttgtgtcctctatcgtctagttaccccattcgatacagaaacattataaacttatatttaagatcaaggcaagcatatataattatacttttaagatcaaggttttatgtgaaccaatatttatatttttgagtgcacggaaggcaggtggagatgtgatgaggagaatagttacagctgctgacctcgatgcgcgacataaccgagctttgaagagcgtcttgtggatctcttctttccctctctctctctctctcgctctatacgtttggcacacattaacccgcgacagaggttaaaataaaatcggaatcgaaacgaaatacggaaaaccggcgccgcataaatgctcaaacaccttggaagtatttacgtacggcaaaagagtagacaaaataaaagtatgaaccagagatttttacatgcataagcatacgcatttgtatatgggaggcactggcatatatgcatgtacataaatgcgttcaaatacagaagatcagagtcagggacattcaccgcactgtgaccttaaaaattcggctcgttatttggttgtgcgtgtgtgtggccgccccgttggacatatgtagatatggatatggccacgcccatagcccatatagtatgtatgtacacccagcgagcacttatctatatagcgatgtattattcgaatggaaatgggaatggaagtgagcgccagtaatcgcagcgcatttgagtcgtattgaacacttgttgtttatttctcgccaaggtgagagaagtatagtatagatagagatctatgggttggtttcttccttccgccgttttgcacttggcacagaacgacgaaatgacgaaaaaatcagcagatattgcgctaattgcagagtcatacgaaatcgaccaaatgttcaagtcgttccatgctgatgtcagtacaatttcgaagataataagaacgggagacagcgcgttttcgatacagttgtgttaattaacatatgcgaaaatacattttcgatgaaggtggggtcaatatttcatcatccactgtaaactcacacacgggaaatcgacaaatcaagcgaacgccgagtacgtggcccacagatccccaccccaaaaccatattgcaaatgctatgttgaacaattcttgaaatgtggcaatttctagcttccgaaatgtgtaatgaaaaaacgagtgagccaacattttggccatcagtgtggcacattgggcccttgtgtacgagtatgtacacagagatacagtcggggtctgcaaaataaggcatatgcttgctcactgaatggcaattcaatgatattacataaataataattctttagctacaaagctaatacaccatgttaattaatagtttaataataggtgtatttcaaaaacttatctttgaaattatttaacatttttgatcttattcccattcatttttgcaatgcttcgcatagtaggaatatatttttacttataaaattagtttgaaactaccattataccctgtgctgtacatacgtacgccttgcgttcattcggtttgtcagtataattgttgttgttggcctattggtgattcgattgcaacacttgttaaatgttcaatgttacccacaacgacggcgccagcaacaaaaacaaaagcaacaacagcagcagcagcagcaactacaacaacatgggccaataacaagagcaacaattgtggcaccaccaacacacgaccacaaacaagatctctcgctcataacgagtttccatcgaattgcaaaataaaccgactagccagccatatgcaattgagttggtataagtcaggcatatgtggcgtatattggtgtatatgggtttttcgaaggtgtcacctggacacgcaactcacctggcctcgtcgatgaagtagaaccgcttgagcttgaggtccctgaggataatcccgttgcggtggcacacctgaacagtctgacagatctggtggaatatggccctcgcctccgtctcgcacagtcgcttcgcgtggcggatgtaggtgtgcaggttctcgtacaccccggtcaccccacccgtggagtccctctcctggggcacgggcgcaatgaggatgtaggtgcgatccttggtaagcggtatgatatcgtgcacgggtcggatcagtggatggccatagatggtgctccggcgtagctcctcgtcgtgctgctgcagctgaaagtaggctcgttgcaccttatgcaacggttcgtttacaatacggcagaggaactgctccccggtgaagatgtccacgcagcgcagattggaggcggttagatcgaccaagtggcgatacgaggcgggagtcttggcagccacggcggccgatatgtgactaggctgtgcgctgatcagataacgctgttggatgagcttgacgggctgctggtctgtgggttccgctgcgatgcccagggccagaaggtcacaggctccgccgggcgtcattagcttctccctgatggtctgcagcatcttggcattggggaactcctttttgggcgtaaataatcccagtacggtgtcctcctggctgctactcatgccgctgctgctggatgatgaggatgaggaggtggcggctgcgactcctggcgagactggtgacgaatagttgactattttgcttgtggacgctgacgaagccgttctgctgttttgaccgctactgttatccatgcttgcttgtgtttaccacttcacttaactttatcacagttcttgctctcgctacgttttcttcgtcttattctctgctaatgcttcttcttactaattttgttactccgctttagcctggctgtacttggctgttaattgttttgacatttagcgacgcgccgtttagtctccgattaaattcgatttaaactctcgtttaaactcagggctactactacttcggtagtttggccatttgcaatgcgggtactgacgaaatgcggcgattttaaaacaaatcggacgctgctcactgaactcgcgaaacgaaacgaacgcgaccgtcttctccgcagtttgaatttcaaatgtgaccatccacgcggtcggaagaagcacgaagcgaagagaacggcgaaatacaacggctctctttcgcaccctcttgctcgctctcactgcaccgatccttctctgcctcgctcacacccgttgcaggaatttagctcaatgcggtcggaatggaaagagaagtgggagaccagagagcgtcgttattttttgaaatccaaatggttgggagagagagaaagaacaagagcatcgttatttttgaaaaaattgcgctgaacgctgaaattccgattccaactgaattcgaaatacgtagctgtatgaacactatacccacagcaacccttaaacttttcttctacgattttacgtagtaatctgcgcaccaataaatcgtggcgataagttaattagagggggttagtaaactgataaaatccacagttttaagatcaaattaatgaaagtacagtcagcttgaacttcgattttgttttattgagtacgggtacggatatcgaaggcagaaacacccgtataaccatctctataactcgaaaatatcttttgtggtttcttggcttggatacttaaggttttctcctgctctgataaggtaatattttacaagtttggttgaaattatttgttttcccatagttacgaaatttttaaaccaaattcaatgatgatgtgcagtttttgagtagttgctttgcaaactactattattataaaaaaacataaaacataaaacattttaatatcctaatatacatacaaatttaaaattaagaaatttgtcttcttaatactccagattaagatctcttatatccctaagtatatgaccacagatggacatttcagatgtacaaacatagttctagtaaatcctagaatttaaataaatgctcccaaactcgaatcttcaaataacgcttcaatctcttggatccaaatcgatcattgaattttttcctgtgcgagatcatt

SEQ ID NO: 40928 - DNA, 2038 bp, DROSOPHILA
agaagacggtcgcgttcgtttcgtttcgcgagttcagtgagcagcgtccgatttgttttaaaatcgccgcatttcgtcagtacccgcattgcaaatggccaaactaccgaagtagtagtagccctgagtttaaacgagagtttaaatcgaatttaatcggagactaaacggcgcgtcgctaaatgtcaaaacaattaacagccaagtacagccaggctaaagcggagtaacaaaattagtaagaagaagcattagcagagaataagacgaagaaaacgtagcgagagcaagaactgtgataaagttaagtgaagtggtaaacacaagcaagcatggataacagtagcggtcaaaacagcagaacggcttcgtcagcgtccacaagcaaaatagtcaactattcgtcaccagtctcgccaggagtcgcagccgccacctcctcatcctcatcatccagcagcagcggcatgagtagcagccaggaggacaccgtactgggattatttacgcccaaaaaggagttccccaatgccaagatgctgcagaccatcagggagaagctaatgacgcccggcggagcctgtgaccttctggccctgggcatcgcagcggaacccacagaccagcagcccgtcaagctcatccaacagcgttatctgatcagcgcacagcctagtcacatatcggccgccgtggctgccaagactcccgcctcgtatcgccacttggtcgatctaaccgcctccaatctgcgctgcgtggacatcttcaccggggagcagttcctctgccgtattgtaaacgaaccgttgcataaggtgcaacgagcctactttcagctgcagcagcacgacgaggagctacgccggagcaccatctatggccatccactgatccgacccgtgcacgatatcataccgcttaccaaggatcgcacctacatcctcattgcgcccgtgccccaggagagggactccacgggtggggtgaccggggtgtacgagaacctgcacacctacatccgccacgcgaagcgactgtgcgagacggaggcgagggccatattccaccagatctgtcagactgttcaggtgtgccaccgcaacgggattatcctcagggacctcaagctcaagcggttctacttcatcgacgaggccagaacgaaactgcagtatgaatcactggaaggctcaatgatcctcgacggcgaggacgatactctgagcgacaagatcggttgcccactgtacaccgctccagaactgctgtgcccccagcaaacgtacaagggcaaaccggcggacatgtggtcgctgggcgtgatcctgtacaccatgttggtgggtcagtacccgttctacgagaaggccaactgcaacctcatcaccgtcatacgccacgggaatgtccagatacccctgacgctgtctaagtcggtgcgatggctgttgctttcgctgctgcggaaggattacacggaacgaatgaccgccagccacatcttccttaccccgtggctgcgagagcagcgccccttccacatgtacctgccagtcgacgtggaggtggccgaggactggagcgatgcggaggaggacgaaggcactgccgccgatgcgatggatgatgacgaggaaggactctgtcccttgggtgacaagcacgagtacgaggacattggcgtggagccattggactacacgcgctccacgctccaaatggctcagaatgccaatgggctgtccacggaacccgaacccgatacggatgtggacatgggctgattggagctcgtggagtcacccacgggttgcattctgggacacgctggcgcgttggctgcatccggctgaatgccgactgattagccgccgggactgggcatatcggatgatatgacactgtggacatcctggccttccgggtcgcgccgactccgactgcgttccacgtcgtcttcctgcaggtggtactgccaacaaagacttaaagcttagacacacaagaactcactgccttccaatcgcgctgcagc

SEQ ID NO: 40929 - protein, 484 aa, DROSOPHILA
MDNSSGQNSRTASSASTSKIVNYSSPVSPGVAAATSSSSSSSSSGMSSSQEDTVLGLFTPKKEFPNAKMLQTIREKLMTPGGACDLLALGIAAEPTDQQPVKLIQQRYLISAQPSHISAAVAAKTPASYRHLVDLTASNLRCVDIFTGEQFLCRIVNEPLHKVQRAYFQLQQHDEELRRSTIYGHPLIRPVHDIIPLTKDRTYILIAPVPQERDSTGGVTGVYENLHTYIRHAKRLCETEARAIFHQICQTVQVCHRNGIILRDLKLKRFYFIDEARTKLQYESLEGSMILDGEDDTLSDKIGCPLYTAPELLCPQQTYKGKPADMWSLGVILYTMLVGQYPFYEKANCNLITVIRHGNVQIPLTLSKSVRWLLLSLLRKDYTERMTASHIFLTPWLREQRPFHMYLPVDVEVAEDWSDAEEDEGTAADAMDDDEEGLCPLGDKHEYEDIGVEPLDYTRSTLQMAQNANGLSTEPEPDTDVDMG

SEQ ID NO: 40930 - DNA, 3624 bp, DROSOPHILA
gcgatcccatcgtgattgccggctatgtgatgcacatggcagccttcttcatgacgttcatcaacctgccgaacagtgcaccgtttaaagataccaccgatatatcctatctggacccgccccgagccagcatcgccttggtgtgtgccttccttttgggcctgggcgatgcctgtttcaacactcagatctactccatgcttggcggggagtatgtgaacaatgccgtgggagcctttgccctgttcaagttcacccagtcggtggcggcggccattagcttcttctactcctcgcacttcgggctgtacgtgcagctgggcatcctggtggttatgggaaccattggcaccattgccttcgtcttcgtagagtggggcttcaagcggcagcaccgcgagcaggaggcgttggagaagtaattccgttgtgggactcagaggatctagagtattagatgcaggttcttgttagaactctagggctagggccatttgtccgtgtttgttaaattcctcggaatgctttaaatccgtgcgactgcgtcgtcttcctagacaataactgataagtgttgttgcgcgctattgttgctaaatatacgtattttaatgttggcattccaaaaaacgtaattgtaatctagttgtctatgtttttatatgtgtgtattgtatatgtgcgtttatttattttaagcggcgattgtgcaaatataagatagtaaaccacaaatttggagtattataagaaatatataacgaattttaagaaaataatagttgttatggatcttacttgtgtgctactcattaataatagaattttgtgcttttatttcatttttcaactatttgatatatttttgaactgcctagatttcatactttgaaattcgcacactcgattacgatgagtcgatatcttttaaaatcgatagtaccatgtgcaactatcggttgtctgcccatgagcactcatttcgcccattcctaaaagaaatcattcaattttgaaagacttgaatgaaaccatgaaaaatggccaagaataagtcgactgtgtacctaggatacgaggatgaggaggttacggccaagcaggagcagctcctgaacagttgcacaaacaaaatcggtggcacacccgtaagataggcgattgcatcgacttcaatagaggcagcggataattgaaattgatttttacccacaggattggcccagacacgaggtgaccattccgtcatgcccgctgtgcggtgcagtgcgtccactgatcgtgcagatgtacgccccgctggatcgctcccaattccatcgcagcctttacgtttttggatgcatgaacccagtttgctctcagaattcaaagagctggtgttgtgtgcgcactcagcacctggaccaccagtacgaggtgatcagtgagcattcgccgaaggcaacgccaactaagaagcagaactccaaaaaaaaggggaagtcgagcggattgcaggctatcagctggtgtagtggagcggacgactggggcgacagcagtggtggagcaaccgaacaggccaagaccatctccgtggcattggacgaggctatggacatcaccgcggacgacgaccagaacgaacggaatggcaatgtgcgaccgaatgccctgcagtacgccaagtcagacatccaaatagatgaaccagccaaacttgagcaggtaaagattgccgccgatgatgacgacgacgaggacgagagcacttcgctggagaacgaattgatctctggctttcatcaaatggacatgatctcgccgcaaaacgccgacgatgatccaaatgctaattgtgcagcggccgccgctcccagtttggatggagctggagccagtgccgcctcagcggccattggtgctgagatcgagggtcccgaaacggatctggtgctggtcgacacgcccaagaagccggaacgcgacctgattgccttgttgaagcacacctcgggtgcgctgtcgcagatcaaggacctaacgctaaagtcttactatattgccgtcgatgtagagaacaagacccaggcggaggagtacgaaaacttcggaggcgctttgtccatggaccacattcgtgatttgtatcaggagtacaagctgagagaccagaatccgggtcagtcaccgaccggcggtgcatctggaccaggagagcagggcgatgagaacgagtcctacgagaaggcattgccagcccatggcgatttggtgtttcacaactttatcactaccatccatcagaatccgggccagctgttgaggtaaacattgtacttctatcctcattaactttcctcttacccaagttgttctgcttcagatattcgcgggatacgatcccgctgttggtggccccgttcacggaacctctgcccaagtgccagaattgcaggggagagaccatctgcgaggtgcagctgctgcccacactgattcccaagctgcggttccaggtgaacggttgcaatgcaccaatcgagtttggcaacgtgctggtcttcacctgcctcaagagctgctgggacacacccgacctgatgcgctacgaacatattgtggttcagtctgaaacttaaggtgccgtacacggccatttcccaaagccattagagtcattcgctgtagccgctacgattgcagactggtgcaacgaattttaaacgcaaactgcagagataaagctaagcttctcgattgtcctaggaagattttatgctctagttgttaagaacgttgtaagcttttagacactccaaaaatggatagttgctaataatatctcgttatttccactccccctctaaaagggtttcaaaacatattgttttatttccaacttgcagaaatccattctaattctaattaacctaagccaatggtgcatcagcatcaagatggtagctctttacggttgagaacctcagcgccggatatttggcctcggtcaaatcgaactcggagctgatgtccaccttgttgcgcttctgcacgagcgtgtaatgtgaccaaaccaactgggcgcatcggcgcttggtggtgcctgcgatgcgcagctcgatcaggaactgtgaggagtcctcatccactggcatgatactccctcgcctctgccgcacgttagccggccctcgctgctgcgacttttgcagcaccagagtgactgtgctcccgaagagacgatagcgaccccgaagcatttccgcccgtacgttgttcacgtgcttcagtttggatacaccttgcgccggctcatcggcagtcgtcatcatcagcaccttgccatcgggcagaaagcgaatgtagcgatagtactccaccagttgcacaggacggtagaactgatcctggaagctgttctcgcccattctcaggtacgtagtcttgctgatgtagcagccgttgaaaagaactcggtctcggcggatgaacatgtctcgccaggagtggaacacgttgcttacatccgaatcctgggcctctagagttccaacgttgtggccccatactctatacagaaaattacgataggttcattgaatcttaggcgttatttgaaagagtaacttacttgacaca

SEQ ID NO: 40931 - DNA, 1498 bp, DROSOPHILA
aatcattcaattttgaaagacttgaatgaaaccatgaaaaatggccaagaataagtcgactgtgtacctaggatacgaggatgaggaggttacggccaagcaggagcagctcctgaacagttgcacaaacaaaatcggtggcacacccgattggcccagacacgaggtgaccattccgtcatgcccgctgtgcggtgcagtgcgtccactgatcgtgcagatgtacgccccgctggatcgctcccaattccatcgcagcctttacgtttttggatgcatgaacccagtttgctctcagaattcaaagagctggtgttgtgtgcgcactcagcacctggaccaccagtacgaggtgatcagtgagcattcgccgaaggcaacgccaactaagaagcagaactccaaaaaaaaggggaagtcgagcggattgcaggctatcagctggtgtagtggagcggacgactggggcgacagcagtggtggagcaaccgaacaggccaagaccatctccgtggcattggacgaggctatggacatcaccgcggacgacgaccagaacgaacggaatggcaatgtgcgaccgaatgccctgcagtacgccaagtcagacatccaaatagatgaaccagccaaacttgagcaggtaaagattgccgccgatgatgacgacgacgaggacgagagcacttcgctggagaacgaattgatctctggctttcatcaaatggacatgatctcgccgcaaaacgccgacgatgatccaaatgctaattgtgcagcggccgccgctcccagtttggatggagctggagccagtgccgcctcagcggccattggtgctgagatcgagggtcccgaaacggatctggtgctggtcgacacgcccaagaagccggaacgcgacctgattgccttgttgaagcacacctcgggtgcgctgtcgcagatcaaggacctaacgctaaagtcttactatattgccgtcgatgtagagaacaagacccaggcggaggagtacgaaaacttcggaggcgctttgtccatggaccacattcgtgatttgtatcaggagtacaagctgagagaccagaatccgggtcagtcaccgaccggcggtgcatctggaccaggagagcagggcgatgagaacgagtcctacgagaaggcattgccagcccatggcgatttggtgtttcacaactttatcactaccatccatcagaatccgggccagctgttgagatattcgcgggatacgatcccgctgttggtggccccgttcacggaacctctgcccaagtgccagaattgcaggggagagaccatctgcgaggtgcagctgctgcccacactgattcccaagctgcggttccaggtgaacggttgcaatgcaccaatcgagtttggcaacgtgctggtcttcacctgcctcaagagctgctgggacacacccgacctgatgcgctacgaacatattgtggttcagtctgaaacttaa

SEQ ID NO: 40932 - protein, 485 aa, DROSOPHILA
MAKNKSTVYLGYEDEEVTAKQEQLLNSCTNKIGGTPDWPRHEVTIPSCPLCGAVRPLIVQMYAPLDRSQFHRSLYVFGCMNPVCSQNSKSWCCVRTQHLDHQYEVISEHSPKATPTKKQNSKKKGKSSGLQAISWCSGADDWGDSSGGATEQAKTISVALDEAMDITADDDQNERNGNVRPNALQYAKSDIQIDEPAKLEQVKIAADDDDDEDESTSLENELISGFHQMDMISPQNADDDPNANCAAAAAPSLDGAGASAASAAIGAEIEGPETDLVLVDTPKKPERDLIALLKHTSGALSQIKDLTLKSYYIAVDVENKTQAEEYENFGGALSMDHIRDLYQEYKLRDQNPGQSPTGGASGPGEQGDENESYEKALPAHGDLVFHNFITTIHQNPGQLLRYSRDTIPLLVAPFTEPLPKCQNCRGETICEVQLLPTLIPKLRFQVNGCNAPIEFGNVLVFTCLKSCWDTPDLMRYEHIVVQSET

SEQ ID NO: 40933 - DNA, 2616 bp, DROSOPHILA
gatgcgtggcccaaactggccgccgtggcctgggccacattgacgggctgcaccacgcgctggacgaagggcatctctcgctggctctcgcactcttgatctctctggcggccactagctgctccaactcattcgctccgcttcgaaggcaccggccaacataaaataaaaggtaatccaagtaatcccgacacacacacacacacacgagcacacgggcaccgaaaactggtcggacaacttctggacttgaatcctccgcagtcgcagcctcctagctattgtctactactttcggccaaattccttggccttttcacacgcactcacaaactagtttaaatcaactggtttattgctgccccccaaatttttgtggctagttctcagccttgcataattagcgcgccgcactcgaattgcccgtggttgtggcgattttaatggcccggccaccgttacgcgtcgttcgaaaggtgtgttagccggcaaaattacaaaaaccgaccgtccgcgctgacgtcttcgtatttcgccggtttcaaaataactgccagtgtgcccaatacatggcaagggcagtgaagtcgcagataaatcatctgcccgtgtgaccgttcgtccaagctgcttgagtatgtcaccgactagggttcaaaactctgcttagcttagtcaggacacactgcacacactaacagtgtgttacctgctgtaacacttaacagtgcacagtgggcattcaacacaaaacattaatatataatgcatgatttatatttatttttatgttgtatctgtttgaatatataaataaatataaaatgcaagctgacaaacccaaatcaaatatctccatgagtttcaagctgaatgttgctgttaaacatatcgatatacacagcggcagagttgccagacagcagcatgtctcagtagcttatcacccttgtcgaaatacggtcatacgactgcgaaaaataataaataaaactacagtgaaccgaatttccttagctaagataaataaattagtgcaatgccaaagtactattgcgactactgcgacacctacttgacccacgactcgccctcggtgcggaaaacccactgcaccggccgcaagcatcgcgacaatgtaaagttctactaccaaaagtggatggaggaacaggcgcagcatttgattgacgccactaccgccgccttcaaagcgggcaagatcacgaacaatccgtttgccggcgggccaggaggagcgcctcccaagccggcgggcgtgtccattccgccgcccaacatgggggctcctccgcgtccgggaatgcctggaatgccctatatgcctccactgatgaaccccatgatgggcatgcgtccgccaccgattatgaatcccatggccatgatgggaccaccgcctccactgggcactatacccggcgtccgtccaggaatcatgaacggacccaagtgaacgccctcaggaacggcatcaacgttcacagcacagatggagtgctctccttgcgatgtcctaattaagctgtagcatttaagtaagcccgatagcgaaaacaattaattatatacatttatataaagcaagttgactcaacaaatggttgtctttgtgggtggaagtcaatagagaaataaagtatatatatttaggtcagtaatgagaagcgcatgcagtcacattagagttcagcaggcataagatcacgccgcttttacggtgcacacattattatgactttaaaaaaccccgcttcagaaaaagataacaaaaatcaatgctagagaaggcatttaatgatttcattgtccaacacaatatagttaaaatgcaagtgaactgaaatgctaacacaaaaatagtaggtgccttgcctttaacataaacattcacagtttttattacaatattttgagcttacatactagttgctgtgaagagaatataatgtggattataattgttaatatacgaatgtgttaatcattggctcgaagtgtaagtttctgcctttgtcccgcgaatcggctcgtctaggcctcttataatattattttaaacgtctgtactacacacaattaggtactaatgggataatggttatctggcgaccctctggcgcttgctgggcgacaccagaaccggcgagggctgttggttacttgagatggcgtcgaatatgctgctctccgagcgctggtactcggtgccaatgttttccaggttcagatcggcatcgaggactaggacctgaggaaaaatgcatatttagcggcttcggtagatgtgagcttgtgtagaaactaccttgcacgactgcggtcgtctctggtgtatcaaccagtcctcgtgcaactcatgcagctcctgaaggtacttaagcggcacgcagctctcctcagaacgagcccgctgccggatgcgttcgtacgccacctccggcgaggtgcgcagatatatgatgaggtccgcctgcacgtgaatggactcttcgatgaacttgtaccactcctccagcgtattgtacatgccctgctccagcgagccgtttcgtcgcatgttctccacgaagcaatagctgcggcgcgatgggt

SEQ ID NO: 40934 - DNA, 616 bp, DROSOPHILA
gaaccgaatttccttagctaagataaataaattagtgcaatgccaaagtactattgcgactactgcgacacctacttgacccacgactcgccctcggtgcggaaaacccactgcaccggccgcaagcatcgcgacaatgtaaagttctactaccaaaagtggatggaggaacaggcgcagcatttgattgacgccactaccgccgccttcaaagcgggcaagatcacgaacaatccgtttgccggcgggccaggaggagcgcctcccaagccggcgggcgtgtccattccgccgcccaacatgggggctcctccgcgtccgggaatgcctggaatgccctatatgcctccactgatgaaccccatgatgggcatgcgtccgccaccgattatgaatcccatggccatgatgggaccaccgcctccactgggcactatacccggcgtccgtccaggaatcatgaacggacccaagtgaacgccctcaggaacggcatcaacgttcacagcacagatggagtgctctccttgcgatgtcctaattaagctgtagcatttaagtaagcccgatagcgaaaacaattaattatatacatttatataaagcaagttgactc

SEQ ID NO: 40935 - protein, 145 aa, DROSOPHILA
MPKYYCDYCDTYLTHDSPSVRKTHCTGRKHRDNVKFYYQKWMEEQAQHLIDATTAAFKAGKITNNPFAGGPGGAPPKPAGVSIPPPNMGAPPRPGMPGMPYMPPLMNPMMGMRPPPIMNPMAMMGPPPPLGTIPGVRPGIMNGPK

SEQ ID NO: 40936 - DNA, 3950 bp, DROSOPHILA
ctcctccccatccgactgacctagatccaattgcttggccaaatcgttagccagattgaggtacttcttgctgacatcgttgctgagcttttgcttctgctgctcgtagaacctgaactcaatatccggaacgatttgggtggccttcctgtagaagggtagtgcgtcgtagaccttgccacgctgctccagctgcacagcggtccgatagagactctccgccttggcctgcagtagatcagcctcgctgagattggaattggccgccgtgaggcgatctccagcctcggaatggctcctggatccagtgtttgttgtgtgttcctgcagctcccgctgccagttctcccggaactcatccagtgcattggtgcccgttttccgggttggctcctcgccatccgagtccacatccgacatgattagagctagaaactagtctgcgaatgccaatcagatcgtagattataaacatctgcgcatttatctaacgcaatttctaacctgaaagattttagtattcgatgtggaaaggtacggaagttggtaacaaaatagaacttataataaagggccgcgcgtattgctgattttgggcgcgggcttcaccccagaatttcgtagttgtatgcaactgggagcaacatgtggccattggtaagaccccaagattaagagtattcaaatacgcaaacgagaacacttctacactaatgttattgtttacagtgtgcacgcatttgcttaagaagtaattcttataaacgctcttctttaaacattgacttactgatttcgtcaatttcaaaaaggttatatttaagcgaaattctcccaaaatgtgcttctaattagtattctataaagatatttacaattactaaagatcaatttgaaaatcgatatcatatcatatgcatattcgataaatatttaaaaacagctgacttcaacgcggttctgttttgttttggttgctcatttgctgattcgcactatcagcaggtaaaaagtgatattaaaaattaaagtggtttattaaaatggaattttaggaaccatgtcagccgactactcccatctgagctccgccatcctggagcagtgctttggcaaggtggtgcaggcggtggccgactgcctcttttcggccaccacgaggaccctgggacagatcaccagtgccaccaagttgtcgaggaaggaagtggcatttgcgctggcggtgctggtcaagttcaggctggtggactttgccgcctccaaggcaaaccccttcctggcggagtacgccctccggcgcgaggatgttctctgcctcctaaggtatcctcggtatgtaaaatcgtacataaaagatatacgaagtttcatgttttaaaatctattcggtaactttctcagttacgttcacctggtgcaaaccaagtacggaaatgtgggtgcttccatttcggaggagttgattaattctggatccgatacggcaactggaattctgctaaaatgcctagccgagaatgaaaacaaggcagaaagtccggagtcctaccgcaacacctttctcgaaatgatcaccgatcactatatcatcaagagaccagaactgctggtgggcgacgaccaggatgagaatgtgccaaagtttgagaccaacgagtgcgatttctttaggcatcccaatattgatcttcagttgctggccaagatacaaaaaggagaagccactctagcggaggccagggattctcacatggtgtggcacctgaaccacgatcgctttcatcaagactttcgagacaccatcatggtggatgctattgagcgaaaactgggtgaaaatgctgcagagtgcttcaaattcatattaaagattatgtataacacaactgatccgtgggaaagagtgagtttcaagacaagcattgtgcttttcaaaaattcataacatatatatttatttttgcagaaactctccaatcaaataactttcgttgaaattaaacaggctattgaaagaaaatcgaataacctggatctcatgaagtacttggaccagtacataagcctattgagtgagtataaatggcaaaaacgaatgaatacatccttaaatattgtcctatttttagctgaggactcactgggattctttcgaagagttggcgacatgggtggtggtgtgtatgtggtggatatggaacatgccttcgagtcgctggcctttgcttgtgtggagtgtgtcatcacggaacgatttggctcaaaggcagcccgaatatttcgagtgattcgatgcaagaaatacatagaacaggaggacctgcaaaaggaggccatgatcccatccaaagaggccaagtcgctggcgtataatttgttccaggaacagtttattcatgtcaagattattaagaagcctggcggaggcagtaatggccccgcaaaggcattttacctcttccaggtcaaggagaaagatgtgagtgtggtcgaggaaaagttgttcttctatctctaatgttattcatgcatttcagaccgtgagaatgctgcttgatgccagctacaaatccctttataacacaatagagcgatctaacttcgaaaaaaatgagcacaagggcctaattgaaaaatcacaaaggctggacagcatcgtagaggccatgaaggaacgtggagagacggacgagtatatcgcagaggtacatattatttaggttgatagggaagtacattttaagcagctccctgccatttcagattgttgagactttcacgccgccggaatgcgagatccttaataaggtgaaaaatcgcataaagaccttgtcaaaagctgaactgaccctagacgatacaatctttcttctgcaaatgtatcagcatcattgcactacgctgccaacgggtattcgtaaatttaaataaattgtaatcataagggaatcagattgtcttatttattcagaagtttttcgtattgcccgaggagaggcattttgaagaaaactaagactatgcattttctgaacatttacgatcagcatcttcttggaaaatcatttttatggttactgccgacattttaaagtatattagactcaaatttattaaacacacatatgcgaatgaaaggactgcacactgaatcacaggctatataaataaggtatgcataaaagaaggctagttgctttcaggagtaattacactccgcttccggtgcacaatacgctgctcgcgatgggctttctgcaatttaatgaaatgttgttccaaggcatcgaaatcaatgccacttttgtactccagtgagttgcgttcatccctgcggattaaaaaaagctgcattgaaggtattaactcgaggaaatatcttacacaggttcgtgaccccagtagttgggcacgcattgcaaacgattccgaagcgtgtcaaaggcttccgtctgcggtagcagcattaggatgccaaacagggcatgagccaagtactgagcatccgcgcagttattcgctttggaaacaagcgtaagacgcaaaggagcaaatatgggagactctatcaactgaaccagtttgtcgaactcggtcagcagctccaaagtgatttcaacatcggcactgcataataataataaatacacattcaataaactaagcaagggagccatacgtattaatcacttacaatagcgtaaccaagcgggacacatgttggtagctctgggtgagcaggcacaaggaaagtgtagacactggacagtgggcccagctcttgtagagacattgaaagagatccgctgacttctcgttggatatatttcgcaaactagtacgcaattcgaatagctccgttgatgtaagtagaatcatgttcagcaggcgcacaaccgtcgaagcaaacttcaagttgggcacgccctccgctattatttcagcaa

SEQ ID NO: 40937 - DNA, 1704 bp, DROSOPHILA
agcaggtaaaaagtgatattaaaaattaaagtggtttattaaaatggaattttaggaaccatgtcagccgactactcccatctgagctccgccatcctggagcagtgctttggcaaggtggtgcaggcggtggccgactgcctcttttcggccaccacgaggaccctgggacagatcaccagtgccaccaagttgtcgaggaaggaagtggcatttgcgctggcggtgctggtcaagttcaggctggtggactttgccgcctccaaggcaaaccccttcctggcggagtacgccctccggcgcgaggatgttctctgcctcctaaggtatcctcgttacgttcacctggtgcaaaccaagtacggaaatgtgggtgcttccatttcggaggagttgattaattctggatccgatacggcaactggaattctgctaaaatgcctagccgagaatgaaaacaaggcagaaagtccggagtcctaccgcaacacctttctcgaaatgatcaccgatcactatatcatcaagagaccagaactgctggtgggcgacgaccaggatgagaatgtgccaaagtttgagaccaacgagtgcgatttctttaggcatcccaatattgatcttcagttgctggccaagatacaaaaaggagaagccactctagcggaggccagggattctcacatggtgtggcacctgaaccacgatcgctttcatcaagactttcgagacaccatcatggtggatgctattgagcgaaaactgggtgaaaatgctgcagagtgcttcaaattcatattaaagattatgtataacacaactgatccgtgggaaagaaaactctccaatcaaataactttcgttgaaattaaacaggctattgaaagaaaatcgaataacctggatctcatgaagtacttggaccagtacataagcctattgagtgagtataaatggcaaaaacgaatgaatacatccttaaatattgtcctatttttagctgaggactcactgggattctttcgaagagttggcgacatgggtggtggtgtgtatgtggtggatatggaacatgccttcgagtcgctggcctttgcttgtgtggagtgtgtcatcacggaacgatttggctcaaaggcagcccgaatatttcgagtgattcgatgcaagaaatacatagaacaggaggacctgcaaaaggaggccatgatcccatccaaagaggccaagtcgctggcgtataatttgttccaggaacagtttattcatgtcaagattattaagaagcctggcggaggcagtaatggccccgcaaaggcattttacctcttccaggtcaaggagaaagataccgtgagaatgctgcttgatgccagctacaaatccctttataacacaatagagcgatctaacttcgaaaaaaatgagcacaagggcctaattgaaaaatcacaaaggctggacagcatcgtagaggccatgaaggaacgtggagagacggacgagtatatcgcagagagattgttgagactttcacgccgccggaatgcgagatccttaataaggtgaaaaatcgcataaagaccttgtcaaaagctgaactgaccctagacgatacaatctttcttctgcaaatgtatcagcatcattgcactacgctgccaacgggtattcgtaaatttaaataaattgtaatcataaggg

SEQ ID NO: 40938 - protein, 502 aa, DROSOPHILA
MSADYSHLSSAILEQCFGKVVQAVADCLFSATTRTLGQITSATKLSRKEVAFALAVLVKFRLVDFAASKANPFLAEYALRREDVLCLLRYPRYVHLVQTKYGNVGASISEELINSGSDTATGILLKCLAENENKAESPESYRNTFLEMITDHYIIKRPELLVGDDQDENVPKFETNECDFFRHPNIDLQLLAKIQKGEATLAEARDSHMVWHLNHDRFHQDFRDTIMVDAIERKLGENAAECFKFILKIMYNTTDPWERKLSNQITFVEIKQAIERKSNNLDLMKYLDQYISLLSEYKWQKRMNTSLNIVLFLAEDSLGFFRRVGDMGGGVYVVDMEHAFESLAFACVECVITERFGSKAARIFRVIRCKKYIEQEDLQKEAMIPSKEAKSLAYNLFQEQFIHVKIIKKPGGGSNGPAKAFYLFQVKEKDTVRMLLDASYKSLYNTIERSNFEKNEHKGLIEKSQRLDSIVEAMKERGETDEYIAERLLRLSRRRNARSLIR

SEQ ID NO: 40939 - DNA, 3880 bp, DROSOPHILA
gtttctggtcaaaccggacgacgggaataatgcactcaccgagcgctaaaaatggagcgctccattatttttagcttcttgttggttggggcggtgtgcgactgcagcatggtcagcgtgacataactctgaaagggcatggcccacttcttgggatctttgtacatcagctccagcagatttaccccgttgacgttgcgccacttctcgacgggctcggtcagcaggcaaatgtcgttcttgtacttctcgaagtggttcaaatacgtggtcttcccgctgccgatgttgccctcgatgaggacggtgaagggctgggtgccctcggcgtacttggtcccctttcgggcacaggatgctgcctccgccatcagtccggataatcggcgatctgcacgtgagattgggagttttactaactgttttaggtacagcacagcagcaacggatcgcggttgaagttgattgttccggattcgatggagtactgtacacggcggcgggaatatggtgactgattcaacccgcctggtcagatcgtttaccgccgaaaaacaaaaagagcgggaacatcgccatttgtttcttttttttttaatcggtgttacctatcgttatgcttgtttttgtcaaccggctgatcggtaactgtgtgtgtgtgtgtgtgtgtgtctattctattgccggtaatgtttttacatacatctttacaaaaacttaaagtttaagccaatgctggttgaattacctattaatgatataatgtttttctgccacatgtgcttgctggacattgctgtttttacaaatttattaaatacaaataccactgatagcaataaaattaaacatttattgctcacaacttttatggcctcttatttattttatttaacgttgtgaaatgaattttctttttgcctatactgagaatcagctgtcggcgataacgataacggtcagctgttctgtgcatagtatctgtttttcgccatccctacgacgacgcattttttatcaatattattgtacatttttataaacctgtattaaaacttatttttaaaaggaatcttaaaccgggaaattagtttacgatgtccatagaaatcgaatcagcggagtaagtactgtaaatcgaccaacaccactcagtttttactagatccgtgatttcccccccaaacaaagtgtgattcggctcatccagcagtatctgaaggagtccaaccttatgaagaccctgcaaacgttacaggttagtacttacacaccgcggagagagtttgtctttcaatgatcttaaactttcaggaggaaacgggtgtctccctgaatacggtggacagcgtggatggctttgtgcaggatatctccaacgggcactgggacaccgtgctaaaagtgacccagtctctcaaattaccggataagaagctgctcaatctatacgagcaaatagtcttggagctgatcgagctcagagaactgggcgcagcaagatctctgctccgccagacggatcccatgaccatgttgaagcagcaggagcccgaacgatacatccatttgggtaaaatataagccattctaaggtttcactagagttcgtgattcctaattggtatatttgtctgtagaaaacatgctgcagcgcgcttacttcgatcccagggaagcctatgcagagggaagtagcaaggaaaagcggcgcacggtcattgcccaagagctaagtggcgaggtgcatgtggtgccctcctccaggctcttggcactcctgggacaggctcttaaatggcaacagcaccagggactccttccgcccggcaccaccattgatttgttccgcggcaaggcggcgatgaaggaccaggaagaagaaatgtatcccacccagctgttccgacaaatcaaatttggccaaaagtcgcacgttgagtgcgctcagttctcgccggatggtcagtatctgataacgggcagtgtggacggtttccttgaggtgtggaactttaccaccggcaaggtgagaaaggatctgaagtaccaggcgcaggaccagttcatgatgatggaacaggcggtgctggcgttgaacttctcacgagattccgagatggtggcatcgggcgcacaggatggccaaatcaaggtgtggcgcatcatcaccggtcagtgtttgcgtaaattcgagaaagcccacaccaagggaataacctgtctgcagttctcgcgagataacagccaggtactcagcgcatccttcgactacacggtgagactgcacgggctgaagtcgggaaagatgctgaaggagttcaaggggcattcctcctttgtgaacgaagccacctttacgcctgacggacacagcgtgctcagcgcatcttccgacggcacagtaaaggtttggtcccttaaaacgaccgagtgcgtggccacgtacaagccccttggcaacgagttggccgtaaacacagtcctcattctgcccaagaatcccgaacacttcattgtctgcaacagatccaatacggttgtcattatgaacatgcagggccagattgtgcgatccttctcgtcgggtaagcgcgagggcggtgcctttatctcagccactctttcgccgcgaggagagttcatatactgcgctggagaggatcaggtgctttactgtttctccgtctcctccggtaaacttgaacgtactttgaacgtaagctgctctttaaactatttgttttcaaactgactttaaacgtgatatttattccataggttcatgaaaaggacgtcattggcctgacacatcatccgcatcaaaatctactggccagctacagtgaggacggcctgctgaagctttggaagccttagaccatataagcaattgactttcacacctagttagttttagttggtggtcttatttgagctgccgaaatatacctactgaccccaaagcgcttgcagtttttttctcatgccctcagccattcctcacatcaatatcttcaatcttgcctatatgaaacaaattgactttaattaagcattatgcaaagcgccaatctctcagagcgctaatccacagagtttccctcaattgcctcaatccagcacctaaattagtcgagcagcgacactcagccggttcacttgcaacatgaagagcgacgagatcatcgagaagatacgcaacaagttgaaggaatcggatcctgcccggcgcaccgtcgtcaacacgtttcagttcaacttcaccgatgcggatggtaatctcatcaagagcatgggtgagtgggaaagaggatgcctggttgtgggtcagcccaccgttgaccgtctcatcgtagtctttgatttcaaagcgttggacatctacgaggggagtgccaccagtgtcgatgcacaggtcaccatttccgatgaggacttctacttggtgggcactaagcagaagactttccaggaggtgttgcagcaggagaaggctaagatcgatggcgatgaggaggctatcaacaaaatgctggagaagtttcgcataaattctcaaaactagctcggtgtcaaaagtaattatgcatgcatttcgtttattatatgcgacaatttaacgtttattgtttattcacttcaccccaataataaattataacaaattaaaatatttctatttaattctaagggaagtcaagaaagaaattagtaggagttacaacaattaaaaaataaacaattatcccaccaaaaaatgtaatcaaatcgtgacttatttaattggttttagtattcatttatttaattacctttatttatatttaatgttaacatggaattgtttttgtaggtgtttccttttaatttgaaattt

SEQ ID NO: 40940 - DNA, 1627 bp, DROSOPHILA
cgacgacgcattttttatcaatattattgtacatttttataaacctgtattaaaacttatttttaaaaggaatcttaaaccgggaaattagtttacgatgtccatagaaatcgaatcagcggatgtgattcggctcatccagcagtatctgaaggagtccaaccttatgaagaccctgcaaacgttacaggaggaaacgggtgtctccctgaatacggtggacagcgtggatggctttgtgcaggatatctccaacgggcactgggacaccgtgctaaaagtgacccagtctctcaaattaccggataagaagctgctcaatctatacgagcaaatagtcttggagctgatcgagctcagagaactgggcgcagcaagatctctgctccgccagacggatcccatgaccatgttgaagcagcaggagcccgaacgatacatccatttggaaaacatgctgcagcgcgcttacttcgatcccagggaagcctatgcagagggaagtagcaaggaaaagcggcgcacggtcattgcccaagagctaagtggcgaggtgcatgtggtgccctcctccaggctcttggcactcctgggacaggctcttaaatggcaacagcaccagggactccttccgcccggcaccaccattgatttgttccgcggcaaggcggcgatgaaggaccaggaagaagaaatgtatcccacccagctgttccgacaaatcaaatttggccaaaagtcgcacgttgagtgcgctcagttctcgccggatggtcagtatctgataacgggcagtgtggacggtttccttgaggtgtggaactttaccaccggcaaggtgagaaaggatctgaagtaccaggcgcaggaccagttcatgatgatggaacaggcggtgctggcgttgaacttctcacgagattccgagatggtggcatcgggcgcacaggatggccaaatcaaggtgtggcgcatcatcaccggtcagtgtttgcgtaaattcgagaaagcccacaccaagggaataacctgtctgcagttctcgcgagataacagccaggtactcagcgcatccttcgactacacggtgagactgcacgggctgaagtcgggaaagatgctgaaggagttcaaggggcattcctcctttgtgaacgaagccacctttacgcctgacggacacagcgtgctcagcgcatcttccgacggcacagtaaaggtttggtcccttaaaacgaccgagtgcgtggccacgtacaagccccttggcaacgagttggccgtaaacacagtcctcattctgcccaagaatcccgaacacttcattgtctgcaacagatccaatacggttgtcattatgaacatgcagggccagattgtgcgatccttctcgtcgggtaagcgcgagggcggtgcctttatctcagccactctttcgccgcgaggagagttcatatactgcgctggagaggatcaggtgctttactgtttctccgtctcctccggtaaacttgaacgtactttgaacgttcatgaaaaggacgtcattggcctgacacatcatccgcatcaaaatctactggccagctacagtgaggacggcctgctgaagctttggaagccttag

SEQ ID NO: 40941 - protein, 486 aa, DROSOPHILA
MKTLQTLQEETGVSLNTVDSVDGFVQDISNGHWDTVLKVTQSLKLPDKKLLNLYEQIVLELIELRELGAARSLLRQTDPMTMLKQQEPERYIHLENMLQRAYFDPREAYAEGSSKEKRRTVIAQELSGEVHVVPSSRLLALLGQALKWQQHQGLLPPGTTIDLFRGKAAMKDQEEEMYPTQLFRQIKFGQKSHVECAQFSPDGQYLITGSVDGFLEVWNFTTGKVRKDLKYQAQDQFMMMEQAVLALNFSRDSEMVASGAQDGQIKVWRIITGQCLRKFEKAHTKGITCLQFSRDNSQVLSASFDYTVRLHGLKSGKMLKEFKGHSSFVNEATFTPDGHSVLSASSDGTVKVWSLKTTECVATYKPLGNELAVNTVLILPKNPEHFIVCNRSNTVVIMNMQGQIVRSFSSGKREGGAFISATLSPRGEFIYCAGEDQVLYCFSVSSGKLERTLNVHEKDVIGLTHHPHQNLLASYSEDGLLKLWKP

SEQ ID NO: 40942 - DNA, 14209 bp, DROSOPHILA
aatacctccgatttaagcagaagatactttaaaacatatacgagaacgtgaataatgcactcggaatgcaaaattcaatgcaacacatttaaagcaaagcgaaatgtacaaattcagcatatacttacaaatatatttcctacaaatagtgtttatttattgtagcctaatggggacactgttgaaaactaaaccaaaaatgagggttaacaccacctaatatataaatatatacacatacaaactacaagacaacctatattcatatgaatgaaatgtatatgtaaacttaaatgtatgtgaatttaaattattcggtaaataaataactaaaacaaagaagagctttattcaagaggtttttatatccaaaatatatattttcaatgggccttctgatctgaccacttgaaaaaagtgcccgaaactatgttagaaatgaagcaagatttgaacttggcgcttaaaagcagttcaagcagttcgaatcagttggcaatgcgaaaataaaactgccggttcgtgactcggctaatagttagcaaggacacctatttggtattttgcgactaaacttttttatttggatatgtttacttttgtttccatataattaaaaaaaaaaaatcattacaattttatattttttagctggtaattattttctacatttaagacatgccttgtttaagcttctaagaatacctattagaaaataaaaatttttacatatattttttatgaatattgtgtcacatacgacatgacacaaatcaaaaggtatttataaaaaatatagaaaatatgttaaataatcgcccaaatgaaatgttccgtttgtttagctagaaaatcagcaacgagtcttatatatattttgaaataaactaaaatgcccagttttatgcctgccatttctctcagtgcatttttcagagtcgcttataacacaaagtgaactcttgtctgcgctcacactgtttccaaccgtcggatcgtgcggacgtaaaagtagaagatgtcgcgcgtcaaatgtgttgatcgcgaaccaaaataaatcaattcaataataaaaagcaaaagtgtttcttcaatcaaaattatatgacagtctgctcaaatttataaaataaatacttaagcataatccaaaccaaagtgtgagtttcaacgagtgagcgcagtgaacccggtaaacaaatcaaacgacaagtgtttgtgggatgcatttgggtgcaatgtgttaatggacgtgtgtgtgtgtgtgtgtgaagcttttggaatgaatgtatgtacgtgcaggtccttttgcggctcctttgcatccctttttgcaaagtggcgctattttctgtttgatgcatattgttctcccattgcaatcaaaacggagttgaagccacatgtacagtggagattgcctatatttagctggctctcaactttacagaaaacataagaataacgtagtgtttgaacaggccaacttaaatcttatttgcttacattttgtatataaaactatgtaaggatagtttcgattttattaccaattggatattttcagaatttcaaaccgggttttaaataatacgtttcgataatttataatttccctaagcaaagttgtcttacagaggtaagactgtagggccaaagacaaaggcttctacttctccgctcaacctcaagctgcatatgagttaatatttgtctagtttttgaacatgccgcttttgtctcagcctttgtgttcctactcggattcgtctgacgctgacgctgaagttgacaaaccaaccaggtcctggtccactttggatcacggcgtctttgaggggatggcccgggggctgggggctggtgactggaggctgatgactgggcgctgtgggcgaagggatataggggcaccctgccggcatccacatcacagcaaatagctccactttccactctcgctgaaagtgctatccttttgcaggatagcggcgctggctgtggatgagcgggtgttcgaggacgactctctggcgctgtaaaatatgcaattagaaagacatcaaagcacagtcaccgctcaactcaacgctgatagcccggctaccctcctccacccacctttcaccaccaccccccccccccttggtagtacactaccccttcctctgccgcctgctttggtatgcgctttgacactgccacagacaggcagtgcaaaaaatatctaaatggtttcaaaatttaatgttaaatacatttaaattgttgaacagacagacatttttaaaactttaaaatttattaaaagctatgagcagtaagcgatttaatctataagttacatttttatgaattttaattgttctagcttttgtattttatgttatattctagatatttccttgttttgtttctttttgaatttttgagcatttttcagtcgatttatattagcttagaactttataaattttttttataataatatataagcacgaatgtaaattagttagtttttttttagtgtgcaaagtgcaaggacactaggcgaaaggcagaaggggcgcaaaagaaggctttcgaagtacccaacccgaaacgagtctcatcattagtgctcccccgccattgccgtttgcgtcactttgtcggccgctaccgctggcgctttttgatattatttatttatattttttacttttaataaaatgttgtcgccgttgccgttcggcaatgcccccgccattttgcctttgtgaaaaacggcggagcgcaggcagcgaagagttgggaacgttttgccaaactcgcgaccaagcgaggtcaattggcttaattactgtgtgacatcgtgtggacaagtgatatcgatggaggcgtcttcgaaatgccttcacattcgccaccgagtaagcagtcttgcatttattcatgtatatttcaacagatagcagtccaacttcctatcaatagaggcccttgtgcgggagaccattaaatttaatcgtttttcgttttttgtctgcgtttttcaatcactatctagtaacgagcatcgcagccccactgtccataaacatatacactcgaaaaagcaagcttaaatgttgaaagccttattgaattaaagttatttggtaataaaaataaataaatgtagcattgactccttaaaactccaacactgccatcatgcatttgtttaaattatagaactaaaaataaaatttttatttatacctcaactttttttttctgtgcaggaaaaatcagtttttatatagtgtaaagtagtgcgtaagcggtcgcttatcgaacggatgccaattggccatgtgtgtatgtggatgaacccagcgagacttttgacttgtgacacgctcatttcctttggccgcaaccagctatcagtgtgcacaaaatgcactcgacattataatcagaacaaaatacaaacaaacaaacaagtgcatttaaatttaaaactcagacaaaacaacgataaaaatgcgcctgagtggctgggaaattctcctgttcctgctgcccttcggagtggtcagtgctgtccggcagttggaggaaaatcagagcataaagaatgatcaccatcattcggtggagcgacaggtgcgacgtcgaaataataaaagtaatgcctcagtggatcaccatcggcatgcgccatctagcggatcaaagaagaacagtcggagccattctgtaagcctggattcggatgactacgattggctggatgcggatactagtgaggcaatcgatagctccgaggtcacggctgtggaatctataagatcacccggagaatcatatggtaagttgataagaaattttagcactctgaccttttacttacacattaaaagcagccgcttatcagtttggtttgacccactcaagagtgacaaatgatttagaaatatattcaaaattctatgtgaaaaaaaatgtgttaaagcaaaacagaagaacatagtcgaatactttatcaaaagtgcatatcaaatcagagaatcgtcagattcataaaaattatcaatattttattgggtaattctccccttctgcatatgatatgcaacatacctacaccatatatattttgaattcgagttcattgctatgaaaaaaaaactggttccttgattcatttgaacgttgtcactttcattcacttccctttcgagggcccgcatttttagggctggtcagttcgcctgcaaatggaggaaacggcgaaaaagtataaacattttacagcccctcccactttgatttgcatgtaaatggaaccacactcgcatccactcacttaatcaaaagcaataatttgcctttgagcgcgaacgaaatgttttaattgaaagtgctgatgctgatgacgatgatgccactgttttcagatacagatactcgcaaccgaatgagtgcgtgcttgtgctcgtatctaaattgaaactgtgttaaaaattagtttaaattgttgcaaagctgggttgcctgatggcgccagcatatgtacgaaactcaagtaggaatccaagatatgcttcattctcctcgctgcctgttttattaactcgctgctcgagtgaattatggtgggctggggtgtcagtgtatgataaatgtgttagatttccaatgaaattttatggcctgcacatacatatatgtcgccgccttgagcttaactgattgtactgtggctcttttttgcaaaaggaaattctttggctcaacagcgcgatgttgtgcatccgaaatgatgtggattgtgcggcatttgaagtgttttgcatacaaatagccatcgttgatgtttcattcgaatgggctgcgatcgtaaaatagctattaaacaatcatttttgttgcactcacgttaatcaaacgggtggtcggatgtgtccactccttttgatggaagttatcttcccgcaaatgccgacaacttggcgacaaatcagctgcgacacttgacatgcgacagcgaatccggagactgccattcagtggatttctttatttatagaagtcaccccattccacaaatccaaacaggaaagatatatagcatacaaaaaatagtattaaattagaacatgacatgttggatggactgaatatcctttttggtttttatgcattaagccatcgaaaaactcatacaaaataaaaactagtctgaaattaatttatacatatttatttaaattattttcaaaaagattacctattttttttttgcgtgtggtgcgttgacaagcaacttagatcattggccagaagaaaaagaaaccatcggaagactgcgcaactttgcaactaaaactgaaattaagatacacaataaaaatagcactcaacgacacactatacgcagagtagcacgcacaaatgaaaacattaacagttttaaaaataaatgcaaaataaaaaccaaatcagaagaatcggagaaatgtccaaatgggatagaagacaacgcctgggaaatcaaaatggcattttccaaaagatttgtcacagtttcgcacatttgcacatttgattccccaaatcgatgttcacaggccacaaccaaatttatttcggtggacttcaaagtaaatttctgctaaaattagtcactcaacccgagaaaaagataaaatgcgactgccccggactcgcttggccgaaatgaaaatggctgagccaaaaatacgtgagttttcgaaccagaaacggtggaaatcttagcagttttcactccaccccctcatccatagtttcttgccctgctttggcaattgcacacttaattaatgggcactgcttttgatcttctgtgaagttcagtagccccccaattcctgacgcaagtgacaaaaactgaaatttttcacgcactcagcgaaactctttgaacccgccctttacgcccagccaactgtcacacgtccaagtgccacggatgcggagtttcgagtccggagatcggggacatgtgtcgcagatgtcagacatgggaaacgcttccacatagtgatgggcatcccgacgtgatttcaaaaaagtcaaatacttttaagtgatcttcaaagaaaagatattgcattcgtgtcacgacttacagttctctgccagcaaactcattcatattcatctggttgggatatgcagagctatctccttgttcaatctgtggcccaatcagaataatgtcaattataggtaggtgagacaagctgttacaattgacagtgaattgatcttcaagatcttacaaggaatttaaatcagatcgctggttgaactttaacaagctaaaactggtaactgggtaatatatttcatgtttcaaataccataaaatatttctttttatattaattatgcataatgcatgattatcttgtgaacaaaactttttgttatatttttgcccatcctatcacgctaccatccctgatcccaaaaccgaacaactcattgtgtccccccccttttttttcgcaagaaaagttcaacacccaatgagcaatcctccaaatgaaccgcagccagataaaaaggggaacggataaaaaaaaaaaattggaaaggaaaacaagccttaagtgcttaataagtaatcagtcaccctgggtactcgtagataagcaggataccattccagccacctaattagtgcgacaaacgaaatcccatccccgtgaaagtccctgtgtgatttgtgccagaggaagtgtatgttgcaacagattcagcacaacatgtggcgatcatgatcatggtcatgatcacaagcgggaatcaggaatcgggcatcaagcgaatctgcgtgcaatccgctcctttgacagatatctctctgccttccgtggcatttatttaaattataatttactgagtggtgtcaaaatgcgtgagccaagccattaaaccctgatatgctgcactttgccaacttaacttcttgttttccactcgcaacatgcttattttctgtttgtttgcttctcttgcagatatcttcacatgttgcaatcaggtcttcggctcatgtcgcacagcatgcgaaaatgtaagtatcggcgatcagaggaaaggcggaaaaaagggggtcttagtgggtaggattgatcatatatcaaaaatgcgtatgaatgcgtatgagtggatgcaacgggtgatacagacaatggcagcacattaataacaagctcaaaaatctcttttttttactattaacttgggattcttttttatatattcttgaggttatcatacgaatattaaaaattcttttttcaaatatttccttcggcctttgcatagattttccattctaatacttaaactcataactatcttaagccaaaccgatgtggcaggcgccacttgcacagtgaaaaccaactcgaagggaaatgatgtgtctgtcataaatattaaacgttgctgccccacaggcaagtggccataagtatgaacacctcggacagcagatcagatacagattgaacaagccgataaggtggaaaaactactgatcaagccacaatgcatttcctggtatttttatgtgcccatgaatcctcttttccctcgttatgaatggagtacgagcggtgcatgccaagcgaaataaatttagaattcaataaacgttgatccgtcgttggactgtcacacgcagaaaatgcattgaaaattattatgacaggttttaatggtcgttcgatttcggtggaactttgaataccatatccacatccgctggcagccgatttcagattatgaagccttgtgccaaaaaggattgaaaaatccgcacaaattgcattgttaattagcataaactggcaaacaggtaattgcatctcaagaccgaacccagaccaaaagcccagtctgctacagagaaaataaaacgtatatagttgcaatatcaataattctttattggttgtcacataactcaatttgtgacaaatttgttaagaagaaaatacgaattaaatagatcatccaagctagttataatatgactcaaggcagaatttatattgttcatttaatttctttctctgcaaatggagagccagacgaaccagtttgccactcaaagtcattcataaaaaccgagccggctgaaaatcaatttgttgtctttgtgagtgagtgagtgtcgtgtggtgcagttttgtcggtagtctgctctgctcctagcccctagatttagttggaggcaatgccggcaatcaaatcactgacatcatttaactttgtaatcataaccattttccacccaaaaccaattagttttcccaacagaaagtgggctgcggctttgccaatcttttcatttagaaatgcaaatgaaggcattaaatcttttggccaaattgaaactgacaaacaggataacgccaagccaaccggttgcgttcccatgggcgttacccaaatccactttgctcggctctctctttctctcatttgtgtgcgaaagattagagagttagatcttacaagtgggtgtcgggaaattggagaccccttgatatgcgactccccactcacaaattgttctattccttatccactgattgtgtgaaaagtcgaacccgagacggcagatcatcccaagataagtaataatttacgcccattttattattgacaaaatgctctggggtctgataattgcaacaggcaattctgtgggctcctatctgatgggattcggtgcccaggtgggcaggttgtcctcgaggagtaggttccggtgggatgccagagtagagttatccgagtgtgtgggagtgcgtgacatggccacggacacttcattaacaaaactgcaacagacatgcccgaggcccggtcttcaaagagggggaacacaacccgggaacacacatgcacgaagtgcgttccattcaggggcgtagtcgatagaaggcaccctacaattcggaaattaacatatgattaaatagatgggcggatatacctataagtgtcctatcaacaacttttcaaaatagaaacataattaaaaagggtttttactctaatagccatgtttcatctttaatattagttaaatgtaggtttataaatgcataattatatcgactgggaatatctatatgatattaacgcttgatttaactaaaatattattttaagttcatgcacatcttttggtaccaatatctccaccaaaatgcactccccgttgatcacattgcatctccacctcagtttatgttaatttgtatttatgggaatgccaccaggctcaagatccagacaagttccgaggacaagcacacgaagtatcttgaatagacatcgctttactcagattactgtggcagatacgatgcgacgcagtgtggagtgagcctgaaaatttgttattgaagttcccttggcctgttttttttttttttttttttatcgatagaaagagcgagagcgggccaaatgttatttatgatggtgtcaggatgggaacagcactcaaaaatgtaacataatacgccaaaaactacaacaaaaaagagcgggaataaagtgcaacctgcatgtttcgatccctgtctcaaaaacttaataccgaccctgattgcaatcctatgcacttaaacaaagaacattgaaaatcagttgggtaaggttgttttttaagaattcggacaaaaatcgaacaacgaataccgaagtctatattaatttaggtaaatttccaatttaataactgtttaaagcacagttgaatgcactcaattttcctgagtgttgaaactttgagactgcgcacacagcacttgaaatccaacaggttgcgggtcaggagttgcgggttaagcgcacggtcgatgattaagtttgattgcgtttaataacttgttgtctattgcaatttatgcatatttttccagttatctctggtggagtttgccactggcactggcggcgacaatcgcgatgaactgcacagatattgtcaactgcaccaggtggaattttggacctgcgtcaaccagactttcgacggtgagtgtgtgttaaattagatcataaaatccattaaaaaatatatgtatatattttgtcttttttcgcgcagcgatcacccgtggagccgactggtcgggaagacgctgttgccaatttggagtcctgccccattgccgcaacgtctgcgccacttccactcgctcaccggtgcaaaattgtcggcggagcgacgagcagacgctttacgactgtctggagcggcaggaggcagcagatcagtgctgcggacaggcccgaacttccgagtgcctggaggtaaggatagcacagtgatatcataactttaactttaatatggaagtttcaaaaacactgacctaaggatcacattgagaatcctaactaataatacgttgttatgattgctaatagtatttattagaattatctgagtattttacacgatacttaataactcaatatgttcaggcctgtcgagccgtcttcgagcccgccaatgacaaccatgaccatgtggacataaatggagcatgtggagatcgcaacgcggatgtgattcagtgcgtgaacaaccacacggacatgactccactggcaaatgccgagcaatgtaagataacttaagcttaaaaaatgaataaaagcttattgtttcaaaactattccttagatataccctgttgtgagtacagcagcaaagagcattgtcgccacacctgtcggaatcttctgcatcaaaacgccactcttatggaacgaagtgaggtaatcttcggccgtttggaagcggcaggatgtgggtcaccactaccacaactgcccttctggcagtgttttcttacagtgacaggtaaactatatgttccgggaggatctggaagagccgggggatcgttagcccaaggacggatatcggggcaagggggatctctggctgagcccaatcacctgggaatggatgcggctaaaaggcaatgctgtgaacaagccagcagccacaagtgccgacgattgtgcaaccaaatcttcaccagcaattggtgggatgcacggagcagttttgagaacgagtgtatggatcagcctggagaaagggaactgcgacggtgtatagaaagcgtggatgcaccatgtgaactcggatgtcagggtcttagtttctgctcgaacttcaacaatcgacctacggaactctttcgcagttgtacaccagaacatgatgcagctgctcgcgaggattggcagctcctgcagcagcggggaaccgtcagagtcctgggacaggagctcttcatcaagaacaccagtcgttgtgctccggataagtggagggctttggtgtgtgccctccaattgaagccatgcacgcgagttggtctcttcaacggcatttgcagcgaagattgccacgagctcttggatgagtgtctggactggacgttacagcaccagcgaccaaaggatatatgttctcggttaaaagaaaaggatgatgatgattctccactgccttgtatatccctagagagctatctgaagccaggggatgccagtccagaggagttccaaggtattacttcaccatgcgcccagaaaccctgcaatggcagtgaagtgtgcatcctgcagcgaggaggcaatcaaggatactcctgtataccgggctgcaatttgggacaggattccaagctgtttgtacctttcggctcatatgtgcgtcttggaaagagtaatctccacaagaaactggaagtgggccaatttccgctggccgagcatatagtttgctcatgcggactacaaggtcgcctggagcaatgtcaaccgctaccgagctatatgcatgcccactgcactcttccaggagcgaggagctaccggcatggctcctctttctacttggagtgcaacctatgcagttgtttcgccggtgagatcacttgcaccaaacagcagtgtcgtctgccaggatttgttgattccggttacaccagtttaccgtgcaattgtccagctcactatgttcccgtttgcggctccaatggcaatacttatccttcggcatgtgtggccaagtgccatttgccagagggagattacgtctacggcgcatgcaatgctcggaatgcctgccaggcagcacctccaaacagttgtccatccggaactcagtgtttagacagccgaaaggtgtgcctggccagcatgcagcgaccttgtctgcaatacgtgtgtggtaagttaagaaggattaccattttacttaatttttttttttaattctaaaaatatttcataaaaataaatttaaattatatatatattttctccattgcagtcaatgccaccgcatccaactgttcaacttttcatcagggcgaggtatgcgattcccagggacggacttatcccaatgcctgtgccctgctgaaagcgaatcctcagggtcaagttgcctattggtccgcctgtcaatccagtcgctttaatacctcaccttcaccagtctgtggcatcaatggagtgacttacaaaagtagttatgcggccagagcggaatatgtgctggtggattatgtgggtcgatgtcgggaggtgggactactggtaagcgatatgggaagacgctgtaggactgtcaagtgtcccgctcccgtatccaagcattgtcgcttgatagttcccccaggagcatgttgccccctgtgtgctggaggagccttcaggataatctactccagaaagcaattcgatcgcgccatgtacggactaagggcacagagcagcactcttttgacattgcaaggagtgctgcagcagctggatggactggtgcaggttagcgaatgtcaactgactggatttctcaccatggaagtgggcatttttgtggccatagtaccgtccagcagtatcaagagaccgactcaccttcaattggaggcctgcgcccgggaggcggagaagatatcctccctaatcaatgcccaatcacccagaattacaaccaatctagctctatcctgtttgacagtatcgcatctactagaacccacgccaaatggagctacatcttatggtccccacgccatttggatactccccttacttttgttagtttctagagtaatcatagcttaagatagtcctagaaggagtgtgtatgatctgactcaatcaagtgaattcttggtgccaattaacccgttattctaaggagatggaaagtgccttcaactgtaaggaattgaccctctgtaccatgtgatattagctaaattaattcttaagctttaatgttcttttatagttattatttaatttatgccagggtccgtaaatcaccaaaaccccctttttgttttacctaatttaaatgtatttaataattcaaatcattgctccatggtaatatttaaatttaaaataattatttaaaatctggatcgtaaaagtacaaagagattgatggaccaaaactcgacactgtgccctaaccatgtggaaacattcttaaatttggaaaacattgtaatataattattttttggtccctggctaggagttcgttaatgaccaaagcattgtccgcctaggagtatcgctagtctaataaaaaccccagaaaaaaacacagcaacttaagatgaagcatggcttcctttattgaaccactccatatagatcctgccgaagctttattataataaatgtacgaaaagggtagaaaggggaatcgctttaagaaatctccatgggcaccgcctggacgcgttcggtgacgagtaggtccttaatgttggtgtgcagcacggttgaggttccggtcttgaagcggtagtccaactggcgcttgcccttcttgttagccagctcatagttgcgcagatactcaacactgcccttgcggataacacacagatcgatgttggatcccgaacccagatcgttaaacactccggaggcgatggcatcgcgcaccagtttcttgccctcctcttcggacaagtcaggtttccagcgactttcgaaaacggtcatggcggccagggaacccgatcccatggtggcgtacggcagcttatccgaacttccatgtgggtgaatggaatagatgtggggtccagtcttatccactcca

SEQ ID NO: 40943 - DNA, 4147 bp, DROSOPHILA
cggacgtaaaagtagaagatgtcgcgcgtcaaatgtgttgatcgcgaaccaaaataaatcaattcaataataaaaagcaaaagtgtttcttcaatcaaaattatatgacagtctgctcaaatttataaaataaatacttaagcataatccaaaccaaagtgtgagtttcaacgagtgagcgcagtgaacccggaaaaatcagtttttatatagtgtaaagtagtgcgtaagcggtcgcttatcgaacggatgccaattggccatgtgtgtatgtggatgaacccagcgagacttttgacttgtgacacgctcatttcctttggccgcaaccagctatcagtgtgcacaaaatgcactcgacattataatcagaacaaaatacaaacaaacaaacaagtgcatttaaatttaaaactcagacaaaacaacgataaaaatgcgcctgagtggctgggaaattctcctgttcctgctgcccttcggagtggtcagtgctgtccggcagttggaggaaaatcagagcataaagaatgatcaccatcattcggtggagcgacaggtgcgacgtcgaaataataaaagtaatgcctcagtggatcaccatcggcatgcgccatctagcggatcaaagaagaacagtcggagccattctgtaagcctggattcggatgactacgattggctggatgcggatactagtgaggcaatcgatagctccgaggtcacggctgtggaatctataagatcacccggagaatcatatgcgaaactctttgaacccgccctttacgcccagccaactgtcacacgtccaagtgccacggatgcggagtttcgagtccggagatcggggacatgtgtcgcagatgtcagacatgggaaacgcttccacatagtgatgggcatcccgacatatcttcacatgttgcaatcaggtcttcggctcatgtcgcacagcatgcgaaaatgtaagtatcggcgatcagaggaaaggcggaaaaaagggggtcttagtggaaatgcaaatgaaggcattaaatcttttggccaaattgaaactgacaaacaggataacgccaagccaaccggttgcgttcccatgggcgttacccaaatccactttgctcggctctctctttctctcatttgtgtgcgaaagattagagagttagatcttacaagtgggtgtcgggaaattggagaccccttgatatgcgactccccactcacaaattgttctattccttatccactgattttatctctggtggagtttgccactggcactggcggcgacaatcgcgatgaactgcacagatattgtcaactgcaccaggtggaattttggacctgcgtcaaccagactttcgacgcgatcacccgtggagccgactggtcgggaagacgctgttgccaatttggagtcctgccccattgccgcaacgtctgcgccacttccactcgctcaccggtgcaaaattgtcggcggagcgacgagcagacgctttacgactgtctggagcggcaggaggcagcagatcagtgctgcggacaggcccgaacttccgagtgcctggagtatttattagaattatctgagtattttacacgatacttaataactcaatatgttcaggcctgtcgagccgtcttcgagcccgccaatgacaaccatgaccatgtggacataaatggagcatgtggagatcgcaacgcggatgtgattcagtgcgtgaacaaccacacggacatgactccactggcaaatgccgagcaatatataccctgttgtgagtacagcagcaaagagcattgtcgccacacctgtcggaatcttctgcatcaaaacgccactcttatggaacgaagtgaggtaatcttcggccgtttggaagcggcaggatgtgggtcaccactaccacaactgcccttctggcagtgttttcttacagtgacaggtaaactatatgttccgggaggatctggaagagccgggggatcgttagcccaaggacggatatcggggcaagggggatctctggctgagcccaatcacctgggaatggatgcggctaaaaggcaatgctgtgaacaagccagcagccacaagtgccgacgattgtgcaaccaaatcttcaccagcaattggtgggatgcacggagcagttttgagaacgagtgtatggatcagcctggagaaagggaactgcgacggtgtatagaaagcgtggatgcaccatgtgaactcggatgtcagggtcttagtttctgctcgaacttcaacaatcgacctacggaactctttcgcagttgtacaccagaacatgatgcagctgctcgcgaggattggcagctcctgcagcagcggggaaccgtcagagtcctgggacaggagctcttcatcaagaacaccagtcgttgtgctccggataagtggagggctttggtgtgtgccctccaattgaagccatgcacgcgagttggtctcttcaacggcatttgcagcgaagattgccacgagctcttggatgagtgtctggactggacgttacagcaccagcgaccaaaggatatatgttctcggttaaaagaaaaggatgatgatgattctccactgccttgtatatccctagagagctatctgaagccaggggatgccagtccagaggagttccaaggtattacttcaccatgcgcccagaaaccctgcaatggcagtgaagtgtgcatcctgcagcgaggaggcaatcaaggatactcctgtataccgggctgcaatttgggacaggattccaagctgtttgtacctttcggctcatatgtgcgtcttggaaagagtaatctccacaagaaactggaagtgggccaatttccgctggccgagcatatagtttgctcatgcggactacaaggtcgcctggagcaatgtcaaccgctaccgagctatatgcatgcccactgcactcttccaggagcgaggagctaccggcatggctcctctttctacttggagtgcaacctatgcagttgtttcgccggtgagatcacttgcaccaaacagcagtgtcgtctgccaggatttgttgattccggttacaccagtttaccgtgcaattgtccagctcactatgttcccgtttgcggctccaatggcaatacttatccttcggcatgtgtggccaagtgccatttgccagagggagattacgtctacggcgcatgcaatgctcggaatgcctgccaggcagcacctccaaacagttgtccatccggaactcagtgtttagacagccgaaaggtgtgcctggccagcatgcagcgaccttgtctgcaatacgtgtgtgtcaatgccaccgcatccaactgttcaacttttcatcagggcgaggtatgcgattcccagggacggacttatcccaatgcctgtgccctgctgaaagcgaatcctcagggtcaagttgcctattggtccgcctgtcaatccagtcgctttaatacctcaccttcaccagtctgtggcatcaatggagtgacttacaaaagtagttatgcggccagagcggaatatgtgctggtggattatgtgggtcgatgtcgggaggtgggactactggtaagcgatatgggaagacgctgtaggactgtcaagtgtcccgctcccgtatccaagcattgtcgcttgatagttcccccaggagcatgttgccccctgtgtgctggaggagccttcaggataatctactccagaaagcaattcgatcgcgccatgtacggactaagggcacagagcagcactcttttgacattgcaaggagtgctgcagcagctggatggactggtgcaggttagcgaatgtcaactgactggatttctcaccatggaagtgggcatttttgtggccatagtaccgtccagcagtatcaagagaccgactcaccttcaattggaggcctgcgcccgggaggcggagaagatatcctccctaatcaatgcccaatcacccagaattacaaccaatctagctctatcctgtttgacagtatcgcatctactagaacccacgccaaatggagctacatcttatggtccccacgccatttggatactccccttacttttgttagtttctagagtaatcatagcttaa

SEQ ID NO: 40944 - protein, 1236 aa, DROSOPHILA
MRLSGWEILLFLLPFGVVSAVRQLEENQSIKNDHHHSVERQVRRRNNKSNASVDHHRHAPSSGSKKNSRSHSVSLDSDDYDWLDADTSEAIDSSEVTAVESIRSPGESYAKLFEPALYAQPTVTRPSATDAEFRVRRSGTCVADVRHGKRFHIVMGIPTYLHMLQSGLRLMSHSMRKCKYRRSEERRKKGGLSGNANEGIKSFGQIETDKQDNAKPTGCVPMGVTQIHFARLSLSLICVRKIRELDLTSGCREIGDPLICDSPLTNCSIPYPLILSLVEFATGTGGDNRDELHRYCQLHQVEFWTCVNQTFDAITRGADWSGRRCCQFGVLPHCRNVCATSTRSPVQNCRRSDEQTLYDCLERQEAADQCCGQARTSECLEYLLELSEYFTRYLITQYVQACRAVFEPANDNHDHVDINGACGDRNADVIQCVNNHTDMTPLANAEQYIPCCEYSSKEHCRHTCRNLLHQNATLMERSEVIFGRLEAAGCGSPLPQLPFWQCFLTVTGKLYVPGGSGRAGGSLAQGRISGQGGSLAEPNHLGMDAAKRQCCEQASSHKCRRLCNQIFTSNWWDARSSFENECMDQPGERELRRCIESVDAPCELGCQGLSFCSNFNNRPTELFRSCTPEHDAAAREDWQLLQQRGTVRVLGQELFIKNTSRCAPDKWRALVCALQLKPCTRVGLFNGICSEDCHELLDECLDWTLQHQRPKDICSRLKEKDDDDSPLPCISLESYLKPGDASPEEFQGITSPCAQKPCNGSEVCILQRGGNQGYSCIPGCNLGQDSKLFVPFGSYVRLGKSNLHKKLEVGQFPLAEHIVCSCGLQGRLEQCQPLPSYMHAHCTLPGARSYRHGSSFYLECNLCSCFAGEITCTKQQCRLPGFVDSGYTSLPCNCPAHYVPVCGSNGNTYPSACVAKCHLPEGDYVYGACNARNACQAAPPNSCPSGTQCLDSRKVCLASMQRPCLQYVCVNATASNCSTFHQGEVCDSQGRTYPNACALLKANPQGQVAYWSACQSSRFNTSPSPVCGINGVTYKSSYAARAEYVLVDYVGRCREVGLLVSDMGRRCRTVKCPAPVSKHCRLIVPPGACCPLCAGGAFRIIYSRKQFDRAMYGLRAQSSTLLTLQGVLQQLDGLVQVSECQLTGFLTMEVGIFVAIVPSSSIKRPTHLQLEACAREAEKISSLINAQSPRITTNLALSCLTVSHLLEPTPNGATSYGPHAIWILPLLLLVSRVIIA

SEQ ID NO: 40945 - DNA, 7045 bp, DROSOPHILA
ttcttttatttatgcattatttcgtcttctcctttttgttgttgtaagtttgatttgtgtagcctcaagggtcgaagattttttgtacaaaatgtataaataaaaagtcatgcgcgtatgtaaagataattaattattattgttttatgccctttagtatgttgctgccgttattcattattggtttatctatcggttttgcgaattgtgtgtattgttttttatcaacgttatttcgtcttcgttttttctgttgtataattaattcaatttatgcttcacctaaatattactcgtatcaaatataaaaatcaacaactttattttatttttcgtcttttctgcggtctcttgtggctatgaaaatgattcgtacatgcacttccggtccactatttttggctcgtttccgtttccgccgcacggcttcttgttgctttcttcacatccgcccatcggtctgtgctttttgtgcgctctctccgctccgccgtacgtatttcgctatgtgtataatatagttattaaatgtagctgttattggtttcttattcatccatcgcctatcattccctatgtgaaacgctgctggctaatcgtgttatcgcaactacaatatgctcgccctactgtacttaattagcttagattccgctctatctgtcccatctctaatgctactagccatcccgtttcgctcgctattaaatttacgtcttaatcaattcgcatttttgcataatttcttgtcttttaggtattgttaacttttgaatttctgtttctgctcgcctctcggttttactgtactcgtgtttcactgtatcctgtgtctgcgtgtcagtttgcactgtgggagtgtgtgtaatctactgttcttgctctgcaaagttgcttcgttcgccattacctatgtatgtagatagccttattctaaatgcgttttaaaaccgaaactgaaggttgcgataaaagtgcctaaaactgcaccgaaccatcgttagacgttcgccatttggttgacatgatcgatgttgtcctcatcgaagtgcacatcgttgatgaaaatgtccgcgtccagctggtcctcgtcgagctccagatcgtcgtcgtcgtcctccccgttggacatcaatccgtgtcccatacccatacccattcccatgtccacgccggcgatgcagatgtgtggcggcggcggtacactggttggcggaagtggagcgggcggaatgatcaggttgccgctgttgatcccatgcaaactgccagcaatgctggcgccaccactctgcagatgcctgcgactggagctgagacccgctgctccacgagaaaaaggggtttgaaacattaaaaagttatataactggtattatattatattatcaatggaaaatccctacaatatgttgaacgtaaagtaataacgtgataatacttattgaaaatctaagtgctgcatgttaatttcttgagtaagaaataaatcaaattaccttgaaaacaaattaaattaaaacacactcaaagaaaacctatggggatcaaaaagcaaaagtgttgataaaacgtatatgccgcataaaatggtgtcatatgggacttacccgtggcactggtctgcgagtcgtaatgtgcattccgatgtaggcccagttggcggacatggtttctacggcttcttctggagtgacagagtatgcataggagacagattagggacgagacgacgagaagcgttattataattaggacgtcgtagtcctcctcggccgcttccgtggtacctgtatgattcgtatgataaattgcgaggggagagcaagagcacagaatacataagttaatcaatgataacagagcacttcgggttagttgaacaggaatatgctttattgctagggatgtgtattgagatctctagttagctgagatttgcgagtgtgtgtgtgtcatgtgggtgggtgagtctgaacttggtggtcttgttctgtgtgctgtggtttccatttcatttcgggttttttaactgggttacacaagtttagcatatcaatatatttagcttaggcggtttagaaaattcagttcattttaacaaaggcaccaggaagacatatgctctatatatacatctgatcgatgcggtgcacacatgacaggtgaaggtggtaaggtgccaaaaggaacactaagaagccagaaccaaaactcggaggcatgcttactaatatgaactcaactcccaaaatgcgattgaagtgaactaaaggatgcaacaaaggataaacttggtatggtctttgaactgtgatctcctccaactgcggtaatctacgtgaattggggttatgggttcgagttttagggtttaaggtttctctagattggagtgacatgtatcttggtttgaactctgtgcatgtcatgagcgtggagtgtggatcgattgttgacaagctaatgcggaactcacgtgttaattgtgaccaagagtttcatttacttagattagtattagttagtatttttgttttggttgcttcgtttggttgttagaaaaatgagtacaaattcttgctagcagaatgctccattcatggtaatttgttatcttagttatgtttcacgtttttgattctcgtggcaattccaattttgatttttaaaattttgatttttcgagtttcgttcttgtttaactttagttgtacgtattaaacactaatgccgtaactgctaaaacaaatgtctgtagaaatgtgggcaaatgcgtggagtttgcgtcacctgtgccaaggattggtttttttttttattgtttttcgagttttaaatattcgggttcgaggaggggagtttttcaagtttaaaaagtcgaacagtttgtagttggtagtggtttttcagttttgttggtggagacaaaagaaagaacagagagaaacagagggagaattagacaagtagagagagaaagagagaaagatgagtttagtgtgggcgtggcggcagatatcatgtatctgggtatatacgagtatctgtatctgttgaatagtgtgctgaatgccattcgaggtgaaaaatcgggtgagataaagaagagaaatgcattggtgaaatgcagggatgggtagcaccctagactatcgaacagaaagaggtatgtacagaggtctggccatcgaaaatggagggaacaaaacagctagtaaaagttcaggacaaaatacgaatacttaggtgcaaaaagacgtagcgagaaataggtatgtatataggatatagattgaggtcactttaattggcttttaattagtatcgattattatatagttgtttatattaagtggttaacggtttgcaagtgtttcgtcgggttcaagttttcttcacgcatcaaatgaaaagtgtaacgaacgcaagatcgcacatgagctacaacgtgtaaccgtggaaaaccaagaaaaacttagatttggaaactgaatggctcgcccacacagcggacgcactggaaacacgagacaaacttaagatactcggttacgtaaacttaggcaaaagaaggcaaataaaaattgaactgaaccgttcgactcactcacgactcacagtgcaattcgtcagtatcgtcgccgggtccgcaattcttgaccccgtcgcatcgcagcttatcggagatgcagtatccggctccgcactggaaatggtacgtcgattcgcagtgcagacccacggacggcggacccggaccggagtcctgtatctcggtccacacaatgcggaagccctgttggatgcaagatttaagggtcaccatctctgggagttcataattatgattactcttacctgggcacccactgtcttgtcgctggtggtgaagctgatgcgcgccgtctggccagtggaggtatagtgccactgctccacgggcggcttctcgccacacagctccagcggcggctggtcggagtccacgttcatccacagccgcagcacagcggcaggacagccgcgatctggttggaaaagtaaataataattacaccaattctcatttcacattttcacgccactctgcgacttactggctgggtctccttccaggccgaactgctcaaagtgaatggacagcttgtagccggggcgtgccttcatcacccagttgcaggcgttggaggccatgccccgaccaggtgccttatagcccgccggccagttgggcgaggtgatgagacccgagtcctggttgctgaagttgccgccacagtcgccggcatccgatttggccgactcgaagaagtaacgggccttgaagccgctggctacgctctcctggtccgtgtgtagggtgatacgcagccccaccgctccccgcgggctctcgacgggtccgggggctgtctgaccgcagtagcggcctagcaggcggtcgttgttatcccgatagacgacatacatctccagccagtcctcgaagcaagcaccagagctaaagggttaatcaatgggtaaatatatagttacgtttaatggtcccttgatcacgatcttacccgtatgctccggcggtggcgttggcattgttgtccgccttgatcttgaagtggtcaaacacaatggtcacctgctcatcggcctcggccagaaagagatatgagcaattcgtgtccgagggataattggaggggtatctcggactgttcagttcgccgcgcttcttggaactgctcacgtaggtgaagctgcaggtgccatccggtgccgccgtgcccggtatcttgtactccgtctcgaaggtgtacttgcccttgaagccacgaccctgcagctcacccgaactaaagaccatggccaaccgtggcccctcgctgatcacccgttgcgtctcattgccgcacaactcgtagtcaaacttgtcgtaggcatcggccgtctcctggcccttcagatagatctttagatagccgtccgtgcagttggacctttaatagaattaaaagttaaaaaattaaaaaatttatacaatgacagatgtgcgatcttaaaagtcggaatattctcttgtactttttaacattaaaattcccttcccttttaaggaacaatttacaataatagtctgtatatttgtgttaaattagttgtcaatcctttttattgcttaataaacaacttactcgctcttgtccttgtgctccaccttaggtatattgaaagcgttaaactccagacgcacacgctccagatgctgggcatcctgcatgccatagatgaaatatctaaatgatgatgcaaatattaaatgcaagccctctctctttaagaaactaactagaatgttgtacttacctacacacagtttttggtatatagggatagggatagttgggtgagagcacaaagccagtggattccttcttcgataaaatcttttgatcacattctgagccacgtatgtgaatgccatcattttcacctgcgttgcgtattacaaattgcagtttcgttttttgtagcgaatgattagtttgaaatttcgatagagcaatcagatcagatcagttcgaattgtagagcagattggaaatcaccagatagcgttgaaaatagttatatttgttattgaagtagagagaaggtgtggaaagattagaatttgcagtgtcgataggtgaataaataaagcttaaaatagcacacaaaacgaacaaagccagtgaataggtgggttcaagcacatacaattagctgacaaatgctatttgcccgtggcagccattttgtgatgccctaataagtaggctacacttttcggtgagcatgatgctccgaagagcatcacaaaatggctgccagggtgggcagaactgaaacgataaacatagtttgtaacattatagatgtttgacaatacttacgtataaaatctaatttaacaaaactctcgctaaattcataaattcctttaaagccacgattttgggtatttgcggtgcgcgataacgtataaaaatgaacaaaaaggctcgactcgctcgaatacaaaactaagtttctttgctgcccgcaatatgtaccgattaatgctgacgaattatctggaccatcgtacactttcacatagtcaaatgggcagctgtttaatttggtttggtttgcagttgtggtggtgatgttgttgaaatttggttgtagacgaattgcgcagattggaatagcagattggatagagaagagttggtttttagagacattcggatgagggtaaattcggtttagatagttcacagattgtgtgtgtggtagtgtgtgggctgccaatcagagcaagttttggccaaaagccagccaaaagccagcacttgctttgatcttgacttgttaccggttgtgtgtttgtgtttttttttttttcatttcgctgtgtgtcttttgtgtgtgtttttttttttaactgtgcagcattagaggtactcactgtggtccaccaaaaaatagatcaaaatcccgaaactctaatctaaccctctgattcgattcaccaagaaactgatatgtgcatgacatatccttcggataggcacctggataggttggcgatatgagcgcaccagttttgttgacgctcatgctgggcgttatcgtgtaggaacatggcgatcccgcaatgggtatgccaatttcatattccgcttttcggatggaatttggaaaggaaatcataagacagtcagtagtcaataatggtggtggcggctcgggtaatgccccataactccctctactcacatgcatttataaacctaaacgtgccctcgaacaggtccgtggtcacgttcttgttgctaaaaaaagaaatcgcaactgcacgatacatggaaatgcgacgacgcggcggaatggtgccgcagtagcggccaccgaatggcgaattgatcagttccgctggctccgacgactgcacctccgagtagatatccatgtactcatgaacacaactgaaacgtggagacaacattatggtggtatt

SEQ ID NO: 40946 - DNA, 2025 bp, DROSOPHILA
tcgagcctttttgttcatttttatacgttatcgcgcaccgcaaatacccaaaatcgtggctttaaaggaatttatgaatttagcgagagttttgttaaattagattttatacgtgaaaatgatggcattcacatacgtggctcagaatgtgatcaaaagattttatcgaagaaggaatccactggctttgtgctctcacccaactatccctatccctatataccaaaaactgtgtgtagatatttcatctatggcatgcaggatgcccagcatctggagcgtgtgcgtctggagtttaacgctttcaatatacctaaggtggagcacaaggacaagagcgagtccaactgcacggacggctatctaaagatctatctgaagggccaggagacggccgatgcctacgacaagtttgactacgagttgtgcggcaatgagacgcaacgggtgatcagcgaggggccacggttggccatggtctttagttcgggtgagctgcagggtcgtggcttcaagggcaagtacaccttcgagacggagtacaagataccgggcacggcggcaccggatggcacctgcagcttcacctacgtgagcagttccaagaagcgcggcgaactgaacagtccgagatacccctccaattatccctcggacacgaattgctcatatctctttctggccgaggccgatgagcaggtgaccattgtgtttgaccacttcaagatcaaggcggacaacaatgccaacgccaccgccggagcatacggctctggtgcttgcttcgaggactggctggagatgtatgtcgtctatcgggataacaacgaccgcctgctaggccgctactgcggtcagacagcccccggacccgtcgagagcccgcggggagcggtggggctgcgtatcaccctacacacggaccaggagagcgtagccagcggcttcaaggcccgttacttcttcgagtcggccaaatcggatgccggcgactgtggcggcaacttcagcaaccaggactcgggtctcatcacctcgcccaactggccggcgggctataaggcacctggtcggggcatggcctccaacgcctgcaactgggtgatgaaggcacgccccggctacaagctgtccattcactttgagcagttcggcctggaaggagacccagccaatcgcggctgtcctgccgctgtgctgcggctgtggatgaacgtggactccgaccagccgccgctggagctgtgtggcgagaagccgcccgtggagcagtggcactatacctccactggccagacggcgcgcatcagcttcaccaccagcgacaagacagtgggtgcccagggcttccgcattgtgtggaccgagatacaggactccggtccgggtccgccgtccgtgggtctgcactgcgaatcgacgtaccatttccagtgcggagccggatactgcatctccgataagctgcgatgcgacggggtcaagaattgcggacccggcgacgatactgacgaattgcactgtaccacggaagcggccgaggaggactacgacgtcctaattataataacgcttctcgtcgtctcgtccctaatctgtctcctatgcatactctgtcactccagaagaagccgtagaaaccatgtccgccaactgggcctacatcggaatgcacattacgactcgcagaccagtgccacggcgggtctcagctccagtcgcaggcatctgcagagtggtggcgccagcattgctggcagtttgcatgggatcaacagcggcaacctgatcattccgcccgctccacttccgccaaccagtgtaccgccgccgccacacatctgcatcgccggcgtggacatgggaatgggtatgggtatgggacacggattgatgtccaacggggaggacgacgacgacgatctggagctcgacgaggaccagctggacgcggacattttcatcaacgatgtgcacttcgatgaggacaacatcgatcatgtcaaccaaatggcgaacgtctaa

SEQ ID NO: 40947 - protein, 589 aa, DROSOPHILA
MQDAQHLERVRLEFNAFNIPKVEHKDKSESNCTDGYLKIYLKGQETADAYDKFDYELCGNETQRVISEGPRLAMVFSSGELQGRGFKGKYTFETEYKIPGTAAPDGTCSFTYVSSSKKRGELNSPRYPSNYPSDTNCSYLFLAEADEQVTIVFDHFKIKADNNANATAGAYGSGACFEDWLEMYVVYRDNNDRLLGRYCGQTAPGPVESPRGAVGLRITLHTDQESVASGFKARYFFESAKSDAGDCGGNFSNQDSGLITSPNWPAGYKAPGRGMASNACNWVMKARPGYKLSIHFEQFGLEGDPANRGCPAAVLRLWMNVDSDQPPLELCGEKPPVEQWHYTSTGQTARISFTTSDKTVGAQGFRIVWTEIQDSGPGPPSVGLHCESTYHFQCGAGYCISDKLRCDGVKNCGPGDDTDELHCTTEAAEEDYDVLIIITLLVVSSLICLLCILCHSRRSRRNHVRQLGLHRNAHYDSQTSATAGLSSSRRHLQSGGASIAGSLHGINSGNLIIPPAPLPPTSVPPPPHICIAGVDMGMGMGMGHGLMSNGEDDDDDLELDEDQLDADIFINDVHFDEDNIDHVNQMANV

SEQ ID NO: 40948 - DNA, 2257 bp, DROSOPHILA
gctcaacgagcacacaaacgagcacataaaatatgacaacaacaagtactaattatttaatatgcttaatgagcaaatgtcgccatcgtggtgcccacagtgcactcgaacatggcatgactgcctcggcacagtgggcaaaatgtttaattaacataaaaatattcaattaaactaggaactgcgcggagtgtgaaatttaaataaatgcaatagacatcttttaacgactgttattaactgagtgtgtacctttttgatagtgtcatctttttgatcactttctcgttaatgaaaatcttaattttatcaccttcctgattactttaattctcttttgtaatcacatttagcacactgtgcgctgtgtcaaactaataactgctattttcaacgtttgtgtgtggcgaccgttgtctgcacatggttgaaatctaacgccgagtggcaatagcaacaacagcggccacatcttggcgccacggacagcgggcaccttttggcctccatggcttggcatgctgagcgcctggccccaagtcttggcccagaggcatgtgctccacggtgtggctatgtgtgtgcggctaccgttttcctccagcaattgccgatctgtgggttggctttttgcatagtgtcaattttgatttagcaaaacgttgatggtgctgctgttgcaattgttgttgtggctgcaatgtggctgcaattgttgctgcagctccattgggttgtcagcgcacccgcctaacacctcctgggcaaatagacacccactgtggaactagccggcgctgcctagaaagtgggtggcgctgacaagttttacaaagaaaaaaaaaacaagaataaatatataatagtatgagcttaaattataggaaatatttcttgccagcgaatatgggcgcagcatcaacttgattttctcagcgatttcacacaaaatgcaattagctcgactggccttaacgtatttaagtctcatttattagttattgtttgattcgaatcgttgttctttttaagcggcagtggagttgaaattaattggcaaagagacttgggctaggcaaattttgtgacatcgagcttgggtattgaagttgttgccattgctcgcgcctccatagaagatgaacctttggcacctctgcgatgtggagttgtagaaccaattgcgcagataggccttgcctttgcccacatccagtggctgaaggcatctgcgtttgactaaaatcacatagtcgatgagtttaagcagttactatttcccattatatcagtgagaatcgacacttactcgaataactctgctgcagacagaagaccaaaagaatgaggagacacgatattttgaacagcatggtgatacaattgaaactaataagaataagtagctattgacatcttttatgtcaccaacttttgttttgaagctagagagctatattaaatcaggtggtatagaacaaactccagtgtttgccttatattgcctatgataaccaaatattgtgttagttgtatgcttcttatcattcgctatgcatttaagctgcctttttagacatttgtaaacgtaaacaaaagcaggtgagaaagatgtatatagttgaggcgaaacttacaaattcaattcatatataacctgattgttatatatatatgtaacttaaatatgatttttaatttaattgatcccgataattaatttatggacaattctttttgcaatgccaccaagatgcaaaattatttgagtttccatttccacttatacgttttccattgaatctaaatttccgacagactctccaatttcggtcgtagtaccagcgaattttccaaaacgcacctttgccagcatttttaggcaaaatgcatattgttctatctaaattaacagaagctaataactttaacacatcttaaatataatcgcacatctacttacaagtgctaatctgaggtgtaataactattaagatcaaaccgagatatagccattttaatagcattatttatgtgtgactgagttgtaagttgataaatgcaaaaggtacgaatattaaaaagcttttataggtgaattaataagccaagcgacagtcgcaatctaaacaccctataaaatgcttacgacttgttttctatttaacattatttctattcataaggggtaattaaatatcccattatgcgactaaacgtcttcccaaaactggcttacccacttactacctttaag

SEQ ID NO: 40949 - DNA, 257 bp, DROSOPHILA
tcgactatgtgattttagtcaaacgcagatgccttcagccactggatgtgggcaaaggcaaggcctatctgcgcaattggttctacaactccacatcgcagaggtgccaaaggttcatcttctatggaggcgcgagcaatggcaacaacttcaatacccaagctcgatgtcacaaaatttgcctagcccaagtctctttgccaattaatttcaactccactgccgcttaaaaagaacaacgattcgaatcaaacaat

SEQ ID NO: 40950 - protein, 59 aa, DROSOPHILA
MPSATGCGQRQGLSAQLVLQLHIAEVPKVHLLWRREQWQQLQYPSSMSQNLPSPSLFAN

SEQ ID NO: 40951 - DNA, 5444 bp, DROSOPHILA
catctttacacatatttcttcaataataattggtatcttcatttgaatcagttaaatgacaatttatccgcaatcgaaaccagtttctcggatacttttacattattcctgactctcagatacatttatgtatgtacatacgtagatatgtacatgcatagatgtatatgcgtgtaagtatgtacgcagcgaagtacccacgatgtaaattgaaattcaagccgacgagcaaaagttctaagctttgtgactgaactataaaatccacttgaatcatgtgaaaagtagacattcacttaattattttgcttatttacctgtcgacgagttggctgtcatttggatgagcagagccatttgctgcctctccgacattggcgtgtttgagttcgatctgggttgggtagctcctgtattaaatcctatccccttcggtcttgggggtggcatactcttttgttcagttttagacggtaaaaattaaaatatagaacaaaaacggagacttgaaaaagtcttgcaaaatttattacaaaaagaatagtgcgaccgtatcgtgaatacaaaaatatgccagcttgctaatataataacgatgttttcaaatccattaagttaacaacaaattaatttatatattatgtgtacaaatttcaagatacacctttaattagttccaaaaattaaattttttattgaactaaatcaatacctgctccaccaaggtatgtgcgtttgttgacctccaacatgttatagatgcttacaaatagcatgttgcgcattattacttttaactactactttatttatactacatcttagctattatacgaagtcttattgttagtctacccgattttttcaggaattttcatttctttagttagtgtttcgattccactgcgttctcctcccgacagtgtgaccactactgcacagttgaagaaaatcctagcttgtcaaacacaattcaacgccccggctacggtcacactcagttttattttagaagttttgcagtgtaagatatttttatagcaaatctacgcactatttcgcttatttgaggagtttgcagagcaaaaccgctggtaataagttacaatatttgaatgcactgcgcgataacttgcataatcatttccaactggatttcgaacgacaaaatccattcacccacacacaaacacatctacttgagcttatctgtgtatgtacatatgttgcacataaatataagtgactgccacttgaagaaaagttttttactggaaaatatgattcgttttacataaataatcaagtctagttggaaaagtgctcggcggcagctcgtgtggcaaagtaaacacaaatggaggcctaaggcctaagtaatcgtttagcatgataaatactaaatacaatctcttaatgccactaacttttatgtttaagtgttcatagatattatgtacaaaaagtgactcactttttaatacactggaattagtgagctggggtgttgtaaccccatttgcaatatttataatctgactattccaatcacaatatttggcgatcttgattaagaataaagctattttctcgaaaatcaacttacaatctcattttacgcaatctagatttccgattcgaaaggcaaatgactaaagaaaactataattttgaatatgttagggtactaatagcttcggtctctaaaaaactatacaatttattttagttgatgtaagcagctacttttgccattcgttttttgtttattgcatgacgccaagtgtaattaactttcgcccataattataaccataataaacgaactaaatggccttaaacactttttaacgaagtgtcatgtttatgtaaatcacaccggcaatgttgataaataataaataaaagaaagttttcaaagcacagtattcgatataaatcgaatatgcttccaccattagtttccaattagaaaacataattgaatgaactggaatttgtttggcttaaaagtaaattgaagttaacttaatccagaaagttgatcccttacttttaatagtttctgtagtttctaaaagttattgttacagcgaatgtaatagcgcgggcattttcgattatcaaccaccttttttaacgtgcatgcgcactgcgaattttctttttcatcgtattgattaacgcagctagaatcgtttaatatacggttaaaatgattgtctccaaagctatcaaatcatacaggatgtaaaacacatcaaatacctcgattaacaccttttaattttgatatcattcatgttgttacactttcagatgtcagagggttgtaggagcacttactaatctgtattttgtatgtgttttgtagacagaaaattgagaaaatcggcaaaatgacgcaaatgtcgcaggacgaaatcataaccaatacgaaaacagtccttcaaggcctcgaagccttgcgagtggagcatgtttcgattatgaacggaatcgccgaggtgcagaaggacaatgaaaagtcggacatgctgcgaaagaacatcgagaacatcgaactgggcctcagcgaggcccaggtgatgatggccctgacatcccatctgcagaacatcgaggccgagaagcacaagcttaagacacaggtgcgccgcctccaccaggagaacgcctggcttcgcgacgagctggccaacactcagcaaaagttccaggcatccgagcagctggtggcccaactagaggaggagaagaagcacctggagttcatggcgtccgtgaagaagtacgacgagaatcaggagcaggacgacgcttgcgacaagtcccgcaccgatcccgtggtcgagctattcccggacgaggaaaacgaggacagacacaacatgtcgcccactccgcccagccagttcgccaaccagacttccggctacgagattccagcgcgtctccgtactctgcacaacctggtcattcagtatgcatcgcagggaaggtaagtcatcatccatgcattttattttactcgtgagcactaaagaaaccccttacctacaacatcgttatctatcaattcatcattaactataatagcctaatatatttctagatacgaggtagccgttcccctctgcaagcaagcattggaagatctcgaaaggacaagtggtcacgaccatcccgatgtagcaaccatgctgaacattttggctctcgtgtaccgcgatcaggtgcgtctacgctttgattaacttaatttatacaatcgttaattaacaacatctcgtgccatacagaacaagtataaggaggccgccaatttactcaacgacgctctgtcgattcgaggaaagacactgggcgagaaccatccagccgtggcggccacgttgaacaacttggccgtcctctatggcaaacgtggcaagtacaaagatgccgagccactgtgcaagcgtgccttggagatccgagagaaagtcctgggaaaggatcatcccgatgttgccaagcaacttaacaatctcgccctgctctgccagaatcagggcaaatacgacgaggttgagaagtactaccagcgagctctcgacatctacgaatcaaagttgggtcccgatgatcccaacgtggccaagacaaagaataatctggccggctgctatctgaagcaaggtagatacaccgaagctgaaatcctctataagcaggtcttgacgcgagcccacgaacgtgagtttggagccatcgacagcaaaaacaagcccatttggcaggtaatgttgtgttgttgtgctgttatgcctggtaaatactcaaaagttccttttcttactacaattttcaggtggctgaggagcgtgaggagcacaaattcgataacagggagaacactccatatggcgagtacggcggttggcataaggccgctaaagtggattcgcccacggtcacaaccactctaaaaaatctgggagcactttaccgacgtcaaggcatgtttgaagcggccgaaaccctggaagactgtgcaatgcggagtaaaaaagaagcctacgatctagctaaacaaacgaagctctcacaattgctaacgtcaaacgaaaagcgacgatcgaaggcaattaaagaggatttggatttctctgaggaggtgagtttcaaaatcgaatcacttaacttaattaacttaaattaatcattcccatttattcttgcagaagaatgcgaaaccataaaaatattatttgttcatcgcccacaacggaatctttaagtttatgattgaaagctaacagcaaacacacactttatttattcattccttaatatacataagctctcaagcatacattagcaaataaacaacgttttataccttgttatttcaaaaaatatgtaccgcttttaataataaaccaaatatatttaacataatcctgtttgtatttaaaccttcaaaactaaaccaaaaatacggaccagatatagcacattacagtggaatcagcttaacatttattattgataacaaacagtacgattagtttgcctacgataactgagtatcagttagtcgctatcattgtcatttaaaatcgaggaaactatgcctgcaaactgctcagcccgatccagaaattgttcccgagtgagactcgtatcgttacgtagattttgcgccgtgaggagtaagttttcaaagtccttcagctgactatccagctcgtcggcactgatttcctccttgtgatctgcaaatcaataggacgaaatggattattggtttctcaactcaaatcctgggcactaaccagaaccaaacttgacattggaccaaactacgtttttcaaaccctccacaacttcctcgtagtccttttcagcttcatctgggtcactctcaacattgcttctcaatgttatgatgtcaaaaaggaaattcgttttctccttaatttctccaaaggacaatccaccttcttctgaagtggaagaggttagcagaaagcccagctgaatctgttcattcttcgctaacgtcttgggaatagtgtcgataaaggaggtctgcaagtaattgtaatataatagatatactattattgcttttataaacacttacgtcttgtgaatcaaagtaaataatcaacgcctcggttgcttgaagaattttctccggcacagcttccagttttccagaaaatggaattaagttgatagaagtgttatagtacttggttttaatgatgcacttataacaattaagtgagcactccgttgatgttgattccttcgattgattcacttcagataaaatatctgcaacaaaatggaacgtataaacgtagtagtaaacgtatttatgaatgggttttttttttaacaatcctttatactcttataaaaatgcattgtatgattagtatgctgtattc

SEQ ID NO: 40952 - DNA, 1834 bp, DROSOPHILA
gttttattttagaagttttgcagtgtaagatatttttatagcaaatctacgcactatttcgcttatttgaggagtttgcagagcaaaaccgctgatgacgcaaatgtcgcaggacgaaatcataaccaatacgaaaacagtccttcaaggcctcgaagccttgcgagtggagcatgtttcgattatgaacggaatcgccgaggtgcagaaggacaatgaaaagtcggacatgctgcgaaagaacatcgagaacatcgaactgggcctcagcgaggcccaggtgatgatggccctgacatcccatctgcagaacatcgaggccgagaagcacaagcttaagacacaggtgcgccgcctccaccaggagaacgcctggcttcgcgacgagctggccaacactcagcaaaagttccaggcatccgagcagctggtggcccaactagaggaggagaagaagcacctggagttcatggcgtccgtgaagaagtacgacgagaatcaggagcaggacgacgcttgcgacaagtcccgcaccgatcccgtggtcgagctattcccggacgaggaaaacgaggacagacacaacatgtcgcccactccgcccagccagttcgccaaccagacttccggctacgagattccagcgcgtctccgtactctgcacaacctggtcattcagtatgcatcgcagggaagatacgaggtagccgttcccctctgcaagcaagcattggaagatctcgaaaggacaagtggtcacgaccatcccgatgtagcaaccatgctgaacattttggctctcgtgtaccgcgatcagaacaagtataaggaggccgccaatttactcaacgacgctctgtcgattcgaggaaagacactgggcgagaaccatccagccgtggcggccacgttgaacaacttggccgtcctctatggcaaacgtggcaagtacaaagatgccgagccactgtgcaagcgtgccttggagatccgagagaaagtcctgggaaaggatcatcccgatgttgccaagcaacttaacaatctcgccctgctctgccagaatcagggcaaatacgacgaggttgagaagtactaccagcgagctctcgacatctacgaatcaaagttgggtcccgatgatcccaacgtggccaagacaaagaataatctggccggctgctatctgaagcaaggtagatacaccgaagctgaaatcctctataagcaggtcttgacgcgagcccacgaacgtgagtttggagccatcgacagcaaaaacaagcccatttggcaggtggctgaggagcgtgaggagcacaaattcgataacagggagaacactccatatggcgagtacggcggttggcataaggccgctaaagtggattcgcccacggtcacaaccactctaaaaaatctgggagcactttaccgacgtcaaggcatgtttgaagcggccgaaaccctggaagactgtgcaatgcggagtaaaaaagaagcctacgatctagctaaacaaacgaagctctcacaattgctaacgtcaaacgaaaagcgacgatcgaaggcaattaaagaggatttggatttctctgaggaggtgagtttcaaaaaagaatgcgaaaccataaaaatattatttgttcatcgcccacaacggaatctttaagtttatgattgaaagctaacagcaaacacacactttatttattcattccttaatatacataagctctcaagcatacattagcaaataaacaacgttttataccttgttatttcaaaaaatatgtaccgcttttaataataaaccaaatatatttaacataat

SEQ ID NO: 40953 - protein, 525 aa, DROSOPHILA
MTQMSQDEIITNTKTVLQGLEALRVEHVSIMNGIAEVQKDNEKSDMLRKNIENIELGLSEAQVMMALTSHLQNIEAEKHKLKTQVRRLHQENAWLRDELANTQQKFQASEQLVAQLEEEKKHLEFMASVKKYDENQEQDDACDKSRTDPVVELFPDEENEDRHNMSPTPPSQFANQTSGYEIPARLRTLHNLVIQYASQGRYEVAVPLCKQALEDLERTSGHDHPDVATMLNILALVYRDQNKYKEAANLLNDALSIRGKTLGENHPAVAATLNNLAVLYGKRGKYKDAEPLCKRALEIREKVLGKDHPDVAKQLNNLALLCQNQGKYDEVEKYYQRALDIYESKLGPDDPNVAKTKNNLAGCYLKQGRYTEAEILYKQVLTRAHEREFGAIDSKNKPIWQVAEEREEHKFDNRENTPYGEYGGWHKAAKVDSPTVTTTLKNLGALYRRQGMFEAAETLEDCAMRSKKEAYDLAKQTKLSQLLTSNEKRRSKAIKEDLDFSEEVSFKKECETIKILFVHRPQRNL

SEQ ID NO: 40954 - DNA, 3275 bp, DROSOPHILA
atatacacagcggcagagttgccagacagcagcatgtctcagtagcttatcacccttgtcgaaatacggtcatacgactgcgaaaaataataaataaaactacagtgaaccgaatttccttagctaagataaataaattagtgcaatgccaaagtactattgcgactactgcgacacctacttgacccacgactcgccctcggtgcggaaaacccactgcaccggccgcaagcatcgcgacaatgtaaagttctactaccaaaagtggatggaggaacaggcgcagcatttgattgacgccactaccgccgccttcaaagcgggcaagatcacgaacaatccgtttgccggcgggccaggaggagcgcctcccaagccggcgggcgtgtccattccgccgcccaacatgggggctcctccgcgtccgggaatgcctggaatgccctatatgcctccactgatgaaccccatgatgggcatgcgtccgccaccgattatgaatcccatggccatgatgggaccaccgcctccactgggcactatacccggcgtccgtccaggaatcatgaacggacccaagtgaacgccctcaggaacggcatcaacgttcacagcacagatggagtgctctccttgcgatgtcctaattaagctgtagcatttaagtaagcccgatagcgaaaacaattaattatatacatttatataaagcaagttgactcaacaaatggttgtctttgtgggtggaagtcaatagagaaataaagtatatatatttaggtcagtaatgagaagcgcatgcagtcacattagagttcagcaggcataagatcacgccgcttttacggtgcacacattattatgactttaaaaaaccccgcttcagaaaaagataacaaaaatcaatgctagagaaggcatttaatgatttcattgtccaacacaatatagttaaaatgcaagtgaactgaaatgctaacacaaaaatagtaggtgccttgcctttaacataaacattcacagtttttattacaatattttgagcttacatactagttgctgtgaagagaatataatgtggattataattgttaatatacgaatgtgttaatcattggctcgaagtgtaagtttctgcctttgtcccgcgaatcggctcgtctaggcctcttataatattattttaaacgtctgtactacacacaattaggtactaatgggataatggttatctggcgaccctctggcgcttgctgggcgacaccagaaccggcgagggctgttggttacttgagatggcgtcgaatatgctgctctccgagcgctggtactcggtgccaatgttttccaggttcagatcggcatcgaggactaggacctgaggaaaaatgcatatttagcggcttcggtagatgtgagcttgtgtagaaactaccttgcacgactgcggtcgtctctggtgtatcaaccagtcctcgtgcaactcatgcagctcctgaaggtacttaagcggcacgcagctctcctcagaacgagcccgctgccggatgcgttcgtacgccacctccggcgaggtgcgcagatatatgatgaggtccgcctgcacgtgaatggactcttcgatgaacttgtaccactcctccagcgtattgtacatgccctgctccagcgagccgtttcgtcgcatgttctccacgaagcaatagctgcggcgcgatgggtaatggataagtttcgtttagcgtttctggtcaaaccggacgacgggaataatgcactcaccgagcgctaaaaatggagcgctccattatttttagcttcttgttggttggggcggtgtgcgactgcagcatggtcagcgtgacataactctgaaagggcatggcccacttcttgggatctttgtacatcagctccagcagatttaccccgttgacgttgcgccacttctcgacgggctcggtcagcaggcaaatgtcgttcttgtacttctcgaagtggttcaaatacgtggtcttcccgctgccgatgttgccctcgatgaggacggtgaagggctgggtgccctcggcgtacttggtcccctttcgggcacaggatgctgcctccgccatcagtccggataatcggcgatctgcacgtgagattgggagttttactaactgttttaggtacagcacagcagcaacggatcgcggttgaagttgattgttccggattcgatggagtactgtacacggcggcgggaatatggtgactgattcaacccgcctggtcagatcgtttaccgccgaaaaacaaaaagagcgggaacatcgccatttgtttcttttttttttaatcggtgttacctatcgttatgcttgtttttgtcaaccggctgatcggtaactgtgtgtgtgtgtgtgtgtgtgtctattctattgccggtaatgtttttacatacatctttacaaaaacttaaagtttaagccaatgctggttgaattacctattaatgatataatgtttttctgccacatgtgcttgctggacattgctgtttttacaaatttattaaatacaaataccactgatagcaataaaattaaacatttattgctcacaacttttatggcctcttatttattttatttaacgttgtgaaatgaattttctttttgcctatactgagaatcagctgtcggcgataacgataacggtcagctgttctgtgcatagtatctgtttttcgccatccctacgacgacgcattttttatcaatattattgtacatttttataaacctgtattaaaacttatttttaaaaggaatcttaaaccgggaaattagtttacgatgtccatagaaatcgaatcagcggagtaagtactgtaaatcgaccaacaccactcagtttttactagatccgtgatttcccccccaaacaaagtgtgattcggctcatccagcagtatctgaaggagtccaaccttatgaagaccctgcaaacgttacaggttagtacttacacaccgcggagagagtttgtctttcaatgatcttaaactttcaggaggaaacgggtgtctccctgaatacggtggacagcgtggatggctttgtgcaggatatctccaacgggcactgggacaccgtgctaaaagtgacccagtctctcaaattaccggataagaagctgctcaatctatacgagcaaatagtcttggagctgatcgagctcagagaactgggcgcagcaagatctctgctccgccagacggatcccatgac

SEQ ID NO: 40955 - DNA, 1142 bp, DROSOPHILA
ccaggcgggttgaatcagtcaccatattcccgccgccgtgtacagtactccatcgaatccggaacaatcaacttcaaccgcgatccgttgctgctgtgctgtacctaaaacagttagtaaaactcccaatctcacgtgcagatcgccgattatccggactgatggcggaggcagcatcctgtgcccgaaaggggaccaagtacgccgagggcacccagcccttcaccgtcctcatcgagggcaacatcggcagcgggaagaccacgtatttgaaccacttcgagaagtacaagaacgacatttgcctgctgaccgagcccgtcgagaagtggcgcaacgtcaacggggtaaatctgctggagctgatgtacaaagatcccaagaagtgggccatgccctttcagagttatgtcacgctgaccatgctgcagtcgcacaccgccccaaccaacaagaagctaaaaataatggagcgctccatttttagcgctcgctattgcttcgtggagaacatgcgacgaaacggctcgctggagcagggcatgtacaatacgctggaggagtggtacaagttcatcgaagagtccattcacgtgcaggcggacctcatcatatatctgcgcacctcgccggaggtggcgtacgaacgcatccggcagcgggctcgttctgaggagagctgcgtgccgcttaagtaccttcaggagctgcatgagttgcacgaggactggttgatacaccagagacgaccgcagtcgtgcaaggtcctagtcctcgatgccgatctgaacctggaaaacattggcaccgagtaccagcgctcggagagcagcatattcgacgccatctcaagtaaccaacagccctcgccggttctggtgtcgcccagcaagcgccagagggtcgccagataaccattatcccattagtacctaattgtgtgtagtacagacgtttaaaataatattataagaggcctagacgagccgattcgcgggacaaaggcagaaacttacacttcgagccaatgattaacacattcgtatattaacaattataatccacattatattctcttcacagcaactagtatgtaagctcaaaatattgtaataaaaactgtgaatgtttatgttaaaggc

SEQ ID NO: 40956 - protein, 250 aa, DROSOPHILA
MAEAASCARKGTKYAEGTQPFTVLIEGNIGSGKTTYLNHFEKYKNDICLLTEPVEKWRNVNGVNLLELMYKDPKKWAMPFQSYVTLTMLQSHTAPTNKKLKIMERSIFSARYCFVENMRRNGSLEQGMYNTLEEWYKFIEESIHVQADLIIYLRTSPEVAYERIRQRARSEESCVPLKYLQELHELHEDWLIHQRRPQSCKVLVLDADLNLENIGTEYQRSESSIFDAISSNQQPSPVLVSPSKRQRVAR

SEQ ID NO: 40957 - DNA, 5519 bp, DROSOPHILA
tccatcccgccgctgtttacatgcacacgatgacagacgcgtctatttatctgtatctgtatctgtatctggctggctggactggttgtgtggttggtttacatttcggttttgcgctttaagtgagagaaaaatgttgggaaaataaacaagaggagcccagtcagaatttcagacgcagcgatggcaaaaccaaccgcagttgagtggattgaattggccccaaaatggggagaaaaaaaggggagccccgggcaaagtttgactgcaacaatcaaatgctcatcagcgcacttgaaaaataatgcgtggctggctaagacaaaaacgaagtacattctcgcgggcagacaaagacatatagacctatagatactgtatctctggataccagcagcttgtatctttcattctttcatttttttttcggactgtgtagtcgaggcattttcatagctggctgtatttttcgttggcttgtttgtttagtttttgaggcacactcacacccatatacacacgcaatgctgcaggtgggaacaggtttttcggtttcggcttttcgtgtatctctcggatgcgggccgtatctttttggcctcgcgttatttatgccccactgtggctgtaattacaaatgctcgtttcctgctgaagacaatctggccatgtgtgcgcctgtgtgactgggcatctatgtagtatcttagtatctcagtttcgtccgggatgcccacgcacatgtgtcctccgtccgggatcaagtttccagtgaccactgagccgactggagtgtccgaagtgggcaagtgcgtaagtggacagcggcatttgcgctcttcaaagggcctcctttttacgaaaagcgcctgctgggcccgaacaattcgccggttgtccatgccgctcacgtacttccaactatattttatttcgtttcccctgcaacatgttgtggcccggcaatatggccgattgattggcagatatagttagtagttcattggcggtagttggccatggttactacccgtaggcccgcagcagtaacagccggagaacgaatgggaattaccctcggcaaatgcttcgcacgcttggctgcactagcccaaaaaaagaggcacttttccgagtggtggttagctcggcagtcgccgcaaatggcgcgatgtaatggcatttctaatatgagcacattaatggctgcgggacaaaggaacaggtgaggggaatcgaagtggagtggcgtggagtgtccactccttccgaggcaattgcaaatttcaaaattaacaacccacagttaaggtgaaattaatagctgtgccagggtttctttgttacctcaataataactacgcatatggtttttattatgccagttgagttgggttttttgaaacattataacaatcgaaaagttttacttgcttgtgtcacatttttagataaatttaatgataccatttaagtattagaagcaattttatgtgctcgcccgttttgaaggctatctatcacctgggcgcatatttttagataaccatgacatgtaaaataaaataattgaacacaagtctaagaagaaaagtgtctatccttgataatttatttttaaaatgttgtttgcgaaatactcaaagagcaattgtatttaacaacaatagacaaagggaaagagacgcctaactacagaatatatacatatgtatttattattaaactatactttaagaatattgataactatattagtgccattatcataatacaaaatttttaaggtcatataaaaatccacatacattgtggattatgtttccaatttttgtggagattcgcagtacttaatgagcctaaaactattattattgctatttttgtgccctcagctgtacgcgcatatgtagaagaccgagtgtggtgctcttgtttttcctgggcttcatacctgagcaattagtgcgacgttttcgattgcgcatgcagtagcccaaagagcagcagctgctgttttcgtgttattttttctgggtttttgctctcctcgggcagctgacaaggagccaaaagccagcggcagaggggctggcgtaaacaaagtgagctcttgcaaaatgacagctgacaatgggatcgtacgccacgtcgagctccgcgcacagcccaagtctgcagccaagtgcacaataataatggcaacaaaacaatatcaagtcggagtgaaaaagctgcagtcagcgtcgtcgccagtctgccgttgagatttcataaagttattgaacgtttttcaagcgaaaaacaaaattcggattgcaagcagaaaacaaaaatgtaaaggcgataaagtgccgagcgaagcaaagtgctaaaatgcggatagacgagaaaatatattcggatttgggcatatcacgaagtttgacagccactgcggataacctgttgctgttgcaactagaacaacagcaacaacaactgcagcacttgccacataaatggccattcgtgttgggaaggtatttaacacaaggtcgcgaaaacaatgagccaaacgactttagaccgcttatctaagtgctcgtagctcgttggtaattgtagaagcctctgctggacgcgggcaagaagctaattgcatgaacacaggccacccagccccacccagtcccacccacccactcacactctgcatgatggaataatggcaggatgggcaaaggggcaatcgggcgatcggagtggagccccaaacagcggaggcgacaaagtaaacaaggtgttaatttccactggttcggtattccctcggtttcttttcaccgagatgctcagaaaaagggtattcccagggtatggcgatttcaggaggagtttaatatacatgtgtatatattatgattatattttagtattgcttgcaatcaaattaaatagtaagtccagcgctagtaaatatcatttaaattcttagaacacaataaatatgtttattaattttaactttttcaaaaacagaaaaggaaacaataaaatcaattgttttagaaaatattaaaatattaatctaatatgttaatatgcgtctgtttctaattagccccagtgaaaaaactttgctatagggtatagcgagacctgctccccaattcccccactgacttatttttgcttctcctcccttttgcgcctttgcaaattgaattccccgcgtgttgcgaaagcagataagattggagcacgttctccgccaaacacagccacccacacagaagctactccacgcatacaaagcggcagatgacgggcgataagctgtccgtgataacgcacttgactttgagcgcgaatcgtgtgaggaatacacacacacacattgggggagctcccacttatgtagatcctagctagaattgaatagggcataagatgaatgggtctacttacgaactgtgaccgttttcggatcgtaggcacagacgcgtcgctccacggcggcaatcttccgctgcacacgacccgcccgctcgcccaccgcctgcagatcccgctgcaggtcgtcgaagatatcgctggctatgaggaccaagctggccagctgccgcagggcgttgctcagcgttatgttgctgatcgagtcgaactcgtggccggagaccaccttggaggagccggcagtgggcgactgcggtgcactggcgatccttccaagcgccggcctctgctggctgggatgccgcgaattgggcagggattgcgactgatggcgagtgggcgaggtggacaggaactcgacgtggtgctttagcttcttcatgggcgccggagcgggcggtacgggttgatcctccggcgcctggtgaaccagaaccctggtaagggatgtgggtgatccgtggccattggggacctctacatccggcgactgcttgttaatgcagttgttgttccggcacttgcccggcgtgcagtggaatcgtccggatgcgtggcccaaactggccgccgtggcctgggccacattgacgggctgcaccacgcgctggacgaagggcatctctcgctggctctcgcactcttgatctctctggcggccactagctgctccaactcattcgctccgcttcgaaggcaccggccaacataaaataaaaggtaatccaagtaatcccgacacacacacacacacacgagcacacgggcaccgaaaactggtcggacaacttctggacttgaatcctccgcagtcgcagcctcctagctattgtctactactttcggccaaattccttggccttttcacacgcactcacaaactagtttaaatcaactggtttattgctgccccccaaatttttgtggctagttctcagccttgcataattagcgcgccgcactcgaattgcccgtggttgtggcgattttaatggcccggccaccgttacgcgtcgttcgaaaggtgtgttagccggcaaaattacaaaaaccgaccgtccgcgctgacgtcttcgtatttcgccggtttcaaaataactgccagtgtgcccaatacatggcaagggcagtgaagtcgcagataaatcatctgcccgtgtgaccgttcgtccaagctgcttgagtatgtcaccgactagggttcaaaactctgcttagcttagtcaggacacactgcacacactaacagtgtgttacctgctgtaacacttaacagtgcacagtgggcattcaacacaaaacattaatatataatgcatgatttatatttatttttatgttgtatctgtttgaatatataaataaatataaaatgcaagctgacaaacccaaatcaaatatctccatgagtttcaagctgaatgttgctgttaaacatatcgatatacacagcggcagagttgccagacagcagcatgtctcagtagcttatcacccttgtcgaaatacggtcatacgactgcgaaaaataataaataaaactacagtgaaccgaatttccttagctaagataaataaattagtgcaatgccaaagtactattgcgactactgcgacacctacttgacccacgactcgccctcggtgcggaaaacccactgcaccggccgcaagcatcgcgacaatgtaaagttctactaccaaaagtggatggaggaacaggcgcagcatttgattgacgccactaccgccgccttcaaagcgggcaagatcacgaacaatccgtttgccggcgggccaggaggagcgcctcccaagccggcgggcgtgtccattccgccgcccaacatgggggctcctccgcgtccgggaatgcctggaatgccctatatgcctccactgatgaaccccatgatgggcatgcgtccgccaccgattatgaatcccatggccatgatgggaccaccgcctccactgggcactatacccggcgtccgtccaggaatcatgaacggacccaagtgaacgccctcaggaacggcatcaacgttcacagcacagatggagtgctctccttgcga

SEQ ID NO: 40958 - DNA, 1275 bp, DROSOPHILA
aaatacgaagacgtcagcgcggacggtcggtttttgtaattttgccggctaacacacctttcgaacgacgcgtaacggtggccgggccattaaaatcgccacaaccacgggcaattcgagtgcggcgcgctaattatgcaaggctgagaactagccacaaaaatttggggggcagcaataaaccagttgatttaaactagtttgtgagtgcgtgtgaaaaggccaaggaatttggccgaaagtagtagacaatagctaggaggctgcgactgcggaggattcaagtccagaagttgtccgaccagttttcggtgcccgtgtgctcgtgtgtgtgtgtgtgtgtcgggattacttggattaccttttattttatgttggccggtgccttcgaagcggagcgaatgagttggagcagctagtggccgccagagagatcaagagtgcgagagccagcgagagatgcccttcgtccagcgcgtggtgcagcccgtcaatgtggcccaggccacggcggccagtttgggccacgcatccggacgattccactgcacgccgggcaagtgccggaacaacaactgcattaacaagcagtcgccggatgtagaggtccccaatggccacggatcacccacatcccttaccagggttctggttcaccaggcgccggaggatcaacccgtaccgcccgctccggcgcccatgaagaagctaaagcaccacgtcgagttcctgtccacctcgcccactcgccatcagtcgcaatccctgcccaattcgcggcatcccagccagcagaggccggcgcttggaaggatcgccagtgcaccgcagtcgcccactgccggctcctccaaggtggtctccggccacgagttcgactcgatcagcaacataacgctgagcaacgccctgcggcagctggccagcttggtcctcatagccagcgatatcttcgacgacctgcagcgggatctgcaggcggtgggcgagcgggcgggtcgtgtgcagcggaagattgccgccgtggagcgacgcgtctgtgcctacgatccgaaaacggtcacagttcccattaatgtgctcatattagaaatgccattacatcgcgccatttgcggcgactgccgagctaaccaccactcggaaaagtgcctctttttttgggctagtgcagccaagcgtgcgaagcatttgccgagggtaattcccattcgttctccggctgttactgctgcgggcctacgggtagtaaccatggccaactaccgccaatga

SEQ ID NO: 40959 - protein, 271 aa, DROSOPHILA
MPFVQRVVQPVNVAQATAASLGHASGRFHCTPGKCRNNNCINKQSPDVEVPNGHGSPTSLTRVLVHQAPEDQPVPPAPAPMKKLKHHVEFLSTSPTRHQSQSLPNSRHPSQQRPALGRIASAPQSPTAGSSKVVSGHEFDSISNITLSNALRQLASLVLIASDIFDDLQRDLQAVGERAGRVQRKIAAVERRVCAYDPKTVTVPINVLILEMPLHRAICGDCRANHHSEKCLFFWASAAKRAKHLPRVIPIRSPAVTAAGLRVVTMANYRQ

SEQ ID NO: 40960 - DNA, 8340 bp, DROSOPHILA
ttatttttaagttaaattttttaattcttttggaggctcaaattttatatttggcgcagcactttaatgtagaaaatgtgaataaagaaatatttcaagggtaaacaacaaaaaatgttttgattttgtaaaaaaaaaaaccttaaaaattatgaggagttataaaataattatcagtttccggaactttaaaattcttatcttcaatttgatcttcaagacatatttttcttataataatattatcaataatattatataatatgtaacggatatttaagttcttcattttctttttcagaagtattaacaaatgcatatatataaatacatatatatttatacaatagaatcgcataggcatgaattcagcgcgcaaaataatataattacaataacattgatattatataatagattataataatatacatatgtaagtgtaagttataaaatggtaacaaagttcaacagctcataggcgaagatccagtggcacggaattttcaatacagccaggagaacatcctaatattttggataaactctttgtgccactgttccgggtgatgtgcatcatgtccagcacggaggaccttatgtaccactattgctgtttcctagattaggattcgctaaaagcttaaattgtaatttcagattcccaaaaatagaaaataccgccaaaagtcagggcaatggcactgcagaaaggatgcaggatattatatgttctttttgtttttctctccccagaatttggcccaattaaatttggtattcgaaaaaaagagcacgcctcctccccgaaaccgaaaaaaaactctgtggcgccgggaacaaaaaagagcgcgagagagtgagagcgcacacataaaaaacataaacaagcctttttcactagtgtgcgtttgtgcggagagagaagagagcgaaaaacaacttctgaaaaaagacgctcttcgctgtgattttttttcagtcagtttttcgacggtcgtgaacacgaacagttattctagctcctcctgttctgctgcttctgttggtgtttttttgcgtttgccgcgacgtaaacaaccgaagagcggagcttacgcccccaactgctccagctccacgcccccctcgcaacgtgttcgttgtaaatgcaattaatcgttgttggtcgctgaaaaaactaatatttcgggagtccgatacaagaagggcaaaaaagcacaagtgcagaaaaagcaaaaaaaaacataagcttgccgtgtgtgtgcgttggtgtgtgtgtgtatttttggcgtgcgcggccattttttcttgttgccactcgagagtctcttctgtgtgcgaaagagaggcccgacggcaaagcagaacgtagcaaactacgcaaatccccactaaattcgctaattttcgctaaataaatcaatcgcaaggggtgcccaaaaacaaacaaaagtacgaaaatagagtgccgcagaccacaaacaaatcacctgcgccagtgtgtgtgagtgtgtcagtgtgcgaaacaggcaagctcccaggcgggctcccacccacaatcagtcggcgaacacgtgctccaaaatatcaacaaaagttggcccacaaacataaaaaagggggccgcgactgcatccgagacccgaacgccggaacacaaaaggcactttcaaattggtaagtactttgcgctgcacgagcatgttttatttatttgccttattggtcaaacacacttgcgattgcggtgtttgtttctctttcccgcgctcacgcacagtggtcgcttttgttataattgtgagacttgaaaacgatcgccgtaaaattcacatttttaacaaaatatttactgttcgaaagaggggttttttgcgaatcgatgattagttgacgtgttattatgagaaaaacataaaagattataggacattatttttttaaaaatgttgcaaaaatgatttaaagtttgcgatttccttgttaaataacatgaaagcgtttacagttattactattacaaaattataacgatttaatatgcatatcctttatatattaattgctacttgaaaattacctaatgtaaaaacttatataaagcaaatgaattacaatttatttattggttaggactctatatcctattttataaaaaaaaaataatagcacaatttccaaagtgtttgtccagtgttccattggtcaaatacttattgtttccttatttccgaatcttcgctatttggggaataagtcaaaacctttaaactccaaacatttgtaagccgaatgcgactgtcaacaaataattaaaccagaataatttcaaaagcgttttgcagtcgtgccgcactacttgaccattccgtttagtcgcttgtttgactttttatgctcgttcccattcatttggtggcggtttttttttcatttgtgtttgtgtgtcgatgtctttttatcttccacttttttcgtactcatcaaatattcgcttcttttttcgcacacatgtcgcccccaacaaaagagagtgagagagcagtccgattgcggttgttgcgctgttgttgttgttcgctcgctcgttcgtttgtttatgctcgctctttgctctcttttgttttcagctgctcgcgctcaattaattttcgttgattcgttttttgtgtgtaggttttttgtgtataccattttatttatacgctttttgggcttctctttctcgtgtttttcttttttggggttttcttctttttttttttgttgtatttttggggactgaccgattgcgtttatttatccccaatttccccatttgcattcattatgttgagcggtcaatttcccgtgtttctggatctgttgttacacggttgcgattacgattccggcttctgttttatattgctcgccactttcgcttatttcatattacaattgtttgttcggcaaacaattgtttgcttgtcgccccgtctcgctctaaatgtgcgcaacaagcgagtggcgcgtccttttattttctgcattacatggccgccctccccctccccatctttacacagaattcctgctaccatgctgttcaattgtccaacgtcagcattaacaacaacaacaacaaaggcagaaccggttattttgaccaggcaaaaccaaaaaaaaaaaagccaaaaattgaatttacctctgacgtcaacacccacccgaccaaaaggtcgtattcaaattcgcgctcagaatacagtttccatttcacaagacctgattttgcgatttatatgcaactatttacttataatgcgttatgcacataaaccaatgttgtttaaattaattatggaatacttggacatttttacagacataaatacatgagtttgaaaaccttatttcgtatcaaaagtcacgtgttttatgcacattataaatatttcggagacttaaaattagttagttaaaagccaaaactgaatcccaattcgcataataataccgacattttctagtgaagataaaagctatgattaaagatttgagtaatgacttttgcctgtttatttgtaatgatactatagttatttgtatttgtcaaatttcaaattattcgtatgtttgcatgaatgcactaatattttataaatatttttaaaacaacgcatttaatgtttttaattgagcaataattgcgacgcattgttattcagcgaattatcaattattcatcccagctgaaatatttaaacgcccttaaaaactttaagtttcattacattttatcgcaacgtattcttttcaaatacgcttccgttttgatttaacgagcaacaacttctgaaatagataatatattctaagaaaattgaccattttggcgtaatttaaagtaagatattattaattctttttaactttgacttaatataagtttggaacacattcttttcatgtgttttttactgttgcatggaaatcccacattttaagtaattcatttgggatttacagaccaagaacatcagtggtccattggaaacccggctgcatcgccctaaaaagtggcagagatgtagttgcattcagttctcgaggttgttgacacgttccgttggcgcccctgacgttttttgccttttttgcttttttttttttttttgcctgcccatcgtcacctggccacagagtaatcgcgattttggttcttcgggccagaatgcgattccatttcgctttccatctggtggttgtcaccaacaatttctggccgcaagcgccttttttgtttatcttgtgattttttccgttgactaactcttttttgcccggcattgttattaattctctgcgctttttgcgccccattggcaactttttactgggttgcaacagttgtgctttcagtcagtaccttctgcgcgcagcacgtttaattcacaaacaattaattaattcatgcatatttatgttaatgtgcagaaattaatgtacccaacggcggggagtggagcggccaagtggcagaatcgaaaagtagtttaagcacttgtgccgactgggcacaaatttgtggattcaagaattacaatatttctgtactttcagcacaaaaacgcgccgagttgtgtaagcccgccgccagtgaagtgtcgacttcccggcgacgaagaccgcagcaatatttccactagccagtaacgcacaggctcgttccgccgctgacgacgaccccaaactggacgcccgcaccatcgcctaccgcccgctgacccttggcggccaccagacgccgcttatggccgaactgccgacggcgccgaacggcgtccccagcggcgattatctgcaccgctccatcgatcagctgcgttcgctgggtcatctgaccaccgcccaattggttcacgactacaagcccttcaacattagcgaattccggcagaatgtcgctgagcgactggactactcgctgaagaacggcctggtgcagcaccaacagcaaatggtcatggagcagcagccacatcccgatcagcagcagcagcagcatctgcatcacccgcaacagcagcagcacccgccgcagctgaaggtcagctacagtgcgcccaactcgccgcccactccacacgagcagcaggaacagaaggtaatcacttatttcaatattgaaaaaatatatcatacgcatataaatgttactgatatgatacttaaattgcgatcttaatatttcttcggtcaaagattatatgactttgctttagtaacccattcatcgtgtacttaatactaaacgatacccttaaaacgttctatctacttccagtacgacccgaatcgatcgccgccgcgtcagcagatgagcagcgctagcggcagtggcagcaacggctcctcgcctgaggaggaaagccgacggggagacggtgatcaggccaagccctacaagtgtggctcgtgcagcaagtcctttgccaactcctcgtacctgtcgcagcacacgcgtatccacctggggatcaagccgtaccgctgcgagatatgtcagcgcaagttcacgcaattgtcgcatctccagcagcacatccgtacgcacacgggtgacaaaccgtacaaatgccggcacgccggctgcccgaaggccttctcgcagctatccaatctgcagtcacactcgcgttgtcatcagacggacaagccgttcaagtgcaactcctgctacaagtgcttcagcgacgagatgaccctgctggagcacattcccaagcacaaggactccaagcacctgaagacgcacatctgcaatttgtgtggcaaatcgtacacgcaagagacctaccttcagaaacatctgcagaagcacgcagagaaggcggagaagcagcagcatcgccacacggcccaggtggctgcccaccagcagcacgtaccggcgagcggcatcggcttgaatttgcagcgccaggccatgaacgatgtgaatgccgcatattgggccaaaatgggcgcagacagtgcggcggcttcgctggcggaagccattcagcagcagttgccgcaggccggcggtcagccgtatggcaactttgcatccctgcagcagcagcatcagcaacagcagcaggaactgctgcatcatcagcgattggcagacacgccggggcattcgcatagtcctcacgaggaggccgcgggcgaggatctcgtcctgcgccagtcaacaccacaacatcaccttcagcaacaacagcagcagcagcaacagcagcaggcccagcagcaacaacaagcgcagcaccagccatcgcctggaccgggaaactcggccttcactccactgtcggcgacagtggctccaccgccacatcttcaacagcatcgcggtccgccaggatccgccgctgcctatctgtatcagcagaatgcggcggcagcagcagcggcttttcccacacagctcatctcgcttcaccagatccgaaactatgcccatcagccaggagcggcgggtctcatcgctggcgatcatctcgccttgggcctgagcgctgttaatgccgccaaagaaaaggcgcaatagtacaggccgtcaggtcggggccaaaagaggcagcaacgatgacattagcttaggatcaacgtttaagttggtatggatacaagagcgtggtattttattctctttgaatccataccaattgaaacactgaaagtaaaataagttactcatagtttccagttggcagtggcataggagctgggattgtgactggtttttcttaagcatccttccaacttccaaattcatcatgaaacttgtatacgattcggccaaaatcaactccatcactgcccaaaaccaataagaaaatcaactgcaatcctacagtttctgtgctattttcaactgccatatgaaagtaatatgtaatatctagatcaactcaggattttaaatacgataattatgcacacttttagatatctataagcaatattcaaattaaaaccttgaactatacaaataactcgattataaatagttcacagttttattttctactaggagcagtacaaagtacagcgataaacctaattatattattattataatgatatatttatatatatatattatagtgtacatagatttatgtaaattgtgctgtacatttaaacgtatcaacatttatctaggacgctagatattattaatttatcaactaactagtggagtaaggatattttctacttcttaggccagctgaaagagaaatagatttgaaaatgcatgtacaattcaaccaataaagattgtaactatatataaaagtatttgctgtggtttatcaaactttcctcaggatttgcattttcattagcgaatcaaagcggatcgaattaatgcaacgatccagaaaaatgcaacctaatccgcttagcgaccttaagaagaactcctttgtgcccgaggcgacataagagatttatgttcaccccatataatctgtatctcagtatccacagggaaatgtgtggctaccgatcgtatcgaagtttgtctttaaatttctctcattcgcagctgctgttcgttcggcttaagaatgtgacagtggcgtagtttagggggtcaaccctcgctaaaaattacccgtcagaggaagaatcttcatcggaataggcgaataatgattgatgactgattgagtcttggattttcggctgatcgactcggagattaatggcaatgattcatttgacttgattcgcattcagtttctttgaaacatgcttggcatatacggttatacctgatataaaactagttcatcgaagtcttcttcagcagtcacgatttgtaacttcaaaacggtcaagtacttaagaaactagtagatctgataagttgagatggaaggtgatgaaataatatgaagatccatccaaagacctttgacggattagtacatcgatgttttttttttatgaaagacaaaggaacttcatgcagtgcatgaatatctgtgaagtgtacctacgagtacatatatatgtataaatgtatagacaacgaatttcatagctaattaaaaaaacaataaattaagaaatcccacacgaaaccagtttaagttgttaacaggtgcttttttctttattatattttatttctctttatttatgtttattttctgtttgcctccgtcttttgctgaacgaagcgtttgaatggaattataaatagcagcaaattgtgttaaacacaaacaaaaaaaaaaaaaaaataaaagaaacttctttttatgatctttttatgccgcaaataaaaac

SEQ ID NO: 40961 - DNA, 1994 bp, DROSOPHILA
tgaacacgaacagttattctagctcctcctgttctgctgcttctgttggtgtttttttgcgtttgccgcgacgtaaacaaccgaagagcggagcttacgcccccaactgctccagctccacgcccccctcgcaacgtgttcgttgtaaatgcaattaatcgttgttggtcgctgaaaaaactaatatttcgggagtccgatacaagaagggcaaaaaagcacaagtgcagaaaaagcaaaaaaaaacataagcttgccgtgtgtgtgcgttggtgtgtgtgtgtatttttggcgtgcgcggccattttttcttgttgccactcgagagtctcttctgtgtgcgaaagagaggcccgacggcaaagcagaacgtagcaaactacgcaaatccccactaaattcgctaattttcgctaaataaatcaatcgcaaggggtgcccaaaaacaaacaaaagtacgaaaatagagtgccgcagaccacaaacaaatcacctgcgccagtgtgtgtgagtgtgtcagtgtgcgaaacaggcaagctcccaggcgggctcccacccacaatcagtcggcgaacacgtgctccaaaatatcaacaaaagttggcccacaaacataaaaaagggggccgcgactgcatccgagacccgaacgccggaacacaaaaggcactttcaaattgcacaaaaacgcgccgagttgtgtaagcccgccgccagtgaagtgtcgacttcccggcgacgaagaccgcagcaatatttccactagccagtaacgcacaggctcgttccgccgctgacgacgaccccaaactggacgcccgcaccatcgcctaccgcccgctgacccttggcggccaccagacgccgcttatggccgaactgccgacggcgccgaacggcgtccccagcggcgattatctgcaccgctccatcgatcagctgcgttcgctgggtcatctgaccaccgcccaattggttcacgactacaagcccttcaacattagcgaattccggcagaatgtcgctgagcgactggactactcgctgaagaacggcctggtgcagcaccaacagcaaatggtcatggagcagcagccacatcccgatcagcagcagcagcagcatctgcatcacccgcaacagcagcagcacccgccgcagctgaaggtcagctacagtgcgcccaactcgccgcccactccacacgagcagcaggaacagaagtacgacccgaatcgatcgccgccgcgtcagcagatgagcagcgctagcggcagtggcagcaacggctcctcgcctgaggaggaaagccgacggggagacggtgatcaggccaagccctacaagtgtggctcgtgcagcaagtcctttgccaactcctcgtacctgtcgcagcacacgcgtatccacctggggatcaagccgtaccgctgcgagatatgtcagcgcaagttcacgcaattgtcgcatctccagcagcacatccgtacgcacacgggtgacaaaccgtacaaatgccggcacgccggctgcccgaaggccttctcgcagctatccaatctgcagtcacactcgcgttgtcatcagacggacaagccgttcaagtgcaactcctgctacaagtgcttcagcgacgagatgaccctgctggagcacattcccaagcacaaggactccaagcacctgaagacgcacatctgcaatttgtgtggcaaatcgtacacgcaagagacctaccttcagaaacatctgcagaagcacgcagagaaggcggagaagcagcagcatcgccacacggcccaggtggctgcccaccagcagcacgtaccggcgagcggcatcggcttgaatttgcagcgccaggccatgaacgatgtgaatgccgcatattgggccaaaatgggcgcagacagtgcggcggcttcgctggcggaagccattcagcagcagttgccgcaggccggcgaataaagattgtaactatatataaaagt

SEQ ID NO: 40962 - protein, 366 aa, DROSOPHILA
MAELPTAPNGVPSGDYLHRSIDQLRSLGHLTTAQLVHDYKPFNISEFRQNVAERLDYSLKNGLVQHQQQMVMEQQPHPDQQQQQHLHHPQQQQHPPQLKVSYSAPNSPPTPHEQQEQKYDPNRSPPRQQMSSASGSGSNGSSPEEESRRGDGDQAKPYKCGSCSKSFANSSYLSQHTRIHLGIKPYRCEICQRKFTQLSHLQQHIRTHTGDKPYKCRHAGCPKAFSQLSNLQSHSRCHQTDKPFKCNSCYKCFSDEMTLLEHIPKHKDSKHLKTHICNLCGKSYTQETYLQKHLQKHAEKAEKQQHRHTAQVAAHQQHVPASGIGLNLQRQAMNDVNAAYWAKMGADSAAASLAEAIQQQLPQAGE

SEQ ID NO: 40963 - DNA, 2792 bp, DROSOPHILA
ttttaaatcaattatcagctaattagttcgattgggacaacaaggatactcagcgtcgctgccgcgatctgctctgagactcctccgccgtatcttgcgctgcttccgtatttgacgacctcggctgctcatgggccttaatctcatggtccagccgctctttcgcccggaaaacctttgactggatatagaaggagccgcctttggagcgttcgttgacttgaaacagatgctcgtagttcttggtgatagcgtccacgtttttggggtcatctatattcaggatctgcttggcttcctccagcgtcatgcctgcattgataagtaggtgtaaatagtgaaatagatagcatgactgtgtccaagactcacctgtgcgcaggttggactcggcgctcttgtcgccctgcttgccaccacccgcccgtcgtgctgcttcctgagatgcggcgatctcctggcgcagcgccttggtaaaggctcttcccactgcctgggcgcccaacacgatgatctgggcgatatacttggccatgacggtttcttgtattccttggattcgtacgtcaaaacaccggcattctatgtgtacagcttaattttgggtctcagaaaacgtgtcgctttaattacgcaacaccgtagtgaccctccgtgttccaattgtactatttaaaaggcgtccttctaaaaaaatgcatacgtaacttttaacacttaatttcgaatgtgatttataattgtattgagctaccaggtaaattttagcttttactccagatatttactaacgagcaggcggcgaaaagcaggtgaaacagctgattggagatggtacacggctttcataattagctatcgatatatataatagctatatcatcgagaatcgaaatatttttaaaaccaattatttaaatatttttaccacgactactttgtcatcgatagcatttgtcagttatcgtttttaaaaattcgaaattccctagttaagccaatgattcaggaaccgaactggaaaaaggactacgaccgtctggtccgcgagcatttgaatgatcagaatcagacgaagtcgctacaacgacaaatacggcattttcgctcaaagcgcgtacgactccagaatgaaatcgaggcggagagcaggagcatggacgtttgggtaaagatgatggagaacttgcaccgcggagtggagcgctttcagaagcaccaccacctgctcacgcccaaaaagcgcaagcagctgcgccgcataatgcgaaagctgcccttgagcagtttggatgagcaggtgcgactgatggaggtgtcggagcggttggtgcccaagccgtgcaaggagactcctgaaccaccgaagggcaacgaacgccagttcatcaagtactcagttccgcatcagaaaaagaactgtgatcctaataatcaatcccccgtggacaaacggctggccaggatatatgccaatctgaaggctctgctaaaaatccacgagcagacctcgtccgtcatcgctgatatacattccctgatcgccactattaactatttggagcgggggcactgcaccaagataaagatcactccagcggagggctccaggccgtcaataaaggctaccatcgaattggatcggctgcgcaagaccaagcacggcaaccactacacgcgggaaattatggacgtacgtcctccgtacatccttgaccatgtgccgcaattgaaaccaaacattttcgacgctctggggagaaaggcgaaaaaatcaaaatccaagcactgaaccgtttctggtggggaaaataatttattactccaagaattagtctacttagacatagtctactgaacatgctctatgctacgctagttctgtcctgcgtcagtttgatatatacaatttacaataatctcatttagctcgggcaaagtggtggctgattacagagaacaatttaaattatatccaaaccaatagattatatcggttaatcattgaactaagacttggggacttgaggacccaaaagtccgtgtatggctaaaatttgcctgccacttcatcaactattttgtttttcaagagttttctttgcccataaattccctttatatctgtgctcatatggcctgcctctgtgctttgtggtgtctaccgccggctatggaacatctcaacagaatcccggatttgtgtgttcgatgatgcagcgcttgcagtacttcttgaccgcccggtagccctcgatggaaaccggacagtcctggatattcagttgctggagaccgcgacaataatatgcgatacactgcaccccgcggtccgtgatcatgtcgcagctgcgcaggctgagcttcttcaggttcggacagctctcggccagagctcgaagccccgcgtcgctcacatcgcacttcccgatgtccaaggctcgcagacgtggacaggatctcgccaggaccgtaatggagtcatcgctcacggcctcacatcctcgagcgttcagatagcgcagcttatagcaccgcctggcaatcacctttagccccgcatccgagacccgctcgcatttggccacggaaaggtagcgcagtgcggctcccagcttggccaactcatacaatccgaaatctgtgatgttcaggcagtcggacacactgagctccttcagcgagacgcaaaaactgggcacaaacttcagacccgcatctattagtttaggataggaaaagttattcatatggtatcgtatcatgcgagtccatatccacgccaactcacc

SEQ ID NO: 40964 - DNA, 792 bp, DROSOPHILA
atgattcaggaaccgaactggaaaaaggactacgaccgtctggtccgcgagcatttgaatgatcagaatcagacgaagtcgctacaacgacaaatacggcattttcgctcaaagcgcgtacgactccagaatgaaatcgaggcggagagcaggagcatggacgtttgggtaaagatgatggagaacttgcaccgcggagtggagcgctttcagaagcaccaccacctgctcacgcccaaaaagcgcaagcagctgcgccgcataatgcgaaagctgcccttgagcagtttggatgagcaggtgcgactgatggaggtgtcggagcggttggtgcccaagccgtgcaaggagactcctgaaccaccgaagggcaacgaacgccagttcatcaagtactcagttccgcatcagaaaaagaactgtgatcctaataatcaatcccccgtggacaaacggctggccaggatatatgccaatctgaaggctctgctaaaaatccacgagcagacctcgtccgtcatcgctgatatacattccctgatcgccactattaactatttggagcgggggcactgcaccaagataaagatcactccagcggagggctccaggccgtcaataaaggctaccatcgaattggatcggctgcgcaagaccaagcacggcaaccactacacgcgggaaattatggacgtacgtcctccgtacatccttgaccatgtgccgcaattgaaaccaaacattttcgacgctctggggagaaaggcgaaaaaatcaaaatccaagcactga

SEQ ID NO: 40965 - protein, 263 aa, DROSOPHILA
MIQEPNWKKDYDRLVREHLNDQNQTKSLQRQIRHFRSKRVRLQNEIEAESRSMDVWVKMMENLHRGVERFQKHHHLLTPKKRKQLRRIMRKLPLSSLDEQVRLMEVSERLVPKPCKETPEPPKGNERQFIKYSVPHQKKNCDPNNQSPVDKRLARIYANLKALLKIHEQTSSVIADIHSLIATINYLERGHCTKIKITPAEGSRPSIKATIELDRLRKTKHGNHYTREIMDVRPPYILDHVPQLKPNIFDALGRKAKKSKSKH

SEQ ID NO: 40966 - DNA, 8690 bp, DROSOPHILA
gaaacagaaatggccaccaccagtatcgacctaagatgttcagaaagtcgtttgggactagacaataacgtgcaaatactattcggatcaccgggatggacctataccaaacccattcaaagtactttggtgttgcccgatgcaccattaagattggatcaaaaagcgaatgatcctgagaccccgaaaacaacagttctttccgggaatagcagcagcacttctgtgacagacgtaaaagggaatgtggtgaaggatgaggagggaggatctcaaccttcaattagtggcacaaattgtcgcgctgtgcccatcggtttggggattaggccagcttaccatacctctggaggagaatccgatgtggagaatgcctccgtggtcggactatgtggcagtcccttatgcctgcaatccacaatgagtcaatctctggcgcacgattcagctccaactacttcccgacccacagcaaaacaatcaaataacttgggaatccaacaaattactgagtgtcaagaaaacgatagagtagtggagagttcagaagttcaggaaacatttgaaaataatttggataagcaagcaagccagccatccgatgttttagaagagtgccagagcgcacttaattatgatttttataaatgattttcaatttaataaaactaatcgaatacccgcgccggcatcgatatatcgatagttggttcgcgtgagcatgcacatttcttttctctctctctctctgctctaatacaacgagagtccattaattttaggtagctaaaacataattgtctggaattttcatagtttctttcaaaaacctttttaatataaatcgtcaataggtagctgaaataaattaattaaaataatcagttcagaatagatttcgtgtgtagggtatacaaaagtcgcacgacgtcgggccttggaaatctgttattatcgcgctgcgtctggaagtctttttccattcaactctcggtcctcggcgcgtaaagattgcatttacattttgctcagtatttagctttgtgtttttgcgtatttttatttatatgtgtaaatcgttatttaagtatttgcattgtgtttaattgtgcttgcgataagtgctaaacagatgcgtccagttgcatctgcctattgtgggatttctagctgtaattgagcgataaagagagttgcagttcgcgacaccgatctccccctctctggttacgtcggcaactgcaaacgcaaatgcaaaagtgcgcggcaagttaatttaattcggttctattgtgattggaaaagacatagcgcagcagcaggatggatttcaaattcctaatgatactcatcctgggctttggctttatgttcgtctttacggcattccagaccatgtgtaacatcgaggtaagtcattcctctattcgctctcaattcatccgtctctctctctctctctgtgttcccacgcttgtgtgtatgcgtgggcgttgttgttgacatcctgccattggactttcgtccttgtccttgccaatagacatcgcagtgcccttgccgcccacaagtgcgcccaactacgcccacttcaacccgcgtcacaggatgttataacattgccaccccattcattgtcgacccatttgtttgcccgtaaattaccccctgatttgtggcggtgtaaagtgacaaggagttgcttattacaataacgatttaatatactgcctgctccaaaggtcaccaatctcattcggcggccattgtgcactgtgtaaaattaaattgataagaagtgcttgccgcacttgtaaactcatcattcgtcgcagagcagttatcgttagtaatgtgtgtagcataagtccggaaaagttgaccccaataccggcgaattaggcatttataactccccttaaattatttctccgccactcacaccttcagcctattttatgcatatttgtggaacaatggaaaacaattaaatattgagaaccgttcgtaatggagtcgtgaagccagaaaagttgaccccaataagggaattgggtctattgtaactttcttacactggttttcccacaacccatgggttcaaactgatttatagctagcacgttatgattgtttattgtggaatcggttttattcaattaatatttctttagaaacataacttaaacatgggaattaaatgtataaaaatgatacggacattttatattatgacagaattgtcgtttccgttaaaaattttcaaagaaaaatatagatttgacaaagaagtatatgtatgtatgtatgtaaatcattaatgataataggaatccgctctatttatgtttatattagttccaagaagcagctgataataatcccattcataggcggatttttagggggtcatacgtcgctctaatcaaagtgacaacgattacctaattaatatttgcaaataaacagcggattacacttattggtaataatgtgcatgcatagataagcgtccatggggacgcgttcattgactgctgcattataacggcattttcgatggttatttattgtcagtaataaaagccgtaagatcaaggccaacagcaggcaaataaaaacaaaaccagaaaacagccttatatacctatttttatactatatgcatgtatgaaatgccaacacagatcgtgagttggggattcattaaccaactggattgtcgggtatgcgaaaagtattcttttacgcattaaattcgttttttttgtgcttggcgcgtttttgttgtgctcgaaactcgaactccaaactggccaccaaaacgctctttataattatattgtttgcaaacagctcgtttttttgagtatttcgttatggttcaatgcactgcatcaatactgtatcaattctgataggtgccacaacaaaaaaatgatgcaaaactaaatgaattgttgtaattttaacccatagttatatttttgttttcctctgtctactttatttgtaaccttttttttttgtctttgtgtgcctgcctgccctccagttggtatttctttttataaacaatttactacggcagcagcaaaaaaaaaaaaaaaaaaataaagcaaaagtacattccaatcagggcgtgcattggcgtagttagctaaacttatagctacacagtacaaatagttggacctaattataattttaaagaatgttggttaactagaaaacaaaatgggtgtgaaacaattgattttgagaaagtttgctttataatacatttttaaactgattactttccgaacttcaagcaacgaagctatattttcttcaagtgcatttagccaaacttatagaccaacaatcgatcgatcgatcggccagcgtgtggcccgtattccgtgtctattagagagcaattttcaagcgaggaggccttggctcatatggtgcaatagttggagtggccagcagaacactttcacaaatccgctttccacctgattgcgcaatcgaatccgaatgcccgactcaaagcgcgtcaaacggcaaaactctttcaatgtcattgcaatagcaattgcaagttcgctgccgccgcacaagcccacacacaagagtatgttggtcgtcaggctcaaggccacgtcagcaataaagtaagccaggttgaccaacatacaacgtgcatgcatatgtacatatggccaatacgttgggcggtgacggggggagcggcgcagcgcctgcgcccagagaaaacgcatagccaacaacagccggttgcacaacaacaagccgaaaagtgggtgtgcgccgacgagcccaccaccgctcactggcccaaacggagccacccgatcccctcctgcctaaaaatgccaccttctccaccggcgttcgggtgcagcaatgtctgaccaaaagagcggaaaatcaagtctagcttggtgaggccaccaacactgaataccctataaaggtaaaactcaggaattttgccaataatgttgtaacattttcaaaagtcagatgatgcaatcaacgatttagcaatccaatgatttaactcgatttttttcaatttgaaagtatgccgtctggattttctttgtctttctgtttgtatttgaaatcgtcccagtaggatctgaaaaatatatctattttcgaatttcgctattttcgaattctataagcataacttagccaacaaaatgtcccgatactccatgaaaggcatcaatttcgatgttaaacgcgatatacaaaaggtggatgctcgcacctacggattcctgaagaccaagggatcagatacgccgatgcccacggctgcgaagagaattaatcaatcgacgttgatcgaaagattgaaatccataacattggctgaagtggtggacgaggaagatcagtcgtctacgggttcagtggaatcgggtagcatgtccttcgaaatgaaacggaagctatttgacgcagccgagttcaccatcacccgaggtcagaaactgagtgacctcacgcatgccgctgatgaggggattaactttagtccgtacgataccggcaacaagacactcgaagaaatcgaggaatactgccgcgccgtcaacattaagtttgccaaatgaaaggataaactcttccagagattttacacgatatatatacgatggaattcggtggataaaagatgaaacggagcagggatcacctgtaaaggaatcaggtctagattcaatataatcaaagcaaatcaaagaaactattttataaagctaagttcactatagaacaaaggcaaaaatggactggatatattttatatttcgcatacctaaagattacaataataaaaaatattctcacattaatattgcaattttgtttaaatatgtaatgaaattaggtactagggcaagcgtcaagcaaacatcgatatacccagtgcaaggaaatttcaaacaaaactcgtttcacatttttagagtttttctcgagtcgttgtgccagtttttttttttttgcctaataaatagcaaaaagcaatgtgacgatcgacttaataagttattcagcgcattctcctgcaattccgcgtacgcattgtactttctttattgcacttcgactttcttttgggccatgtttgctcaaaacttgacccaattctcggttttatgtccgtcgatttgataatgaggagatcattaacaaattttcattgataaggaatagctgcacttgaaactcgagatttcttatcaacaacaacgatcgcttatgctaccctacaacagtgcgccataaacattagttttttttcatacattagaaataaccaaatagattaaccactttccatagaaagatttactaaacacttcctgaactcccagggtcacaaaacgttttcattggcaaatcagttccgcttctcgactgcagacacttaagttcttgactttcacttgctcattaatggctatatttcaatggggcacttctaaaacattatcagcgggtgcaacctctcgagttgaacttcaaaatgggcacgaggaccggaccagatttgcagcgccacttaattgatgcaaatagaaatcagaatcagagtttttcgctcagataacgatatcactcgacatttgccgagatgcgtcctttggaatggaaaatttttagactcgaacgcaaacatgttttgcaaatgcagcttggaattttccattgacattcacaagaattgtaaagttaaccctgaatctggttgcagatccaagtcgattcatattaatttttgttcaatagctgcagttgtttttccaacgctccaaagagtatgagatatatgaatcattatgttttcaatataggaaacaatttcaattttaaactttctttgatcactgaatttcagaaagtctaataagcataagatcttaaagatagacttcataactaaattggcttgggatgtataatgaaccgaacatatacctataaatataaatatgcttgatatttaatccgaacagataacaattcaggcccaacttagttttaagtcagttcaatctgctttggttggggttttattttaaggagattgtgccttcataacgtatccggacaggaaatacctgtattatgcgtacttgagccgagaacacgtttatcgtataacatttaaagagaaacattaaacaaatgcgtcggccgtcggttcattggcatgcaatcgtcaaaaaatgtgtctggcacgttaccaaaatgctaatcgcttcaactttcaatacgttctctcaatctgtagaaaaccatactggatagcatttcccaggaagatgataccttcaagggtgagggctacaccagcctggccattatctacctgttcttctcgctctccaattggctggcaccctcgttcatttcgttcaccggaccacgagtggccatggtcgtgggagcactgacctatacgtgagtatatacccccccaccggtccgactcatacattttggtacctaaaacatttgaaactcttttgcagagccttcatgatcacgttcatgttcccgtcgacggtattgctgtacgtgggcagcgcagtgctgggattgggtgcctcgatcacttggacgggacagggaacgtatctggcgcgctgcagtgaatcttccacgatttcccgtaactctggcgtcttctgggccctgctgcagtgcagcatgttcattgggaatctgttcgtgtactatcagttccaggacaagacccgcatcgacaaggagacacggaatctggtcatcggcgtgctcacggtaattgctgtgctgggcatcgtgtttctggccgcactgagattcatggccgataatgccgagcacgacaacgagctggaacagaagcacacgggctgtggacaggccatatacgcattgaagtccgcaggacaattgttcctcaccaaaaagatgctgctccttagtctggccttcttttacacaggtgggttggattgtggtcaaaactgaatagaatcagagatactaagtgcttaaacataactttctaggcctggagctgtcattctttagcggagtttttggatcagcgattggattcaccacgaaaatagccgaaacaccgaaggagatcgttggactggtgggcatttgcattggagccggcgaggtctttggaggaggactattcggcatactgggcaacaagacgacgagatatggacgcgatcccatcgtgattgccggctatgtgatgcacatggcagccttcttcatgacgttcatcaacctgccgaacagtgcaccgtttaaagataccaccgatatatcctatctggacccgccccgagccagcatcgccttggtgtgtgccttccttttgggcctgggcgatgcctgtttcaacactcagatctactccatgcttggcggggagtatgtgaacaatgccgtgggagcctttgccctgttcaagttcacccagtcggtggcggcggccattagcttcttctactcctcgcacttcgggctgtacgtgcagctgggcatcctggtggttatgggaaccattggcaccattgccttcgtcttcgtagagtggggcttcaagcggcagcaccgcgagcaggaggcgttggagaagtaattccgttgtgggactcagaggatctagagtattagatgcaggttcttgttagaactctagggctagggccatttgtccgtgtttgttaaattcctcggaatgctttaaatccgtgcgactgcgtcgtcttcctagacaataactgataagtgttgttgcgcgctattgttgctaaatatacgtattttaatgttggcattccaaaaaacgtaattgtaatctagttgtctatgtttttatatgtgtgtattgtatatgtgcgtttatttattttaagcggcgattgtgcaaatataagatagtaaaccacaaatttggagtattataagaaatatataacgaattttaagaaaataatagttgttatggatcttacttgtgtgctactcattaataatagaattttgtgcttttatttcatttttcaactatttgatatatttttgaactgcctagatttcatactttgaaattcgcacactcgattacgatgagtcgatatcttttaaaatcgatagtaccatgtgcaactatcggttgtctgcccatgagcactcatttcgcccattcctaaaagaaatcattcaattttgaaagacttgaatgaaaccatgaaaaatggccaagaataagtcgactgtgtacctaggatacgaggatgaggaggttacggccaagcaggagcagctcctgaacagttgcacaaacaaaatcggtggcacacccgtaagataggcgattgcatcgacttcaatagaggcagcggataattgaaattgatttttacccacaggattggcccagacacgaggtgaccattccgtcatgcccgctgtgcggtgcagtgcgtccactgatcgtgcagatgtacgccccgctggatcgctcccaattccatcgcagcctttacgtttttggatgcatgaacccagtttgctctcagaattcaaagagctggtgttgtgtgcgcactcagcacctggaccaccagtacgaggtg

SEQ ID NO: 40967 - DNA, 1634 bp, DROSOPHILA
gcgcgtaaagattgcatttacattttgctcagtatttagctttgtgtttttgcgtatttttatttatatgtgtaaatcgttatttaagtatttgcattgtgtttaattgtgcttgcgataagtgctaaacagatgcgtccagttgcatctgcctattgtgggatttctagctgtaattgagcgataaagagagttgcagttcgcgacaccgatctccccctctctggttacgtcggcaactgcaaacgcaaatgcaaaagtgcgcggcaagttaatttaattcggttctattgtgattggaaaagacatagcgcagcagcaggatggatttcaaattcctaatgatactcatcctgggctttggctttatgttcgtctttacggcattccagaccatgtgtaacatcgagaaaaccatactggatagcatttcccaggaagatgataccttcaagggtgagggctacaccagcctggccattatctacctgttcttctcgctctccaattggctggcaccctcgttcatttcgttcaccggaccacgagtggccatggtcgtgggagcactgacctatacagccttcatgatcacgttcatgttcccgtcgacggtattgctgtacgtgggcagcgcagtgctgggattgggtgcctcgatcacttggacgggacagggaacgtatctggcgcgctgcagtgaatcttccacgatttcccgtaactctggcgtcttctgggccctgctgcagtgcagcatgttcattgggaatctgttcgtgtactatcagttccaggacaagacccgcatcgacaaggagacacggaatctggtcatcggcgtgctcacggtaattgctgtgctgggcatcgtgtttctggccgcactgagattcatggccgataatgccgagcacgacaacgagctggaacagaagcacacgggctgtggacaggccatatacgcattgaagtccgcaggacaattgttcctcaccaaaaagatgctgctccttagtctggccttcttttacacaggcctggagctgtcattctttagcggagtttttggatcagcgattggattcaccacgaaaatagccgaaacaccgaaggagatcgttggactggtgggcatttgcattggagccggcgaggtctttggaggaggactattcggcatactgggcaacaagacgacgagatatggacgcgatcccatcgtgattgccggctatgtgatgcacatggcagccttcttcatgacgttcatcaacctgccgaacagtgcaccgtttaaagataccaccgatatatcctatctggacccgccccgagccagcatcgccttggtgtgtgccttccttttgggcctgggcgatgcctgtttcaacactcagatctactccatgcttggcggggagtatgtgaacaatgccgtgggagcctttgccctgttcaagttcacccagtcggtggcggcggccattagcttcttctactcctcgcacttcgggctgtacgtgcagctgggcatcctggtggttatgggaaccattggcaccattgccttcgtcttcgtagagtggggcttcaagcggcagcaccgcgagcaggaggcgttggagaagtaa

SEQ ID NO: 40968 - protein, 430 aa, DROSOPHILA
MILILGFGFMFVFTAFQTMCNIEKTILDSISQEDDTFKGEGYTSLAIIYLFFSLSNWLAPSFISFTGPRVAMVVGALTYTAFMITFMFPSTVLLYVGSAVLGLGASITWTGQGTYLARCSESSTISRNSGVFWALLQCSMFIGNLFVYYQFQDKTRIDKETRNLVIGVLTVIAVLGIVFLAALRFMADNAEHDNELEQKHTGCGQAIYALKSAGQLFLTKKMLLLSLAFFYTGLELSFFSGVFGSAIGFTTKIAETPKEIVGLVGICIGAGEVFGGGLFGILGNKTTRYGRDPIVIAGYVMHMAAFFMTFINLPNSAPFKDTTDISYLDPPRASIALVCAFLLGLGDACFNTQIYSMLGGEYVNNAVGAFALFKFTQSVAAAISFFYSSHFGLYVQLGILVVMGTIGTIAFVFVEWGFKRQHREQEALEK

SEQ ID NO: 40969 - DNA, 3690 bp, DROSOPHILA
agaggacaatgtatgtatcatgacggcggtttgtattcgtagctaggtgtctcgttattgttttcctttcctgttgatttccttgctcatttacaacgacaacgccatcatcataatattaatgtccgaaatttggtcaaagtattctcttgctggctgttaggtaaatcgaagcgaagcgctgatgtgagtggaaccacggataacagcaacgcagataatcagatcttcaacagcgccggcaactcgctcaaccacattgatctggaggcggacatggacctgaatctctgacacccagccctagggcaaggaaggtgtgttgatattaatgtcaaagtaaggattcttcgatatttatgatttacttcgatactttgattccagatcactgcgcttcattgtgatcctgccggtcctgatctgttttatctgtacgattttaagtattttgatacttttccaaatccatacataacaaacctcaagggcacgatttagagtggtcggggagataagggttggaaatggagggggcgtggcgcgtctgcttttgacattacgcaatatatagagcgcaaatttgccttagtgattaacgattaataagtccaacgtagctcgacccagaacaagggagcatactgcagagtgcttcggatttcttatatttatacgcctatataaaacgcaaagcatagacgagtatgtatgcacatgcacctcggcgctgcgaagcatttcgctgtattgccttacgatatatcggtgtacactcaacttgttctgcacgatccctcccatggaatgtggacagccgaaggacgcagacatgtgtatatccatatatttgtacctttacctaagacatgtatgtatgtatatttttgaattcctacttacggaaacatttgtctagccatagctctaagcaattctctacgataaggacgcattttgtacagaatgatagaataaaaaagcaattacgaacaaatctcacgtttcttccttgtaataaaaacgcattttacaatgtaataaatttagaattataacagttcacatgccatttaaaaaaacacaacatttatatcgcagttttcacggattttacactggattgcgatacagtaccatcctccacctcaagatcctgcagcatggcaatcatctcctcgtccgtaatcacaacctccgcccttaggttgttattaatatgtggactaaacgtagccggcgcagattctccagccagttcacgcaattcctgctcaagttgatcatcttcctggctcgcgttctccacaacgctattggacattatgtcctgaacttcccgatgctggtcgagcgtgtcccgcacatcggccaatacttcgtcgacattgtcgtacttcaatccagaattcgagagaaccttcttcaaggtatttgatccgatcttgtaggcatccagaacaacgccactgttctgggcctcatccacactggacagaagagattcgatgttgtgcagggcaagactgcgacgttctaattagagaattttcaaagaacattattcacaaaagccagataaggggtgtctacaataaagattaccatgattcttttccaggagatgcctttttcgtagataggtttttgccatttgccgtttgttctccttcatgtactggcgcactttgtcatcgttcaccttgatctcctcctctaggtcctccaactgcttgagtaactgagcttgggtattctgaagattgtggacggcctggtcttcttggcttatattaagatcgtcgccaggtttttctataacaaaaattatagtttaataatacatactaactacttgagaaccttttaaacttgcttggtattttgatcaagtgaatttggcgtatgcctttttctactttaaattctaggcccaagatttgacgaacatttaaggccaacaggcaagcgcatagatctttgtctgagtaagtgggaactccgtgagtcttacaaagcgttttcaaagcattaaagtgcagtagttttccagtgttttccgacaggactttttcggcgatgagatcgcaagtgttctggaaagttaattatgtaggattcctataatcattggatgatatcacatacgtttaaggcatctaggtgaatccattcaattaaagcggaggcttccaggtcctccgtcaccacgctgtgcttgattttcgaccagctccatgaaagggggcgctttaccaggctgttgacgagccaaccaccccaggaattggccggatcgtactcaaattcactgcgagagcggatctgcttcctctgctgcatctcggatatcacggtgtccaggcaggcgggcagttggtcacccctcatgaacagcagttgcagatcccgcaggctgaagattggtcgtccgctgaactttagatattttgcaattaaatccatccagaaattcatttttgcgtcgtagccctccgcatccagatgcctcgatcgaaacatggcgaactgcacctgcattctaccgttgtcctgccagcttgcgggaaagctgaagtggtcggtttcatttaccctgtcaccgcttccaaggcccatatttaaaacaagaatttaatccggatcataaaaattgcgcgtcttttgtgattgtgtgtttatgtcgaatcagctagtttctggtgttgcaaaatgattgaatgtatacaaagcttgtaaacaaattttaaaaggggccgttaatttaatggaatgctaatcaaatgagatacttttttttaagatttttacttaaagctaataggtgcacataaaatgtgtgggaatactcaatttaaaatgtaaatttcgaatcaaatttttaaaaataaattaaagatccaattgctaaattaaaaatttgtaatttaatttagatactgcttgtattgtatacaatttaagacaaattctaccgcttaccaacactgcgcttttcgataagctggatatcgattaactttctccacatcgcaaatcagctgttccatccaggctactagattaaaaacttctgacgaaaattttgttttgaagcttttgttgagtgtgcgtggaactcgccttggcactggagcgtacagcaccattccagaggactccgggaatgcacggaacacgtagctaacttggccgccccaggattccgcagcatcaatgagcagagcagcacatcccagcccctgagacacgttcttggccacgaattcccgcctagatctcctcgctgcccctgaaaggcccccgattgcaacatctgtcggatcatcttgaagtgcgtgcgattctccggatagtccattgttctgcggtgaactgactccgttcaattgagtcttgcaattcatcatgacggaggacgaacagattaacctgcgcaatcagttggcgaggggtaagtggtgctttcgcaagattatggaagcttgcatctgcgtctggcaaataccaaaagcaatacagaaggagttttaattcactataagttgttaggaacatatagatttgagaaggaattggggagttcatataagttcaaaaagagataaggtatttaaacacgaactaagttctcagaagactatctctgatttatacaaaaatatatctaacaattcaattgttcgactt

SEQ ID NO: 40970 - DNA, 1508 bp, DROSOPHILA
gattcgacataaacacacaatcacaaaagacgcgcaatttttatgatccggattaaattcttgttttaaatatgggccttggaagcggtgacagggtaaatgaaaccgaccacttcagctttcccgcaagctggcaggacaacggtagaatgcaggtgcagttcgccatgtttcgatcgaggcatctggatgcggagggctacgacgcaaaaatgaatttctggatggatttaattgcaaaatatctaaagttcagcggacgaccaatcttcagcctgcgggatctgcaactgctgttcatgaggggtgaccaactgcccgcctgcctggacaccgtgatatccgagatgcagcagaggaagcagatccgctctcgcagtgaatttgagtacgatccggccaattcctggggtggttggctcgtcaacagcctggtaaagcgccccctttcatggagctggtcgaaaatcaagcacagcgtggtgacggaggacctggaagcctccgctttaattgaatggattcacctagatgccttaaacaacacttgcgatctcatcgccgaaaaagtcctgtcggaaaacactggaaaactactgcactttaatgctttgaaaacgctttgtaagactcacggagttcccacttactcagacaaagatctatgcgcttgcctgttggccttaaatgttcgtcaaatcttgggcctagaatttaaagtagaaaaaggcatacgccaaattcacttgatcaaaataccaaaaaaacctggcgacgatcttaatataagccaagaagaccaggccgtccacaatcttcagaatacccaagctcagttactcaagcagttggaggacctagaggaggagatcaaggtgaacgatgacaaagtgcgccagtacatgaaggagaacaaacggcaaatggcaaaaacctatctacgaaaaaggcatctcctggaaaagaatcatgaacgtcgcagtcttgccctgcacaacatcgaatctcttctgtccagtgtggatgaggcccagaacagtggcgttgttctggatgcctacaagatcggatcaaataccttgaagaaggttctctcgaattctggattgaagtacgacaatgtcgacgaagtattggccgatgtgcgggacacgctcgaccagcatcgggaagttcaggacataatgtccaatagcgttgtggagaacgcgagccaggaagatgatcaacttgagcaggaattgcgtgaactggctggagaatctgcgccggctacgtttagtccacatattaataacaacctaagggcggaggttgtgattacggacgaggagatgattgccatgctgcaggatcttgaggtggaggatggtactgtatcgcaatccagtgtaaaatccgtgaaaactgcgatataaatgttgtgtttttttaaatggcatgtgaactgttataattctaaatttattacattgtaaaatgcgtttttattacaaggaagaaacgtg

SEQ ID NO: 40971 - protein, 422 aa, DROSOPHILA
MQVQFAMFRSRHLDAEGYDAKMNFWMDLIAKYLKFSGRPIFSLRDLQLLFMRGDQLPACLDTVISEMQQRKQIRSRSEFEYDPANSWGGWLVNSLVKRPLSWSWSKIKHSVVTEDLEASALIEWIHLDALNNTCDLIAEKVLSENTGKLLHFNALKTLCKTHGVPTYSDKDLCACLLALNVRQILGLEFKVEKGIRQIHLIKIPKKPGDDLNISQEDQAVHNLQNTQAQLLKQLEDLEEEIKVNDDKVRQYMKENKRQMAKTYLRKRHLLEKNHERRSLALHNIESLLSSVDEAQNSGVVLDAYKIGSNTLKKVLSNSGLKYDNVDEVLADVRDTLDQHREVQDIMSNSVVENASQEDDQLEQELRELAGESAPATFSPHINNNLRAEVVITDEEMIAMLQDLEVEDGTVSQSSVKSVKTAI

SEQ ID NO: 40972 - DNA, 6743 bp, DROSOPHILA
tcagcaattctattacgaaagcatttgatttaggggaagtgcaattttgtattttcaaaattcgaaaagcgcaagcttgccaaaactctaagaaattgaaaaatatgtacatttcctctgaaacgcagcgaataaatatgtatgtatgaaggtatttcaagaggaacacaaacatcgtgcgaatgtgtttcattcattcatagttcgtactagagaagccatcaaaagtgtacactatttttagagtttggtgggagggtcccattctaaaagtagttccacgcaccagaagtcaaaagacacgccgaccaataaatccacgtgaacgagtggctcaaggtggtgctccccaaattgccaatttcccaagattcgtcgacagttgtgtttgggtgtttcaacagaagaggattcttggtggatggatatgatgacagctacgtggatgctgtgtcttgttctctgctccacggcgatggcgacggaggaggaatcgggcagtggactgttcaacgtcaccgggaatcccttggatacagaagctgctccaaaactgcccagcgaagtgcagaaagctgtttgcactgtgactgcgggggaggtgaaggcatctgccgaggctgtcaccacaaaaacccttaagggagtgtgtggatcaggtgggtggtcagtggtctcttgcccgtttgatcttgaaactatttatgctttgtgtgcagatgaaatgaacatggccttccgaagtctggagaacaagctctacgaagagcttcgtgtaatgaaactgattttggtgcacttagccaaggcgaatggacttaagctcaatacagccttttccccatctgtgaccactccacctccgactatgaggccaatcactagcgctgcggtgccgccaatcttcaagccaattgatcctcccaagaagctttccaattccaccaattcgaaagccgaagagaacgaagttgctccagacttcggacttaagaagactcctactctgaaaaacttggattcgaacgcaaatcttggagctcgtgaaaatgaagtcgataagttcaataatactgtactggccgatcaggatgtaaagttgttcacttactattggaagttggagaacgttacggaacttatcaaagcacctaaattggccactgtcagtagtccgatattcagctttaaaggtacatcagtatttggtgtggatctaccgcgtattagttatatctgatttcttggtaatccaattacaggcaagtccctgcaactaaagtgcactttccatcacatgaatcgcgaactgctgaacctgcaactgggatacggcgtctttaacccaaaatctaaaactggccaaagcaacaacatcttgttagaaatggacggaattttccagaacactaagtggaccgaagatatccagctgaagcacaagatttccatactggatcaaagtcacacccaacgaagaacgcaagatctcagttcacaggtgctgaacaagctggacacgggtttctctatcccaaacagtgtgctcctcggtagctcttacatcaagcagaacgcgctgttgatccaaattcttttatatttgtgaatgacaaaacaatgttttttttcgagcaattaaaacaaaaagagaccaaaaccatgtgctattaagaaagacctcaatttccttattgcagtttaaagcttgctgcgtgctcccttcgccttaatgtcaaggaatggcagagcaatggggtaaagctccttgcacgacttaaaggtcacaatatcgctgattggtttgtggcgctccatgtttgtgatctccacgggctccgcttctgacgtggcattttcatcggtttgctgggatacaatgtgtacggacagaacgcgtcgctcttcgccatcttttgcgataaatttctggaaagtgaaagaggtggtcagaccaagatgcactttaaaggatccatattctctcaccttgaagtagtctacaaagtcggccttgctaatcttacggagtattgctacctcagcctcctctctttcaaagtggtacgtctgcatggctatttcgccatagaactggctgaattgctggaatatggtcttaggtttttccagcttcttcacggccaaagcctccttgtgccgctcaaactcatccaatggcatgtcctcaataacttgctgaagatatgagaaactagtttataaattgcttactatagacaatccttatccttaccagataagtttgcagaaagttttcaatacgatcttccacataggacgggtgctttgctgactgcacaattattcgtatgccattagctccattcaccttacgcacgccactgaaaacgatgtaacccagttgttcctttgtgcgcaggcaatcgtagcaaggttcggagagcacctgagacaccaggtttaccattatgtttgtgtgatctgtttgtgcgccgcactgcaagtagagctgtgcgcaggagctcttgtggaactcattctccttctcaaataagtagctgtcgcctttaatggaacagaattcgtgattgggtacaaagagttgagcagtatgtcgacatacctgcgagcagcttatactctcgcttcttgagcatttgccgcgccaaaatgggtagctttgacgcattggtagcctccaggcgggtgttaactcgccccgcgatgtccgtggcctgctgcttggtcacgttgccaaaaataaaacactctgtgtgcaggcgctggaagaactccttagcgaagttcaacactctatcgtacgtgacaactatgaaagagtataagataattagtaatcttcttttttagatagtccaagctaatatcttacgttccatagcgtccaagagctccatattggcccacgcattttcagttaacaacagagctaaatagtatatggaatgctgatatggttgctcagccttaaagtttttcagtgaacgtacgtattcctccttaaggatgtcaaaacgtttctcgtcgatggagaagtcaaaaaggtgatctaacagcttctccaacagcaccacctgtttgtcactgaagccccgaatggtgaactgcaagagagaaaacattttgtaatttgaaagttcaatgaataagagttgtacattctcacatcgatgccgcacgactttcccatcacactgagctttaagctggctagctccgcatcgtacaagtactcattgagctgatccttcagcagcatcaccatcatatggttcagattgcagttcaggggatccagataagcaatcggattggacatgtcgaaagtcatgcatgcctttggcttattgaactgattgtcctgcttatgccacaccctcaaaatgggggtgtccaaaataatcgtgggatgtttgggagcatcagctggtacatcggatatatcaaagtttgttggtatgaagctgtttggcagcgccagtttcaggttctcgttaagttcacaattctcccaggactacaaaaatatatagagattattctttatggtccaatataatgcaactaaacgtacttgcacagtatctttggccacgcgcgtaatgccgtactttgttttatagtagggctccgctaggtcgcaatccggttcaaaactctggcttactatgacgattcggctcttggagggaaccagctcatccaataggcctttaatgaggtctggacgccattcgttgcttagatatggagctataagcacctcctccaggggaaatatttgcatggacgagacggcatgtgtgactaaattctccggctgctccttttccttgaagcggaatctcatttcgttgagtttcacacactcgtcgaatatccacttcttgggtccctctttccggagcatttccaagtactgaaacacgatcttgacaatgtcatccacgtgctccaaaccctcctgcgtcaggtcgacgacaatatcgaagaatccaaagccgttttgcgtgttctgatgcccggccataagactgcaaaaggaatagatagatggtaactatgatatcgggagtctagatgaacttactcattgcaccagcccagacgtcgcagctcggataaaatgctgcccttgccctcgtgaccgatgaggtgggtcaaatagttatcaggctataattaaacaagaggttcagtgggctggccagaaaggaatcctctgattgatccgtagccacagcgcagtggtaccttaaacttacgcctgacttgtagaactgcgtcaaatcgtctgtggtaaagcttatcgtcagcgatcggatgtctttgataggcactattttcaccttttgtccatagcgctcctcggcgtaggggtggcgtggccaacctggaaccttgacgtttttgttctctatttcggagaacttctccaataccatgccctccagttcgtccagcgattctgtcagagattgattacttgctggcagaaacggctatactaaaacaaaccttttccaatgacagccaggcacattatgttggcggagtaccactgcttgtgaaactttagcagctcatcccgcacatcaatgttcttggacttgggtatttcggatagggtggtcttgttgccgctgccgaacttgctgtaggcatggtcaggctttgccaggtggcggttcacctgcttgatgcgccacagatcgctgggcaggtttttctcgtgctcagagtttacctgcaatgacagcgtcctatttctgtcagaaattttaatgaatgctttcacataccgcattgatttcccgctcagttgcactgggcgtgaacaagggggctatgaagaactgcgcgaagcgatctaaggctccatctaacttgtccggcgccacgtgaaagtggtacttggtcatcaggggataggtggcggcgttgctgcttccgccgctctgcgaaaggtatgtggtgtagccattctcatgcggatacttctcggtgccgaggaacagcatgtgctcgcaaaagtgggccaatccaggcaggttcgtgggatcagacatgtggctgccatgggtatactcattaaaaacaaacattgagtgaagatttgatcttatttaccccacttgcacggacagcgctgccgccgagacatctgtgttgggatcgctgatgagcaggacctttagtccattttctagttgcaatccgcggtagtcgcgtgtgtcctgcagcgacttttcaatgttgttcagcctataaacgacgaaccattgcctttcgacgacctctaagatgcgtaacgtgcacttacctcaatatgggctccatgctgtctggcttcctagttgcggacttttgcgagctttcggctattgtcatcttgggttttataagcgtgccaatcgttcgatgtgttactgaaatgctggccctcaacgcacttgacctgtgcgaaataaatgcgatttagtggtgcccgttagcggaaatttgtttaattgctgccaaccgtcgaccaaaaaccgctgttaaggcaaaaatcgattttctgcacgtaagatacattgagtttgtgaaatactcttgacgacgctactccggctttacgtagcgcgcacaagaaatcttagagtgggaggagtagatttccaagccggtcggttacacgttcaatcaattttaatcgctttttggaccgaaaaataaattctaactagtttcgcaacaactaaaatagcaaacaatcatctgttcgcagagctgccaactcaccgcgcacgcagaactagtttaatatgttgccagatcgtttattttgtgagtggttccagatttgaaattcccaattggagaaattttacaaagtggtaggccatattttcaaatacgaaagacttaataagtttaaagtgatgatttttaatagttctaatgtaactttggactaaagtaagctgcatattcaccttacctaggatagatggcgatttcaaaatgtatttcaaatgcttgaaatttttccaacgaccatacaataaatattgggcaaccctgataacagtcattataaaaataaatattccgtgaattcccgttctccgtcaatctggcagtgctccgcgcccaaccgccgccgttttccaacactggccggttgccgtcaaagcgcgtagaagaattgcgggctgtaactgcaatttattattttttaatttcatttatagtgcacctggtcagcgagcactggctcatccgcagccatccgtcggcaaccagctcgcagcgatgttaaacttgtgccagccgtaaagatttcgcgtgtttgcgaaccacaaactgcgtcgccatcggtgtgtgggtgcagaaataaatgcaaattgttgtaaaatgccgtgctttggtgtgcgtgttgataagtgcaatacgcaaaagtaagaacattgaggcaaatccgtgcaattcgtgcaatccgtgggatcaggcgttttcagaggtgagtgctgcagtgctacgtccgcggagatttatgagttcgggaattctgtgctctccccttcggccagcagtcgaagaattaggttctaatcaggttttaattgtttacccaccaacatgcgttttcctcgagaaaaagtgcaagtgttcaacgatttttctcccctaaatgggtcaagtttgccggaatgtcgagtccgaacttcaagatcccctcctaaaagtccctt

SEQ ID NO: 40973 - DNA, 3888 bp, DROSOPHILA
ttgcgaaactagttagaatttatttttcggtccaaaaagcgattaaaattgattgaacgtgtaaccgaccggcttggaaatctactcctcccactctaagatttcttgtgcgcgctacgtaaagccggagtagcgtcgtcaagagtatttcacaaactcaatgtatcttacgtgcagaaaatcgatttttgccttaacagcggtttttggtcgacggtcaagtgcgttgagggccagcatttcagtaacacatcgaacgattggcacgcttataaaacccaagatgacaatagccgaaagctcgcaaaagtccgcaactaggaagccagacagcatggagcccatattgaggctgaacaacattgaaaagtcgctgcaggacacacgcgactaccgcggattgcaactagaaaatggactaaaggtcctgctcatcagcgatcccaacacagatgtctcggcggcagcgctgtccgtgcaagtgggccacatgtctgatcccacgaacctgcctggattggcccacttttgcgagcacatgctgttcctcggcaccgagaagtatccgcatgagaatggctacaccacatacctttcgcagagcggcggaagcagcaacgccgccacctatcccctgatgaccaagtaccactttcacgtggcgccggacaagttagatggagccttagatcgcttcgcgcagttcttcatagcccccttgttcacgcccagtgcaactgagcgggaaatcaatgcggtaaactctgagcacgagaaaaacctgcccagcgatctgtggcgcatcaagcaggtgaaccgccacctggcaaagcctgaccatgcctacagcaagttcggcagcggcaacaagaccaccctatccgaaatacccaagtccaagaacattgatgtgcgggatgagctgctaaagtttcacaagcagtggtactccgccaacataatgtgcctggctgtcattggaaaagaatcgctggacgaactggagggcatggtattggagaagttctccgaaatagagaacaaaaacgtcaaggttccaggttggccacgccacccctacgccgaggagcgctatggacaaaaggtgaaaatagtgcctatcaaagacatccgatcgctgacgataagctttaccacagacgatttgacgcagttctacaagtcaggccctgataactatttgacccacctcatcggtcacgagggcaagggcagcattttatccgagctgcgacgtctgggctggtgcaatgatcttatggccgggcatcagaacacgcaaaacggctttggattcttcgatattgtcgtcgacctgacgcaggagggtttggagcacgtggatgacattgtcaagatcgtgtttcagtacttggaaatgctccggaaagagggacccaagaagtggatattcgacgagtgtgtgaaactcaacgaaatgagattccgcttcaaggaaaaggagcagccggagaatttagtcacacatgccgtctcgtccatgcaaatatttcccctggaggaggtgcttatagctccatatctaagcaacgaatggcgtccagacctcattaaaggcctattggatgagctggttccctccaagagccgaatcgtcatagtaagccagagttttgaaccggattgcgacctagcggagccctactataaaacaaagtacggcattacgcgcgtggccaaagatactgtgcaatcctgggagaattgtgaacttaacgagaacctgaaactggcgctgccaaacagcttcataccaacaaactttgatatatccgatgtaccagctgatgctcccaaacatcccacgattattttggacacccccattttgagggtgtggcataagcaggacaatcagttcaataagccaaaggcatgcatgactttcgacatgtccaatccgattgcttatctggatcccctgaactgcaatctgaaccatatgatggtgatgctgctgaaggatcagctcaatgagtacttgtacgatgcggagctagccagcttaaagctcagtgtgatgggaaagtcgtgcggcatcgatttcaccattcggggcttcagtgacaaacaggtggtgctgttggagaagctgttagatcacctttttgacttctccatcgacgagaaacgttttgacatccttaaggaggaatacgtacgttcactgaaaaactttaaggctgagcaaccatatcagcattccatatactatttagctctgttgttaactgaaaatgcgtgggccaatatggagctcttggacgctatggaacttgtcacgtacgatagagtgttgaacttcgctaaggagttcttccagcgcctgcacacagagtgttttatttttggcaacgtgaccaagcagcaggccacggacatcgcggggcgagttaacacccgcctggaggctaccaatgcgtcaaagctacccattttggcgcggcaaatgctcaagaagcgagagtataagctgctcgcaggcgacagctacttatttgagaaggagaatgagttccacaagagctcctgcgcacagctctacttgcagtgcggcgcacaaacagatcacacaaacataatggtaaacctggtgtctcaggtgctctccgaaccttgctacgattgcctgcgcacaaaggaacaactgggttacatcgttttcagtggcgtgcgtaaggtgaatggagctaatggcatacgaataattgtgcagtcagcaaagcacccgtcctatgtggaagatcgtattgaaaactttctgcaaacttatctgcaagttattgaggacatgccattggatgagtttgagcggcacaaggaggctttggccgtgaagaagctggaaaaacctaagaccatattccagcaattcagccagttctatggcgaaatagccatgcagacgtaccactttgaaagagaggaggctgaggtagcaatactccgtaagattagcaaggccgactttgtagactacttcaagaaatttatcgcaaaagatggcgaagagcgacgcgttctgtccgtacacattgtatcccagcaaaccgatgaaaatgccacgtcagaagcggagcccgtggagatcacaaacatggagcgccacaaaccaatcagcgatattgtgacctttaagtcgtgcaaggagctttaccccattgctctgccattccttgacattaaggcgaagggagcacgcagcaagctttaaactgcaataaggaaattgaggtctttcttaatagcacatggttttggtctctttttgttttaattgctcgaaaaaaaacattgttttgtcattcacaaatataaaagaatttggatcaacagcgcgttctgcttgatgtaagagctaccgaggagcacactgtttgggatagagaaacccgtgtccagcttgttcagcacctgtgaactgagatcttgcgttcttcgttgggtgtgactttgatccagtatggaaatcttgtgcttcagctggatatcttcggtccacttagtgttctggaaaattccgtccatttctaacaagatgttgttgctttggccagttttagattttgggttaaagacgccgtatcccagttgcaggttcagcagttcgcgattcatgtgatggaaagtgcactttagttgcagggacttgcctttaaagctgaatatcggactactgacagtggccaatttaggtgctttgataagttccgtaacgttctccaacttccaatagtaagtgaacaactttacatcctgatcggccagtacagtattattgaacttatcgacttcattttcacgagctccaagatttgcgttcgaatccaagtttttcagagtagg

SEQ ID NO: 40974 - protein, 990 aa, DROSOPHILA
MTIAESSQKSATRKPDSMEPILRLNNIEKSLQDTRDYRGLQLENGLKVLLISDPNTDVSAAALSVQVGHMSDPTNLPGLAHFCEHMLFLGTEKYPHENGYTTYLSQSGGSSNAATYPLMTKYHFHVAPDKLDGALDRFAQFFIAPLFTPSATEREINAVNSEHEKNLPSDLWRIKQVNRHLAKPDHAYSKFGSGNKTTLSEIPKSKNIDVRDELLKFHKQWYSANIMCLAVIGKESLDELEGMVLEKFSEIENKNVKVPGWPRHPYAEERYGQKVKIVPIKDIRSLTISFTTDDLTQFYKSGPDNYLTHLIGHEGKGSILSELRRLGWCNDLMAGHQNTQNGFGFFDIVVDLTQEGLEHVDDIVKIVFQYLEMLRKEGPKKWIFDECVKLNEMRFRFKEKEQPENLVTHAVSSMQIFPLEEVLIAPYLSNEWRPDLIKGLLDELVPSKSRIVIVSQSFEPDCDLAEPYYKTKYGITRVAKDTVQSWENCELNENLKLALPNSFIPTNFDISDVPADAPKHPTIILDTPILRVWHKQDNQFNKPKACMTFDMSNPIAYLDPLNCNLNHMMVMLLKDQLNEYLYDAELASLKLSVMGKSCGIDFTIRGFSDKQVVLLEKLLDHLFDFSIDEKRFDILKEEYVRSLKNFKAEQPYQHSIYYLALLLTENAWANMELLDAMELVTYDRVLNFAKEFFQRLHTECFIFGNVTKQQATDIAGRVNTRLEATNASKLPILARQMLKKREYKLLAGDSYLFEKENEFHKSSCAQLYLQCGAQTDHTNIMVNLVSQVLSEPCYDCLRTKEQLGYIVFSGVRKVNGANGIRIIVQSAKHPSYVEDRIENFLQTYLQVIEDMPLDEFERHKEALAVKKLEKPKTIFQQFSQFYGEIAMQTYHFEREEAEVAILRKISKADFVDYFKKFIAKDGEERRVLSVHIVSQQTDENATSEAEPVEITNMERHKPISDIVTFKSCKELYPIALPFLDIKAKGARSKL

SEQ ID NO: 40975 - DNA, 2598 bp, DROSOPHILA
tcaccagcgtctccgcctctccctccacttcacaagtctccattggtaggaaactgtttatattctatagtctactagtttttgtttgtttatatttctgcgtagtttacgcgaatccccgtttagactgtacaaaatgcaaatttcagaaaggcgcgaatgatttcgattgctgcctgcctcaccgccattgttatcgaaattttgcttttgcaacagtgctgctttagctggcttatcgatagctgatacttaacccattgctttcacttactaaataattaattacatttcctcataaagcaagtgacttttaaaatactttcatgtttttaacatcatttagtttttataagtaatctaaattcaattcatttatttccttgtccattggaagtataccatataaggccttcattaaaaaggggtctttctaaggttaaagtttattatttgttttcaaaatgctgcaaacaaatcgagtccttcaaaaagagcaggctgaactatttgctatccagaagaaactcgaccgagtgctccccgtcattcaggaggcattaaattcactaaaggtatctacaaatctcttgcttcaatgacggttttcccaattcagtgttccacaggtagaggagctgcatctcaagtctcaggtggtgggccagcagaacccaaaaacgcagtgctcccctggaagggatcccctccacatagatctgtcggtggagcagtccccaatcacaactgtgatggagtcccatctcgtcaacagccagcaaatagatctggatctcgtaagccaaatgaggcgtttcgaggaggaagtcgactcggattaaaattgttattaaggctggaactttaccagaaaaacgtacatgttgggagcattaaaatataaacaatacagtaccaaaagtatgttcattttcggtgtaagtgtgggaaaactaaactagtaaagctacatactacagaccacaaatcggtctcttgattactcttgatcgtcagaagattcaggtgaactcccggctcgttttttctttttttgtggagctccctgcttttgatcctcgctgctgtcgctgtccgagccacttccactggagtctgacgagctgccttcctcgtcgtccgaatccgaactggagctgctcgagtctgattcggatgaggagcccgattcgctgctgctgtctgagctgtccgacgagctggaggaggacgaggagctcttgctcgttttccgctttcgacggaccttctttccttccgaggaagccacttccgagtgctcctccacctggttcttgggtgcgtcagcctccttttgggacatacgcttgcttagctgcttggtacgcgagctccggtggacgtatttgcgcttctccttgcactcatagctccagtgtccgatctgcaggcacttctggcaccggatgccattgggaaagtctgctgcttgctttgcggatctgttgttacagaattcgtaggttacaacaaaaaagccggctggggtacttcttaaacgcgactaacctcttcttttgcgctaatttgcgggcagctaggcccaccaaagtcatcctgaagcactcgagcagacgctgttgggaggaaatcttgatgtgggtggaaaccaacgtggccgggtggaaaaactgggaaaaatgagtatcaaaaatgttttttataatttttttcgtcacattagcgatagtccactgaaaattgtatacttcgcaaatcgactgtatatggtatggtcacccttattgttatcggctatcgaactcaacagctgcttgcctaatttgtgtctacctggtttatgttgaaatgtctgaattttaaagttaattaagccaaaatttaagtgcattatgcatggtcgtaaaaaaaataagaaataagcaacagctgacagctatttcacccttaattgactggcacaaattgcttggtcaaacaataacaaaagcgctgtgctgactaagcggcgaaagtggttgcaacaaagtccaatcactatcaatcggtaaggttgctgcaggtcatttgctgaccagtaataaaggatttcatacacagctagccatggacaacagcgcgttgatgccacaggcgagcggacgtcatatgccgcccgaggaactggccatgcaagcactaaccaagcagctttacaagtctcgtctcttccgcggttattatatggaacgctgcttggtggagcaggtgtccggctaccgggacgtggtggtgcttcaacgcagtgagcgagagttggagaagctgctgcactcgagtgccggccaattacaaaagttttatcaacgcttcgtgcccaatatgtgggtgggcatcacctatgggagttacggaagttaccagcacaaagcagatcctggtcaactggaaacctgcatctggacagagatgaatgatctggcttttggagagtattggtttagcatcaagacccttcgcttccgggaccatgaagtccagttcaaactgaagatgataaggcccgtggagccagagctgatggcgacgccgaggagatcactgattcttaataga

SEQ ID NO: 40976 - DNA, 531 bp, DROSOPHILA
atgactttggtgggcctagctgcccgcaaattagcgcaaaagaagagatccgcaaagcaagcagcagactttcccaatggcatccggtgccagaagtgcctgcagatcggacactggagctatgagtgcaaggagaagcgcaaatacgtccaccggagctcgcgtaccaagcagctaagcaagcgtatgtcccaaaaggaggctgacgcacccaagaaccaggtggaggagcactcggaagtggcttcctcggaaggaaagaaggtccgtcgaaagcggaaaacgagcaagagctcctcgtcctcctccagctcgtcggacagctcagacagcagcagcgaatcgggctcctcatccgaatcagactcgagcagctccagttcggattcggacgacgaggaaggcagctcgtcagactccagtggaagtggctcggacagcgacagcagcgaggatcaaaagcagggagctccacaaaaaaagaaaaaacgagccgggagttcacctgaatcttctgacgatcaagagtaa

SEQ ID NO: 40977 - protein, 176 aa, DROSOPHILA
MTLVGLAARKLAQKKRSAKQAADFPNGIRCQKCLQIGHWSYECKEKRKYVHRSSRTKQLSKRMSQKEADAPKNQVEEHSEVASSEGKKVRRKRKTSKSSSSSSSSSDSSDSSSESGSSSESDSSSSSSDSDDEEGSSSDSSGSGSDSDSSEDQKQGAPQKKKKRAGSSPESSDDQE

SEQ ID NO: 40978 - DNA, 4216 bp, DROSOPHILA
ccgcacaagaactgcctgcacgagatgctccaggcgttgatctgcaacgacaacgatgtgaagcgcttgaacacggagctaaggaatctgaatctagagctaaaggcggagctggccaagattaacaaggcgaaccagaagtgcgggcacgagaagaagggcaaggtagtttgcgagagcaccgaggatgtgacgaaattcgcccagcggatcaatagcctggaagaggtgacagcgcacttcacccagcgtagtgaggagattcgaaagaggcgggacaacatcatcatctatgcccgccagtgcctgtatgcctacaacgaggagaagtgcaagttcaagtcgttccacgagaacacggtggactacataaagcggacggcgacactctcccaggatgcggaggttatccgggcatgcggaaaggaggtgtgcgagctgcataagcgcttcgtgcgtgaggtggccaagctgaagagctgcgaggcggagctgctgccctttttcaaactgctcaaggattccgatccgaagacctactgcgagtgctgctgtttcaagggatacgactggatgcccaagagcaagaatctggaggccgtggatgcaatggctggcgagatcaaggaacagatgggcgacgtactggtcagggccttcgctcaactgcacattcattcgccgcaggatccacgcgcctttattgccgcctatctgatgaatcttgatcgtaacgagcaggaaatgaaggagaagctcgtgattttccaagcagatccagcagtgcaaccccaggagctttcggatcccacattcaattgcgaggatatttgtccgaagcctgaatgatatcattattaatccacgattgtattcgaataataactttaaattggcgagctaagtacacagaatttattgccaccagcggaaaaatttaaatgaaaagcggctttcttcaaacattttattaattcaaaataaacacgcaatacattttgggacatatggttttctacgtagtagtagttatatttaatccttaggttttcgttatacaaaggaaatcacatatagagctgttataaaccttatatactcggtttgcatagccatctaagatcgggtaaacaatgcagcttggatataaagacggcgtacggtggctatgatttatttcttgcgacgattacggcgccgggtgttgggatccggttccttctctgcaatgcctgtaacggtgccacccgctatctcggtgttggccaacttttgctgattgtccaaaaagaacataatgtcgcgaagctgttcctttaattcggtcacctcggcgtcgtgggtttgcttgaactcgttgtactgctgttccaagagtttgtatttgccgtgccaggagctctggttgctctgcagtgccttggacaactcacgctcttcgttcagctgcttctgtacatcctttagcctacaagagcacgaaattggttaatatttggttaattaggaaaggcgatgtgaatgtatttcttacttagctgtatgctgggccaacttgcgctccaaattgaccttttctttctgcatgttctgctgaagctgttgaagctcggaaacctctgtcttggcgtcgttggcagtcgccttgtggttctgccactcctgctccaatcgttccatgcgctcctcatagtacttgcgctgtgtgtccagctgagaggtcaacaggtatgtgaactccatctgcatggagtcaatcttttcctcgcgctcatctttctcggtttgcgatgccaccagcttgccgtcggatttgttttgaaataagcgatgcacaaagttgtcaccggcatagtcccatacgcttgaggtgcccaactgcatggcaaaggtgtgatttgtggcccggaagtgtgcagcagcatgtcctccctggtagcgtccgcagcccacatgtccgcagatcaggcagatccataaggaatcggtgccctcgcattccatgcacacggaatcttcgaccagtccaggagtttgaacatggcggcacaccggacaggtggagtcaccccatttcatcaggcagctggcgtggaaggcgtgattgcacaatatggtcaacactccatccacgctctcgtccatgcgctccaggcacactggacaggtgggtagctcggtgtgtcccattggtggtgctccatgctcgctcctttccacctctgatacccagaccgcgtggcacagcgagtccggttccagtgagttgtaagtactgccattataggacttgtagaactccaaagcggattcattcgagcggaatctataagagtgtgattatattagtaaatatccgtgaatctgtaatgtcagattggaacgccgcttactccaaaagcaccatgaactgattggggctgccgtcacgtacaatctggatgtgtttaatctctgcatgacagggggcaataaagttcagcagatcgtggcagttaagagtggccggcacggccagcaggcagagttggttagatggagcttccttgatggccttgcgttcgctgaaacatacagaaataatggtgagtgaaatatttagtaggatagagcagagttaacccactttttcttgtagagatggataagacctttggtcacctcgacgatgggattgccggagaagtaccctatctcttggggaaagttggaggcgctggctcccgcctggccatcatcgccgctccgaggagttatctcccgggagctgcccgccgaggggctgttcacatgctgcacggcggctacccagttcatctcctgctgtctgggttcactcaattcccgcttccaacgctggtttgtgtacgtttcgatggtgatgtcgcgggattggcgaagtccgcggtcgcgttcccgctccttgagcactcggggattggttggatgttcggcggacacagctccctcagaatctgttcgaaaatatagaattaatgcacttcctttgtccgaagctatcgttgctgcattgaattttacctgcactgggatccaaatccgtttcgatcttgatcacacacagggaaatgttttctagcatgacacgggcataattttcattagtttttatatataaaaaaaagcctaaagaccgttcaaagtgtaattttctattttactctgtgcgaaatgagtttgttatttttctatgtgaactagttcgcgcggagtgaacggccatcgattgcttcgcgacaaaagtgtttagttcaacaatcgcttatcgataatgcctaccaacactgattgtaacgtacctggattcaagtccatcgaaattcaaaagattaaaatattaatttcgtgctcggtttagcagattttcatcgccaatagagaaaatgtatatttttactcgtatgaaatgataagtgaatggagccaataaaataaaagtgatttcctgtggaacagtgtgctatgaagtaacatacaacttgtcggcttcgcttgacaacttcggctgtggccacttcggtcggatccgcttggcgagttggccaaaacaaagccagtgcgttgctgttgctgctgcgtatcggacgtgttcggtgagccagactcgcgtcatccgtgatttgggccataacaaaaacaagtttacgaaacttacgtcgtcatctcgttctttcccgcgcgcgtaaaccaagtcaaaataaaagagaagcaaaacaaaaaggctgtccaaaggaaattgcaacaaatcaaaaaccaaaagcgaaagcaaaagtgagtgcaatagttttttgtgatttaattccataccgtttgctgcagtaaccatgggctgcgcccgcggttaacacaacaaattgattaccatgggcgcggcggaccaaagtcgattgtaattgcaattaccaagattggaccacaaagtacatttaaccgcacacacacgtgcaacattcaatgtatggacgcggccgtaaaaacggtcatcgcaaggagtcaacctattgatttttggtattatttattaaggggttcgcccataaacctgcttaccaaattcgcaactggctcacctttctcacaaccgcactcatatgctaacaaacaagaccggagatcaaaaatagccgtgggtgcacagtgagaaacatttgtgctgaattacctcttttaatatatttactgtctattactatgt

SEQ ID NO: 40979 - DNA, 1954 bp, DROSOPHILA
cacatagaaaaataacaaactcatttcgcacagagtaaaatagaaaattacactttgaacggtctttaggcttttttttatatataaaaactaatgaaaattatgcccgtgtcatgctagaaaacatttccctgtgtgtgatcaagatcgaaacggatttggatcccagtgcagattctgagggagctgtgtccgccgaacatccaaccaatccccgagtgctcaaggagcgggaacgcgaccgcggacttcgccaatcccgcgacatcaccatcgaaacgtacacaaaccagcgttggaagcgggaattgagtgaacccagacagcaggagatgaactgggtagccgccgtgcagcatgtgaacagcccctcggcgggcagctcccgggagataactcctcggagcggcgatgatggccaggcgggagccagcgcctccaactttccccaagagatagggtacttctccggcaatcccatcgtcgaggtgaccaaaggtcttatccatctctacaagaaaaacgaacgcaaggccatcaaggaagctccatctaaccaactctgcctgctggccgtgccggccactcttaactgccacgatctgctgaactttattgccccctgtcatgcagagattaaacacatccagattgtacgtgacggcagccccaatcagttcatggtgcttttggaattccgctcgaatgaatccgctttggagttctacaagtcctataatggcagtacttacaactcactggaaccggactcgctgtgccacgcggtctgggtatcagaggtggaaaggagcgagcatggagcaccaccaatgggacacaccgagctacccacctgtccagtgtgcctggagcgcatggacgagagcgtggatggagtgttgaccatattgtgcaatcacgccttccacgccagctgcctgatgaaatggggtgactccacctgtccggtgtgccgccatgttcaaactcctggactggtcgaagattccgtgtgcatggaatgcgagggcaccgattccttatggatctgcctgatctgcggacatgtgggctgcggacgctaccagggaggacatgctgctgcacacttccgggccacaaatcacacctttgccatgcagttgggcacctcaagcgtatgggactatgccggtgacaactttgtgcatcgcttatttcaaaacaaatccgacggcaagctggtggcatcgcaaaccgagaaagatgagcgcgaggaaaagattgactccatgcagatggagttcacatacctgttgacctctcagctggacacacagcgcaagtactatgaggagcgcatggaacgattggagcaggagtggcagaaccacaaggcgactgccaacgacgccaagacagaggtttccgagcttcaacagcttcagcagaacatgcagaaagaaaaggtcaatttggagcgcaagttggcccagcatacagctaagctaaaggatgtacagaagcagctgaacgaagagcgtgagttgtccaaggcactgcagagcaaccagagctcctggcacggcaaatacaaactcttggaacagcagtacaacgagttcaagcaaacccacgacgccgaggtgaccgaattaaaggaacagcttcgcgacattatgttctttttggacaatcagcaaaagttggccaacaccgagatagcgggtggcaccgttacaggcattgcagagaaggaaccggatcccaacacccggcgccgtaatcgtcgcaagaaataaatcatagccaccgtacgccgtctttatatccaagctgcattgtttacccgatcttagatggctatgcaaaccgagtatataaggtttataacagctctatatgtgatttcctttgtataacgaaaacctaaggattaaatataactactactacgtagaaaaccatatgtccc

SEQ ID NO: 40980 - protein, 482 aa, DROSOPHILA
MNWVAAVQHVNSPSAGSSREITPRSGDDGQAGASASNFPQEIGYFSGNPIVEVTKGLIHLYKKNERKAIKEAPSNQLCLLAVPATLNCHDLLNFIAPCHAEIKHIQIVRDGSPNQFMVLLEFRSNESALEFYKSYNGSTYNSLEPDSLCHAVWVSEVERSEHGAPPMGHTELPTCPVCLERMDESVDGVLTILCNHAFHASCLMKWGDSTCPVCRHVQTPGLVEDSVCMECEGTDSLWICLICGHVGCGRYQGGHAAAHFRATNHTFAMQLGTSSVWDYAGDNFVHRLFQNKSDGKLVASQTEKDEREEKIDSMQMEFTYLLTSQLDTQRKYYEERMERLEQEWQNHKATANDAKTEVSELQQLQQNMQKEKVNLERKLAQHTAKLKDVQKQLNEERELSKALQSNQSSWHGKYKLLEQQYNEFKQTHDAEVTELKEQLRDIMFFLDNQQKLANTEIAGGTVTGIAEKEPDPNTRRRNRRKK

SEQ ID NO: 40981 - DNA, 3346 bp, DROSOPHILA
tatcttggcctttggagagggatggcataactaccatcacgtcttcccctgggactacaagacggccgagtttggcaaatactcgctaaacttcactaccgccttcatcgatttcttcgccaagatcggctgggcctacgacctcaagacggtgtccacggatatcataaagaagcgtgtgaagcgtaccggtgacggcactcacgccacgtggggatggggcgatgtggaccagcccaaggaggagattgaggatgctgtcattacacacaaaaaaagcgaataggcaggttgagcgtagggccaatcatgggagggtttagcagaaaatcaatcaaattcaagtaaagcaaagaaacataaatttccattttgcaaatgtccgcggaacatatttcctaacagagcagaagcccatttaattaattctaagataaagcgttgatgataactgtttgttgtatctcgaaaaactttataccgtctgtgttaaaccagctccggaaatgtttttatttcgctctctttttatggggagacgcaaaactaactttgtatttatacacgcatataattgcttaatacctggatatttatgtacaatagatggcaattggagattttcattcactgttatctcgaaatcacttttgtaatttgagagaaattttcagttaaaaatctaaaagaaaaaatgatacaaatggaggaaaactttccgcttcaaagaaaaagaaatacctgcaaatgaaagattttagtatttagcgtaagccaaaaacaacaagaattatcaaggaactaatatatataaactatataataaacgatcgatgttagaacactaaaagacactttcacctatacatatgatatttctttaaatgttattaaataaaatgggaaaacgcctctgggaaacaaaacatcccagtagacttttccataaactgaaaatgtcaatgctcgccccaacactttcctttcagttgattcccaaaccccaaaagtgaaacacgcacacactcggagaacttttgaaacacacataccaaaacaaaattatcgtattggtcttccaatggacgaatttagagtacccaaaaaggttaaccgtaacgttttcaaggccattagcattcttcaatcttcccgaaccgattttgtctgcgctaatgcaatcgtcgaccaggtaaagttccaaatgcggaaccgcattccggtcgagcatatagatgaggccataaaacagtcgctggccaacttgaccatgctgggcatagtgcggcgtctgggatcgtctaagtattcgcttagcaccatagtgtatggccggttgggaatgcccaatcccattgcacatccgccgggcaatcctggtagaccacatcggcgagctgcgcagaatgcggtatgaatgcaatccaaagggatgttcttaataaataaaaagctaaccataatgttcaacttgcagcgtcaaaagcgacctgtcgggcgcttggatccttggaaatcggtcagcaagatcttgagtgaggactctctgtctggaactgagatgaccaagatgcgcaagcggatgcgcaccaacacaaagcgcgttgtcaagaagaaacgaatccccaaccgtcgactatctcgagccaggaagtataaagaaacagaaatggccaccaccagtatcgacctaagatgttcagaaagtcgtttgggactagacaataacgtgcaaatactattcggatcaccgggatggacctataccaaacccattcaaagtactttggtgttgcccgatgcaccattaagattggatcaaaaagcgaatgatcctgagaccccgaaaacaacagttctttccgggaatagcagcagcacttctgtgacagacgtaaaagggaatgtggtgaaggatgaggagggaggatctcaaccttcaattagtggcacaaattgtcgcgctgtgcccatcggtttggggattaggccagcttaccatacctctggaggagaatccgatgtggagaatgcctccgtggtcggactatgtggcagtcccttatgcctgcaatccacaatgagtcaatctctggcgcacgattcagctccaactacttcccgacccacagcaaaacaatcaaataacttgggaatccaacaaattactgagtgtcaagaaaacgatagagtagtggagagttcagaagttcaggaaacatttgaaaataatttggataagcaagcaagccagccatccgatgttttagaagagtgccagagcgcacttaattatgatttttataaatgattttcaatttaataaaactaatcgaatacccgcgccggcatcgatatatcgatagttggttcgcgtgagcatgcacatttcttttctctctctctctctgctctaatacaacgagagtccattaattttaggtagctaaaacataattgtctggaattttcatagtttctttcaaaaacctttttaatataaatcgtcaataggtagctgaaataaattaattaaaataatcagttcagaatagatttcgtgtgtagggtatacaaaagtcgcacgacgtcgggccttggaaatctgttattatcgcgctgcgtctggaagtctttttccattcaactctcggtcctcggcgcgtaaagattgcatttacattttgctcagtatttagctttgtgtttttgcgtatttttatttatatgtgtaaatcgttatttaagtatttgcattgtgtttaattgtgcttgcgataagtgctaaacagatgcgtccagttgcatctgcctattgtgggatttctagctgtaattgagcgataaagagagttgcagttcgcgacaccgatctccccctctctggttacgtcggcaactgcaaacgcaaatgcaaaagtgcgcggcaagttaatttaattcggttctattgtgattggaaaagacatagcgcagcagcaggatggatttcaaattcctaatgatactcatcctgggctttggctttatgttcgtctttacggcattccagaccatgtgtaacatcgaggtaagtcattcctctattcgctctcaattcatccgtctctctctctctctctgtgttcccacgcttgtgtgtatgcgtgggcgttgttgttgacatcctgccattggactttcgtccttgtccttgccaatagacatcgcagtgcccttgccgcccacaagtgcgcccaactacgcccacttcaacccgcgtcacaggatgttataacattgccaccccattcattgtcgacccatttgtttgcccgtaaattaccccctgatttgtggcggtgta

SEQ ID NO: 40982 - DNA, 1280 bp, DROSOPHILA
accccaaaagtgaaacacgcacacactcggagaacttttgaaacacacataccaaaacaaaattatcgtattggtcttccaatggacgaatttagagtacccaaaaaggttaaccgtaacgttttcaaggccattagcattcttcaatcttcccgaaccgattttgtctgcgctaatgcaatcgtcgaccaggtaaagttccaaatgcggaaccgcattccggtcgagcatatagatgaggccataaaacagtcgctggccaacttgaccatgctgggcatagtgcggcgtctgggatcgtctaagtattcgcttagcaccatagtgtatggccggttgggaatgcccaatcccattgcacatccgccgggcaatcctggtagaccacatcggcgagctgcgcagaatgcgcgtcaaaagcgacctgtcgggcgcttggatccttggaaatcggtcagcaagatcttgagtgaggactctctgtctggaactgagatgaccaagatgcgcaagcggatgcgcaccaacacaaagcgcgttgtcaagaagaaacgaatccccaaccgtcgactatctcgagccaggaagtataaagaaacagaaatggccaccaccagtatcgacctaagatgttcagaaagtcgtttgggactagacaataacgtgcaaatactattcggatcaccgggatggacctataccaaacccattcaaagtactttggtgttgcccgatgcaccattaagattggatcaaaaagcgaatgatcctgagaccccgaaaacaacagttctttccgggaatagcagcagcacttctgtgacagacgtaaaagggaatgtggtgaaggatgaggagggaggatctcaaccttcaattagtggcacaaattgtcgcgctgtgcccatcggtttggggattaggccagcttaccatacctctggaggagaatccgatgtggagaatgcctccgtggtcggactatgtggcagtcccttatgcctgcaatccacaatgagtcaatctctggcgcacgattcagctccaactacttcccgacccacagcaaaacaatcaaataacttgggaatccaacaaattactgagtgtcaagaaaacgatagagtagtggagagttcagaagttcaggaaacatttgaaaataatttggataagcaagcaagccagccatccgatgttttagaagagtgccagagcgcacttaattatgatttttataaatgattttcaatttaataaaactaatcgaatacccgcgc

SEQ ID NO: 40983 - protein, 387 aa, DROSOPHILA
MDEFRVPKKVNRNVFKAISILQSSRTDFVCANAIVDQVKFQMRNRIPVEHIDEAIKQSLANLTMLGIVRRLGSSKYSLSTIVYGRLGMPNPIAHPPGNPGRPHRRAAQNARQKRPVGRLDPWKSVSKILSEDSLSGTEMTKMRKRMRTNTKRVVKKKRIPNRRLSRARKYKETEMATTSIDLRCSESRLGLDNNVQILFGSPGWTYTKPIQSTLVLPDAPLRLDQKANDPETPKTTVLSGNSSSTSVTDVKGNVVKDEEGGSQPSISGTNCRAVPIGLGIRPAYHTSGGESDVENASVVGLCGSPLCLQSTMSQSLAHDSAPTTSRPTAKQSNNLGIQQITECQENDRVVESSEVQETFENNLDKQASQPSDVLEECQSALNYDFYK

SEQ ID NO: 40984 - DNA, 6685 bp, DROSOPHILA
aaggaactgcttcacctcgaagctgctaagtgcagcgaatttgtaccggaagagctccatttcgcgggccacgaaccagcgcgcaaggtcctcggagcggcagtaggccagccgcaagatgaagtgcgaaagatagtcccgcctgcgggtctggatatccgcctcgtgcttggcgcttccgccggtggagcagagccttaaatagctgcgcaatccctcgcgggtcaggtccgcactcacgatttccttccattcatctgagagcacgcgcaggttccgggtgcttgcgcgatccaggacgcggagaaggcgcaagcgctctagagccagctcctcgaattcgtctatgtgcacgtcctccgtcggcggatagtggtacagcatgacgttgtgcgggtacttggtttccaggctggccacctccaccttcacctcatgtctcgcgcgtttcttcagaccaaactccattgtgagtcgcgggaattgctatagtaatttacaatttgtggaatgcccgtttgttgttttggcgcgcaaactactgatggcaaatatcagctgtgtcagttgttatcgatagttttctgctcattatcgatgcttgcggtttattcaatttgtatttcaaaattaaacgtttttaattgttattatcagtcaattggtactgatgtattgattgtgtgttgcattgttagatatttcttaggccttagctttgtttacatagtgtccagtagtagtaggttatgtttaatatacgacgctattgcctttgttaagatatttcaaaaacatcacataagctcttaaaaacctaaatacctttatttattaatatatgtttaaactatacttatgttcagcagcaaattttgcatattactatgattactgtggggaaactttcgtcttcatgaaagtgtaattaagtagtttatatactatatcaggtacgtgcacaactgactagaactctccggataaaattacatgttttctaaacactgatctctctggagttgatccctatgacctccagggatctcttcagacgtttccaaaacagctttcgatcctccttggccgtcggccactttatatacgttttcacatccatgagatattgcaaagtcttgggtcgctttcgccgtggaatgtcctccagaaaaaccaggatcaagtgctccttgctgacctcaaagatgctacaatatacacacatatattgattttaatatttgaattttacagataaagattccttaccgatgctgtgccaaatacatttcaaattgacaccaatgactcaacaggaacttggaggatatgatcagcataagggaatacgagcgatccatgcaggagatgatgttatctaggatggtcactccaatctgcatgtgaattaagggttaaggtttcactttattagtaagttaatgttgtaagataagtacgcttcacctgaaaatctctttcatgcagacaaatggacacatccccagtttcctccacgttcggcagcagttcattgagcacccaggtccgatcattctggcagtagctgatgaagatatcgtagacggcactgggatctctctgggatatgtttgtgaatttattcaccgactccttggacgcactggacaacaaggcagcggacttcagggaagagtaatagtagtggatgtgccagcgcttcagataaattataaatcccaggatgcaagcgccaactaagctgcccatgactgcgatcactgtgttcgtaacgtggtgcaactcctcggcgaggtcactcatcgacctgatctggcagttgagctcatccacctggagctgatcggtgttgttgaagcagtaatactgactggcctcgtagtcgagcagctgaaattttagggtaagatctccgtcaaggtcccctaagtggtatggctgggccgcggagcacttggctaccatgtagtcctcggaggagaagcgcagcttgattatatgattcgcgcgattgaactccctgatgttggagtaacttctctgcagccagggaatatagcgactctgccatagcttgcgatctataattagtgactccgccagagatattacctcctcacctacggcattctgactatagttcagcagtctataggagcagtctgcatctttattattggcggccgccacctccaccaccgctctcaaatggcagtcgcaaataaagtcgttgtccccgagactaaggtaatccaatcgctcaaagtccttcaacatctcgttggacagcatgttgatggtgttgcttctcaggttcaaaacccttagggcggagttgttgtggaaggcactgcggtaccaattgcccacatggttcgagctcaagtcgaggatctccagggactccagagactgaaacatggcgggagtgagagcgttgatgttgttacccgcgaggcccaacacctgaaggttcttcaacgacttggaccactctaaatccttaatattcgatcgctcgaagtacaaatacttcagagtgttagcgatgccatcgaaggcgtcgtcgatgatgttgtaggataggtaggggtttccggacaagtcgaggccctccagaaccgtattcttgaagatggtactgctcaccatgggaatggcagtgtagcacagactgaggaacttcagcttatcccccagatgggcaaaagccaccgcactattcctggtcattttcgagtgggagaggtccaggtaaatcagttccggcagatatttgaacacgttctgctggatcttcaggccgtatatcaggcttaaggccatttccagagtgggcaactgcagttggtagctataggtcaggaagttagtgaaggacaggtcgagatactgcactccctggacgtagtagaaagtgtcgtggcttatcgtcatgatcttgttgtccgacatgaagagcctccgcagattgctgacattccggaacgcctccttgctcacgtactcgatgctgcagttgctgatgtccagctccacaagtcggggcatctttggaaaagtggcccaggctatagattgggctgggaaacagataaggaattcacgtgttagaagtatttatggcatgatatttaaaaattaaacccttcctccttaagttacatagttagaaccttttaacagatatgaaaccaggaatatggaaatgacggatatcaagttgtgattaaatgtggcatgaggacttttaggaaaacgtctttgctgtgtaattgtgtttgcgttgagatcttacatgaacttccgtgctgatcgaaccgatcttttaagaccttaataaagttcgtatagtttctaccggttgtgattgattgtcccatgtttgtgttgttgttaaagtatagatagcattcccgatcatacagatcggtggtattgtgtaaaagtagtagttcacaatggtgtggtaccgagttactagcctccaagcgggactcgtttacaaatcgagcaaagtctgaaacggcgaatggtaactggacatcagaatacgtgtgccattgcgtttccggttcccacaactgactaaatggtcaatgatctaacccggccaagcttaccttcagcatctggaatcagttcagcaaagttatttcctcgcagcgataaaagcttcaaggattccctcatggagtagagcgtcctgaacggagctgcagtcaacgtattgaatgcggccgagaagacttctgtcctccaaatggtaaccttcctcgaaagtttcgcttctcggaataggtcagagtcgtccttaagattaccgtgggatagatccaaatacaatttgtgcgctttaaataagtaattaaaggtacgatcagaacctataaattataagtgaatctaccatattcaaaagtgacagtatcggatactatggggataaaggctaagttcaaaaagtgccgggtgtaaacattcgaagagatacaatttattatcgctaagatccatatagttgcgagtggctttgccaaatccagcccaagctactacactcagagaaaagactgttctcaacgatcttgatatgagatttttgatcttaaaatctagcaaggatcaaatcatgctcatatcgagatcgaaccgttctcagattgcaaatgactggtctcatttgcctctctctctctctctctctcttccacaattttaaacccgatactgcttccgccaaaaaatatcaacattgagatcgttttcgtctcgaaatcaagaaggtttcttctaatgagcatgattgatgccactgagtacgctgaacacaaccgatatcggtatttttttaaatttctctgggtgtagtaatgcagagctttcactgataaggggttccataataatgttaccgattctggtgggattaggctaacatcaaagaccttctataagcagtcgatccgcgttgccggaagcgtgaaagtatatgtatatagtttcgagagctgttaacaatgcccaatcaaactgagacttgggcagggatttttattggactttattggataggtttaccgtatttctttgtgctgtccctgagggttccgttgggaaactgccaccatatcacctcgtccttgatcagatccagcagacaactgttcccatcatccgattcgtacttcaacatgagggatttgaggtccgttctctccttgctgacctcttcggcctcttcgctggatgttgtggctgaatctggttctattatcaagccatcctggatcgaaaactcggtgtatgcttcccttacgtttccaaggaacaggcatactaatacgatcacatcccatatatattttggacacatattcactgaattgcgcacctatagtgcttgtaatgggggattataaataagatttgacagctgtttgatttcacaatcacacagataatcgcgttctatacaatttttagccactcattcagtttcactgggtattccgaaatctaagccacattttgtgatagttaaccgcggccgacatttcccgcaaatcactttatttgcggctgggcgaagcacacgccttggattcgcgcaatggactggctggaggactcagcttgctccgatggtcagcagaaataataggtagctgcggtacacatgtgcggctaattctgccatgatacggcttatcaattttggcaatatcttcccttgaatggcccgggactatcagcgtatcgctttttcggtggcactgggcgtcccgcttcacgcccacgccatgttccttatcggataattatctggacgtcggagtacggctattaggcccgtacttcaatgggatcggtgctccggatcaaccgatatagccacggctcgcttttggccagcacatagtgagttcagtgagacacaattttctatactactcgattgtttgcagatagaaaagttttgatttacggcgtccagtccggagaccgatatgaaaaaaatcacttggaaaatcttagattatcagaccatcggcgatacgaaaaggtggccactaaaacacccgggtccacaaatgcccaattaattatatcaattcccttcatatcatgcatacacagtttattggccgtaaaataatttattgggagataggacttcagcggtagtctcctatgacaaatgatcatcggatacccattgaggaagcaacattttactaatcttccgctgattaacacaatccttatgatagcacaccaattttgctttaagttccaccaaatcttcaatgcgactttgtgcagagtcagcatatcgcagacggagctctatttttataaggattttccatgattattatttataacttaatatcacgctgaaatcaactggttagcagtccaatcgttaaatgcgaacacttataaaaagaaaagaaattggttattgtattatggtaactatacttgtcttaacccacggtgggttttgagtttccccagcttgaaagagaaccagatcacaaagggagtggatcgtttcccgctggaatttgagtggagtggtattgagctggtcggagccagagctcaattagaaactggttttgagtgctgagatcggatctcggctttcagtcgacattcagagctgagctgaggcggtatcaaccggcggcagatagttgagtgtgtacctggaatagtaggccactaataactatccgcccagttaactatccccggtaaactatgcgcaaatcgccggccagcctgccgtcggaggccttctccagttcgaactcctcgctgagcaactcgtacagcgatggcagcgacctggccaactgggaggagtacgtgtccacagacggcagtctcttctacatggagtatgtgcgatgtgagaagactggcgtctcggcagagcggcgggtggagttcatgcgtcgatcgctgcgcctgggaaagaagtcgtcgcgtcgccagccgcacagcaataatcagaatcagagtcagaaccaaaaccagtcccacggcccgagcaggttggatagccagacggagccgcaagagttccgcttctcacagttcaagacggctgcccccgatcccaagaaactggatctggtgatcacagccgctgatcgcttccgtttcg

SEQ ID NO: 40985 - DNA, 3278 bp, DROSOPHILA
ctgaagtcctatctcccaataaattattttacggccaataaactgtgtatgcatgatatgaagggaattgatataattaattgggcatttgtggacccgggtgttttagtggccaccttttcgtatcgccgatggtctgataatctaagattttccaagtgatttttttcatatcggtctccggactggacgccgtaaatcaaaacttttctatctgcaaacaatcgagtagtatagaaaattgtgtctcactgaactcactatgtgctggccaaaagcgagccgtggctatatcggttgatccggagcaccgatcccattgaagtacgggcctaatagccgtactccgacgtccagataattatccgataaggaacatggcgtgggcgtgaagcgggacgcccagtgccaccgaaaaagcgatacgctgatagtcccgggccattcaagggaagatattgccaaaattgataagccgtatcatggcagaattagccgcacatgtgtaccgcagctacctattatttctgctgaccatcggagcaagctgagtcctccagccagtccattgcgcgatgtgtccaaaatatatatgggatgtgatcgtattagtatgcctgttccttggaaacgtaagggaagcatacaccgagttttcgatccaggatggcttgataatagaaccagattcagccacaacatccagcgaagaggccgaagaggtcagcaaggagagaacggacctcaaatccctcatgttgaagtacgaatcggatgatgggaacagttgtctgctggatctgatcaaggacgaggtgatatggtggcagtttcccaacggaaccctcagggacagcacaaagaaatacgcgcacaaattgtatttggatctatcccacggtaatcttaaggacgactctgacctattccgagaagcgaaactttcgaggaaggttaccatttggaggacagaagtcttctcggccgcattcaatacgttgactgcagctccgttcaggacgctctactccatgagggaatccttgaagcttttatcgctgcgaggaaataactttgctgaactgattccagatgctgaagactttgctcgatttgtaaacgagtcccgcttggaggctagtaactcggtaccacaccattgtgaactactacttttacacaataccaccgatctgtatgatcgggaatgctatctatactttaacaacaacacaaacatgggacaatcaatcacaaccggtagaaactatacgaactttattaaggtcttaaaagatcggttcgatcagcacggaagttcatcccaatctatagcctgggccacttttccaaagatgccccgacttgtggagctggacatcagcaactgcagcatcgagtacgtgagcaaggaggcgttccggaatgtcagcaatctgcggaggctcttcatgtcggacaacaagatcatgacgataagccacgacactttctactacgtccagggagtgcagtatctcgacctgtccttcactaacttcctgacctatagctaccaactgcagttgcccactctggaaatggccttaagcctgatatacggcctgaagatccagcagaacgtgttcaaatatctgccggaactgatttacctggacctctcccactcgaaaatgaccaggaatagtgcggtggcttttgcccatctgggggataagctgaagttcctcagtctgtgctacactgccattcccatggtgagcagtaccatcttcaagaatacggttctggagggcctcgacttgtccggaaacccctacctatcctacaacatcatcgacgacgccttcgatggcatcgctaacactctgaagtatttgtacttcgagcgatcgaatattaaggatttagagtggtccaagtcgttgaagaaccttcaggtgttgggcctcgcgggtaacaacatcaacgctctcactcccgccatgtttcagtctctggagtccctggagatcctcgacttgagctcgaaccatgtgggcaattggtaccgcagtgccttccacaacaactccgccctaagggttttgaacctgagaagcaacaccatcaacatgctgtccaacgagatgttgaaggactttgagcgattggattaccttagtctcggggacaacgactttatttgcgactgccatttgagagcggtggtggaggtggcggccgccaataataaagatgcagactgctcctatagactgctgaactatagtcagaatgccgtaggtgaggaggtaatatctctggcggagtcactaattatagatcgcaagctatggcagagtcgctatattccctggctgcagagaagttactccaacatcagggagttcaatcgcgcgaatcatataatcaagctgcgcttctcctccgaggactacatggtagccaagtgctccgcggcccagccataccacttaggggaccttgacggagatcttaccctaaaatttcagctgctcgactacgaggccagtcagtattactgcttcaacaacaccgatcagctccaggtggatgagctcaactgccagatcaggtcgatgagtgacctcgccgaggagttgcaccacgttacgaacacagtgatcgcagtcatgggcagcttagttggcgcttgcatcctgggatttataatttatctgaagcgctggcacatccactactattactcttccctgaagtccgctgccttgttgtccagtgcgtccaaggagtcggtgaataaattcacaaacatatcccagagagatcccagtgccgtctacgatatcttcatcagctactgccagaatgatcggacctgggtgctcaatgaactgctgccgaacgtggaggaaactggggatgtgtccatttgtctgcatgaaagagattttcagattggagtgaccatcctagataacatcatctcctgcatggatcgctcgtattcccttatgctgatcatatcctccaagttcctgttgagtcattggtgtcaatttgaaatgtatttggcacagcatcgcatctttgaggtcagcaaggagcacttgatcctggtttttctggaggacattccacggcgaaagcgacccaagactttgcaatatctcatggatgtgaaaacgtatataaagtggccgacggccaaggaggatcgaaagctgttttggaaacgtctgaagagatccctggaggtcatagggatcaactccagagagatcagtgtttag

SEQ ID NO: 40986 - protein, 900 aa, DROSOPHILA
MCPKYIWDVIVLVCLFLGNVREAYTEFSIQDGLIIEPDSATTSSEEAEEVSKERTDLKSLMLKYESDDGNSCLLDLIKDEVIWWQFPNGTLRDSTKKYAHKLYLDLSHGNLKDDSDLFREAKLSRKVTIWRTEVFSAAFNTLTAAPFRTLYSMRESLKLLSLRGNNFAELIPDAEDFARFVNESRLEASNSVPHHCELLLLHNTTDLYDRECYLYFNNNTNMGQSITTGRNYTNFIKVLKDRFDQHGSSSQSIAWATFPKMPRLVELDISNCSIEYVSKEAFRNVSNLRRLFMSDNKIMTISHDTFYYVQGVQYLDLSFTNFLTYSYQLQLPTLEMALSLIYGLKIQQNVFKYLPELIYLDLSHSKMTRNSAVAFAHLGDKLKFLSLCYTAIPMVSSTIFKNTVLEGLDLSGNPYLSYNIIDDAFDGIANTLKYLYFERSNIKDLEWSKSLKNLQVLGLAGNNINALTPAMFQSLESLEILDLSSNHVGNWYRSAFHNNSALRVLNLRSNTINMLSNEMLKDFERLDYLSLGDNDFICDCHLRAVVEVAAANNKDADCSYRLLNYSQNAVGEEVISLAESLIIDRKLWQSRYIPWLQRSYSNIREFNRANHIIKLRFSSEDYMVAKCSAAQPYHLGDLDGDLTLKFQLLDYEASQYYCFNNTDQLQVDELNCQIRSMSDLAEELHHVTNTVIAVMGSLVGACILGFIIYLKRWHIHYYYSSLKSAALLSSASKESVNKFTNISQRDPSAVYDIFISYCQNDRTWVLNELLPNVEETGDVSICLHERDFQIGVTILDNIISCMDRSYSLMLIISSKFLLSHWCQFEMYLAQHRIFEVSKEHLILVFLEDIPRRKRPKTLQYLMDVKTYIKWPTAKEDRKLFWKRLKRSLEVIGINSREISV

SEQ ID NO: 40987 - DNA, 4039 bp, DROSOPHILA
aagccgatcatcaccatggaggatgcgatcaaggcggaatcgttccgcctagccaagagcagttactacaagcaacagatgaaggtttagagagggcgaatccagctctggagcagaggctctggcagcttttgcagcgtttatataacatgaaatatatatacgcattccgatcaaagctgggttaaccagatagatagatagtaacgtttaaatagcgcctggcgcgttcgattttaaagagatttagagcgttatcccgtgcctatagatcttatagtatagacaacgaacgatcactcaaatccaagtcaataattcaagaatttatgtctgtttctgtgaaagggaaactaattttgttaaagaagacttacaatatcgtaatacttgttcaatcgtcgtggccgatagaaatatcttacaatccgaaagttgatgaatggaattggtctgcaactggtcgccttcatttcgtaaaatgttcgcttgcggccgaaaaatttcgatatatctacaattgatctacaatctttactaaattttgaaaaaggaacactttgaatttcgaactgtcaatcgtatcattagaatttaatctaaatttaaatcttgctaaaggaaatagcaaggaacactttcgtcgtcggctacgcattcattgtaaaattttaaattttgacattccgcactttttgatagataagcgaagagtatttttattacatgtatcgcaagtattcatttcaacacacatatctatatatatatatatatatatatatatatatatatatatatatgttatatatttattcaattttgtttaccattgatcaatttttcacacatgaaacaaccgccagcattatataatttttttatttttttaaaaaatgtgtacacatattctgaaaatgaaaaattcaatggctcgagtgccaaataaagaaatggttacaatttaaggaaacaaatgtccttcttgcgtttgaaacaactaatccttttcgccctcgcggcgtttctcgaaaagggccaggaagatgccatcggtaagatcactgtccggctggcaatacaggacgttcttgccaatattgggatagtccttgtcgcccacattgtgccacttgttgcgcaaggccttcttgcagctgagcagcttgaaggatggatttagctgaagacaacgctgcaccacctgctcgttttcctccttccacagcgaacacgtgcagtaggcaatgcgtttgacgttcggaaaggcgcccatcgcgtgcgacaggatcttaatttgcaaaccctgcagcttttgcagccgcttgtcctccttcggctcgtcgcacacggtcatgcggttttgcattccgctgccagagcaactagggtccaccaggatgtactctacgtccggaaagcgttcgggtgctgaaattcaaacgtgttacttttttaaatattcattgtgaaatatataaatataaaactcacttaggttcaaggcgtctcccaaaatgggttttacaatatcgcaaccagcatcctttgttatttcgcacagcgtattgtagcgtacgtggtcctgctccacggagtagatgcatcccttgttctgcatcacattgcatatgtgcactgtcttcataccgggagctgcgcacatatccagcacagtggccccagacggcggagcaagtagttcggcggccaaacaggtggccttgttctgcagtataaacctcttgctgtgcaccaacggatggcggacccagtagttggaccacttggcaggaaaaatgagcacaccctcaacgtgcagatcggtcatgaactcgttctccgccagcgatttgatggcagtcagaaaatccgcatagctggcgtccgcaggcagctccttgcgccgccagtcgcttttatgcaggtagtccaaggcctccgccaagctgtatagatttgtgttgatgcgcacatatcgaggattgggttctgtgtgggcaaacaaaaagacgagttcaaaattgtagccaaagtaagatttattaagagttgttaagagtcgttactggtcctttaaacgatcgaaataatctggacttggctggcagcacttaagttactgttctttctttggctccgcagcttccggctcgtcgtcctcatcctgctgcacgggttccaagggtggtgggggcttctcgcggaaagcctttaatacatacatggccaccacgaggttaacaaccacaacagccgtgagaactgaccaacagttgaccgtgaaaaggtccaaatgggggaaggactcctgcagccagctgcggacgccatagaagcccaagaagggcagcgtgaacatgagcacactgtaggccaacagccagaggaagacctccgcactggtgtcctcctgctgcgtatgatgctccacgggagaatcaatgacagccggggaatcatcagtggtagctggcaccacatcgacatgctgttgtttcctgttcttcttgcccatctcagccggctaatactggtaatcggtgtgataacctgccttttcgctggacaccgaaatctctgatggaatttagcagtcgatccttgtaacttcgcaccgtttgcacgggtttgctttcgccgttcagctccttcctgccaaacagcagttcggtgactagaatcttggccaaactgggatcaaaactgggattgtccctgagcagtcctgtctcttcgatggccttttccagtgccacacgattttcgctaaattttttcagaaccgtatgcaaagagcgtgtacgctacaagtgaagtgcgagagggaaaagttatacgcatattggtttgatctgcggacgagaggtccaatccacttacggcatgcttctctgcaaatattagggtcttgatgcacttctgctgctccagtgccgccttcaaaatcttggcagtcgccctgtattgggtgggaacttttatggaatgcggttttttactcattgtcgtcacgtgcacgtgtatgtgttgtttgcgctagaataggtgcaaccccaatcacgactttatcgatatatgcttatcgaatgtcagggctggagataagcatgtggcgtttgaaacaaatcatattgttattcatgttttgaaaatatctacaattaatgtaaaggttgttctaattttgccaacgataactacaaaacatatatgttctatccaatatatttacatacagggtatcaaatttacaaataaattggcagtgtggccatacgttgcgagcaaaaattactgtacttcaagcattgccaacacaagaatattttcatggttaaaaattttggcgcgataaagccgcagtttaaaatgtcaaagtgtgcgcgttcttggaggtttaccaaaatttagaatcatgcttttatttatcgtgcataagttggtaaattggaattaaatcaagttttttccaatttgtttctggtgtgtcgtttgttttggggtctgtacggctgctttaattaaaaaatattaaaatgaagcacgctattctttaaggactttaaggaaacgtacctttctatgtttgcccaggagttgatagacgatatcaaggctgaggatcgcatcctacaatgtccttggtgcgaagaacagacgttgagtccatcagccagcacccggaaacttttgtattggcttttaacgctttcaattcgactttcagaaaagagtctcctcgaaaatcacgactgatatccatgtaaatgaatcggtagatacttgcactttctttttagttattaaaactgacacactgtcactttgcaggttttaaccgctggcggaaatgaagaaggaatccgggaatattcatttcagtccattgtggtgcacagcggaactcccctcaggaacaatcttagcccactaaacatcaataaactactaaaataactttgactgctgcttaatttcaaatatacataaattaatattttttatttttaagttaaattttttaattcttttggag

SEQ ID NO: 40988 - DNA, 1335 bp, DROSOPHILA
cgcaaacaacacatacacgtgcacgtgacgacaatgagtaaaaaaccgcattccataaaagttcccacccaatacagggcgactgccaagattttgaaggcggcactggagcagcagaagtgcatcaagaccctaatatttgcagagaagcatgcccgtacacgctctttgcatacggttctgaaaaaatttagcgaaaatcgtgtggcactggaaaaggccatcgaagagacaggactgctcagggacaatcccagttttgatcccagtttggccaagattctagtcaccgaactgctgtttggcaggaaggagctgaacggcgaaagcaaacccgtgcaaacggtgcgaagttacaaggatcgactgctaaattccatcagagatttcggtgtccagcgaaaagaacccaatcctcgatatgtgcgcatcaacacaaatctatacagcttggcggaggccttggactacctgcataaaagcgactggcggcgcaaggagctgcctgcggacgccagctatgcggattttctgactgccatcaaatcgctggcggagaacgagttcatgaccgatctgcacgttgagggtgtgctcatttttcctgccaagtggtccaactactgggtccgccatccgttggtgcacagcaagaggtttatactgcagaacaaggccacctgtttggccgccgaactacttgctccgccgtctggggccactgtgctggatatgtgcgcagctcccggtatgaagacagtgcacatatgcaatgtgatgcagaacaagggatgcatctactccgtggagcaggaccacgtacgctacaatacgctgtgcgaaataacaaaggatgctggttgcgatattgtaaaacccattttgggagacgccttgaacctaacacccgaacgctttccggacgtagagtacatcctggtggaccctagttgctctggcagcggaatgcaaaaccgcatgaccgtgtgcgacgagccgaaggaggacaagcggctgcaaaagctgcagggtttgcaaattaagatcctgtcgcacgcgatgggcgcctttccgaacgtcaaacgcattgcctactgcacgtgttcgctgtggaaggaggaaaacgagcaggtggtgcagcgttgtcttcagctaaatccatccttcaagctgctcagctgcaagaaggccttgcgcaacaagtggcacaatgtgggcgacaaggactatcccaatattggcaagaacgtcctgtattgccagccggacagtgatcttaccgatggcatcttcctggcccttttcgagaaacgccgcgagggcgaaaaggattag

SEQ ID NO: 40989 - protein, 433 aa, DROSOPHILA
MSKKPHSIKVPTQYRATAKILKAALEQQKCIKTLIFAEKHARTRSLHTVLKKFSENRVALEKAIEETGLLRDNPSFDPSLAKILVTELLFGRKELNGESKPVQTVRSYKDRLLNSIRDFGVQRKEPNPRYVRINTNLYSLAEALDYLHKSDWRRKELPADASYADFLTAIKSLAENEFMTDLHVEGVLIFPAKWSNYWVRHPLVHSKRFILQNKATCLAAELLAPPSGATVLDMCAAPGMKTVHICNVMQNKGCIYSVEQDHVRYNTLCEITKDAGCDIVKPILGDALNLTPERFPDVEYILVDPSCSGSGMQNRMTVCDEPKEDKRLQKLQGLQIKILSHAMGAFPNVKRIAYCTCSLWKEENEQVVQRCLQLNPSFKLLSCKKALRNKWHNVGDKDYPNIGKNVLYCQPDSDLTDGIFLALFEKRREGEKD

SEQ ID NO: 40990 - DNA, 3668 bp, DROSOPHILA
agcactctcgattcagcaagggacgtaaggtggtaattctggccaccggatggaccaacaccgtaaacgaatcctcggccatttcgatgatctctaaggcattcatgtgtcgtggcgatgtgaattttgtggttcgtctcgtgaatcaattctgaaagttcatatctaaggcttccatctcagattgtagatgcggctgactatgtggacaccttctacgcgtggtcggcgctgaacacggatttaattggagagcatattggagttggtctgacccaccttatagagctgaccccacttcgaaatattcacttgattggtgggttcataaaggaatcctttgtgtccataaattctggttctgatttctttgtaggacattcactaggagctcacattatgggcactgctggtcggacttttaagaagcttaccggaaaacttatacccaggataactggcttggatccggccaagccatgtttcaggcgggaaaagattctgccaggattgacgcgtggcgatgccaagctagtggacataatccacaccaacattggtattttggccaagcgtggacccctcggtgatgtggacttctatcccggcggagcacatcccatccagccaggctgcctaaccatcggatgctctcatacccgagccgttgagtatttcgccgagagtgcatatccacaccaagagaagaactttatgggcaagaagtgcgcttcttgggatgagctaagaaaacgggattgttctgctggcatagtttccccgatgggctatcgaatgaatccccaagccaggggcatctactacgtagatgtcaatggctggcccccttacggccgaaactcggagaacactgttgatcctaggcttaaaacgtgctacttgtgccggaggtgaagtccgaaccatggaataatataacttttcttatttacgatgcttaaatatatatgtaccttagttaatttatgttgtacaacgtttagtaatcgatttgcgtaagatctagatcatcattgaaggcctcggatatgtccttttggctctgcatgatacgctcctgggtttccgcgattcgccacaactcatcgtcatcgtcacccatcagcatggaccgatccccatggcccttgatatctggacggattctggccttgggcggagcagaaccattggcgcgcttctgccggttgcccatcgctatctggctctcctcgaagtagttgttggggtgattgatgctcggctcgacgggtgaattgtgggtaagttggaagtacttgccgcatccaatttgatagtgaccgcgggacacaaagaacatcacctcgtcgatggcactggctgacaggccataggaggacagcttggttttcaacgagccctgatccatgttcttatacggacagccgtggcaatcgcccggccccgccacatccttgataatcttggcgcacgagtagggtgtgtagttgaccatggaacccttctttccgtagttatggtaaatattgtactcgtagctgcgtgtaaacttatccgcgtccattttcttggtaaactcttcgcgccagaagcgcagcgaatcctccagtgccacgccaattcctttgagaaacaggccgtattgcattcggccgctatgttttatgtgatggttggcacgaatgtgctcgtggcacatgcgcatacacaacggcatggaggtcttggagagctgatcgagcgactcgatgggcacagctgcatcccgacaaacggtgtaatccctaccggtatacgagttatgtagagctttaagtgtgcgggagatgcgctcgtcggcttctacatcctccaccatagtcttagcagcctgcaggccttgctcgatctcgtcctgctgcttggtgcccactagggacaccaggtcgtgggtgttaacataggcgtagccagcctttaaaaagcagcgacgtccgcgcaccagatcgagcacctgggtgaagggcaccttgtagaagtccaacagctcgatcttcgccacgctctgtccgaccgtgctctcgtacaggccgtccttgacttcgtccttctgggcctcggtgagggggtgaatctcaaagccgttggcctcaaggaactgcttcacctcgaagctgctaagtgcagcgaatttgtaccggaagagctccatttcgcgggccacgaaccagcgcgcaaggtcctcggagcggcagtaggccagccgcaagatgaagtgcgaaagatagtcccgcctgcgggtctggatatccgcctcgtgcttggcgcttccgccggtggagcagagccttaaatagctgcgcaatccctcgcgggtcaggtccgcactcacgatttccttccattcatctgagagcacgcgcaggttccgggtgcttgcgcgatccaggacgcggagaaggcgcaagcgctctagagccagctcctcgaattcgtctatgtgcacgtcctccgtcggcggatagtggtacagcatgacgttgtgcgggtacttggtttccaggctggccacctccaccttcacctcatgtctcgcgcgtttcttcagaccaaactccattgtgagtcgcgggaattgctatagtaatttacaatttgtggaatgcccgtttgttgttttggcgcgcaaactactgatggcaaatatcagctgtgtcagttgttatcgatagttttctgctcattatcgatgcttgcggtttattcaatttgtatttcaaaattaaacgtttttaattgttattatcagtcaattggtactgatgtattgattgtgtgttgcattgttagatatttcttaggccttagctttgtttacatagtgtccagtagtagtaggttatgtttaatatacgacgctattgcctttgttaagatatttcaaaaacatcacataagctcttaaaaacctaaatacctttatttattaatatatgtttaaactatacttatgttcagcagcaaattttgcatattactatgattactgtggggaaactttcgtcttcatgaaagtgtaattaagtagtttatatactatatcaggtacgtgcacaactgactagaactctccggataaaattacatgttttctaaacactgatctctctggagttgatccctatgacctccagggatctcttcagacgtttccaaaacagctttcgatcctccttggccgtcggccactttatatacgttttcacatccatgagatattgcaaagtcttgggtcgctttcgccgtggaatgtcctccagaaaaaccaggatcaagtgctccttgctgacctcaaagatgctacaatatacacacatatattgattttaatatttgaattttacagataaagattccttaccgatgctgtgccaaatacatttcaaattgacaccaatgactcaacaggaacttggaggatatgatcagcataagggaatacgagcgatccatgcaggagatgatgttatctaggatggtcactccaatctgcatgtgaattaagggttaaggtttcactttattagtaagttaatgttgtaagataagtacgcttcacctgaaaatctctttcatgcagacaaatggacacatccccagtttcctccacgttcggcagcagttca

SEQ ID NO: 40991 - DNA, 1668 bp, DROSOPHILA
cgcgccaaaacaacaaacgggcattccacaaattgtaaattactatagcaattcccgcgactcacaatggagtttggtctgaagaaacgcgcgagacatgaggtgaaggtggaggtggccagcctggaaaccaagtacccgcacaacgtcatgctgtaccactatccgccgacggaggacgtgcacatagacgaattcgaggagctggctctagagcgcttgcgccttctccgcgtcctggatcgcgcaagcacccggaacctgcgcgtgctctcagatgaatggaaggaaatcgtgagtgcggacctgacccgcgagggattgcgcagctatttaaggctctgctccaccggcggaagcgccaagcacgaggcggatatccagacccgcaggcgggactatctttcgcacttcatcttgcggctggcctactgccgctccgaggaccttgcgcgctggttcgtggcccgcgaaatggagctcttccggtacaaattcgctgcacttagcagcttcgaggtgaagcagttccttgaggccaacggctttgagattcaccccctcaccgaggcccagaaggacgaagtcaaggacggcctgtacgagagcacggtcggacagagcgtggcgaagatcgagctgttggacttctacaaggtgcccttcacccaggtgctcgatctggtgcgcggacgtcgctgctttttaaaggctggctacgcctatgttaacacccacgacctggtgtccctagtgggcaccaagcagcaggacgagatcgagcaaggcctgcaggctgctaagactatggtggaggatgtagaagccgacgagcgcatctcccgcacacttaaagctctacataactcgtataccggtagggattacaccgtttgtcgggatgcagctgtgcccatcgagtcgctcgatcagctctccaagacctccatgccgttgtgtatgcgcatgtgccacgagcacattcgtgccaaccatcacataaaacatagcggccgaatgcaatacggcctgtttctcaaaggaattggcgtggcactggaggattcgctgcgcttctggcgcgaagagtttaccaagaaaatggacgcggataagtttacacgcagctacgagtacaatatttaccataactacggaaagaagggttccatggtcaactacacaccctactcgtgcgccaagattatcaaggatgtggcggggccgggcgattgccacggctgtccgtataagaacatggatcagggctcgttgaaaaccaagctgtcctcctatggcctgtcagccagtgccatcgacgaggtgatgttctttgtgtcccgcggtcactatcaaattggatgcggcaagtacttccaacttacccacaattcacccgtcgagccgagcatcaatcaccccaacaactacttcgaggagagccagatagcgatgggcaaccggcagaagcgcgccaatggttctgctccgcccaaggccagaatccgtccagatatcaagggccatggggatcggtccatgctgatgggtgacgatgacgatgagttgtggcgaatcgcggaaacccaggagcgtatcatgcagagccaaaaggacatatccgaggccttcaatgatgatctagatcttacgcaaatcgattactaa

SEQ ID NO: 40992 - protein, 533 aa, DROSOPHILA
MEFGLKKRARHEVKVEVASLETKYPHNVMLYHYPPTEDVHIDEFEELALERLRLLRVLDRASTRNLRVLSDEWKEIVSADLTREGLRSYLRLCSTGGSAKHEADIQTRRRDYLSHFILRLAYCRSEDLARWFVAREMELFRYKFAALSSFEVKQFLEANGFEIHPLTEAQKDEVKDGLYESTVGQSVAKIELLDFYKVPFTQVLDLVRGRRCFLKAGYAYVNTHDLVSLVGTKQQDEIEQGLQAAKTMVEDVEADERISRTLKALHNSYTGRDYTVCRDAAVPIESLDQLSKTSMPLCMRMCHEHIRANHHIKHSGRMQYGLFLKGIGVALEDSLRFWREEFTKKMDADKFTRSYEYNIYHNYGKKGSMVNYTPYSCAKIIKDVAGPGDCHGCPYKNMDQGSLKTKLSSYGLSASAIDEVMFFVSRGHYQIGCGKYFQLTHNSPVEPSINHPNNYFEESQIAMGNRQKRANGSAPPKARIRPDIKGHGDRSMLMGDDDDELWRIAETQERIMQSQKDISEAFNDDLDLTQIDY

SEQ ID NO: 40993 - DNA, 7100 bp, DROSOPHILA
gtctgtgatttggtcataagttataggaacatcgacaatcaattgttggcgggtctaggcggttaccacatgtggcagtagctggcccctggcagctgaatactgaaacttaatagtcttcgaaaggaatttggtaagagtactgtatgaagaatattcatatttaatatggaaaacccgattggcctttattagttttcccatttcaattgaattcattgaatttctttttaattcaactcttagcatttcactctgacactttgaccttcttactctcttataaagtttaattactcctaattaaattactccagctattagcaacgtaggtcataaataaatccacccaaaactaaatataactgcagaaataaacccagttaggagcccttaagatatgcaatgaaaacgtttttggcctcgattcgcacagagagacaagcccaaagttgaacaacccagaagaggagcagagtggggaccatgtatatgaccaaatattggcacaaatgagcgtgtctctagtgcattgacgagtccccctttggtatcgatcaaacagaagacgagccaataccggagagattccaggacaagcccccatcgaattggtgagctgccatggcgacaattgcattgctgcgaaggaaatgctaatgggagtgttttggaatcttgctgacagggcacgacgtggcaccaaacccattaccacggcacactaaaccatatatacccatggatgggggatattgggccgaacgagtctataaaagccccgacttgtgtttgccgccgtttcagttcaacttcatcgcgtcgtcgtcctgtcgctcactcttttgcagaagcaaagaaacaattaaagtgcaaccgcaaggcggaaggaagtgcataccacaagtgattcccctgctccattgccgagttgcatgttggattgtgccacaaacttttagccaagttccccccatgcccccatgcccttgtgtgtaaaatgaaagcagacaacttcttcaagtacggcgcccctttgtaccaaccgaaaaataccaaccggagccactcgcactcgcagaaccaaccgcaagcccacaccggcaacatcggccatctgacatcgtcgccgcttctgacgagcgacgacctgcgtcatctcacccagcagcggtccaccggatactcggacagggagagcatcgcgagcgtcagcagtgcgggtggccggattaagaggcgatcgaggtaatactttcggaaggaggagaagggcgcaagtgggagctaaaactttcgagatgtcttgagatgtggtcaaaagttgttttcgttgtagttatttccttaggaactgacagatgcagtttacgtcaacttctccttgcgaataacaaagcagctgcacaacattgtagggttaagtcatcaaagggcaccttagggaataaagcttaaaaaattattttttaattgtaaagattttttttttgtggtcttcgttttacaaaagtcattttattacagccaggtgaaatttagaccataacagattttaagcaatgcaagaacgtagaaatcgatatattttaatcaaagaaacaaaaataatggaaaaaatcatgtctagatatattctcttatgtcttatctcttaagtctgggccgtatatattgttgagtaatctagaagttatattagacttcacttaaggaactacttttaaaatcgtgtgctctttcctattatataatacttcattttataactacaaaaattaaaagttagaaatcttggacttacattcaacccagctttttttaaattccttagtgtatgttaacactgatagatagtttgaatcatcgagttatatgttgctctattaccacttgccatggggtatccaggatttatcaacccttgtggaggtgtttgctcaaccatgacgcatgcactcggccacaggagcagggttaaatttttattttggccaacctgtcgtcctggcaacaactgcaacaccaactccaattgtcaccccgaaaggcagcttcagataggtttttttcgtttcgggcacagttccattttccacttcagttgctgagcaactttgttccgtagtcaaattcagtctaaaaatgtgatcctagatgtgccctccaacttttttttaacttttagaaatttcccgatgaagtcttcgaagggaggcatcaccaagaagtgcaagactatggattacaccaactacgcctataatgaggcagtgggtcgcctcaaggtaatgctggccgacaactcgtacgtggcacccaaactgggaggaggagtgtcttcctatttgcgcaaccttaacgaggattccggggacaacttctctgacaacctatcggttcgttttccaatcaattcagtgcaaggaattcctgtaacactacatatacttctataggtaattgagcgacccgtcttctcggacatttccaagtacttgtcgcccagccagaagtcgcggatcagctcctatcgccccaagaagagctatgcctcgggatatctctcggcttccaaggagaatctagcttccactccttcgctttacccgagcgcctcagttccgtctgctcctcttccctcggacagtgtcccggctcctgtggagattttcagctttatcgaaaagcaagaggactacatcgaacagctggaaaaggaatccaagtactgtcgcaacgagctgaccaatctgttgggtaaagtcaaggatgtgatcaatgaaaatgagcagttgactgagaacgctcgctctgagttggtgggtctcggttcgggaaattcgaagcatccaattgtcactactagtccttcctcggacagtgacgagcacttgatgttcgccagtggacgtaagaccccgtcgaccccaaggaaaggtgcctccaagggacaggtgcaaagtcctcgttatgcaagtgcacccaatatcgtttacgaggccagaatcagcgagctggaagccgaactaatgcaggccagcatcgatctgaggcgtctgcgtaccgagaacgaggagctaaagcggaaactgagtcatacggatcccctaaccactgtggccaccttgtccggggggtccaactgtgaattgcatcgcaagcagctggagagcctgcagcaggataagcaaactctggaggaaagtgttcgacacttgcagaggcttctggacgaggcaaaggctcagggccagggtagcgcctcgtccaagcgatatatcaacgacttgatgcagatggagcgctcccaggccgagctggaggtacgccacctccgggatgaactggatcgccagcacgagcgggtcagggagctgcagcacgagatggctaggcggttggccgaggagcgggccagtgccgaaaggcgctacaacagccaggtggatcaactgggcggagatctgagttgccaatgggagcaggtgtccaagctccagttggatctggagcgtcaaaaacgctacgaaacagatctcaagcgggatgtggccagtcgcaattcgcagatcgaagagctgaaaatggaactaagagccaataggaccaccttcctggcggacatggcgcaggtgaatgcagagaagcaatctctggagcaggacatcacctcgctgcgccttcagttggatcgggctgccagggaggccaaaacggaggcagctcgtcttaatgcagaaataaattcgctgaggcagcgccttgatcgcggggatgctgatctcctgcactccaaacgagaagtactgcggctcaatgatgagatagccaatcttgaaaaggaggtaaatcatagtattcattgtattaatttttaagcctgttgtttgcttataaaattaatgtttattgcacatacagcttgcttatggggagttaaagaacgagatacgacctaccaaaaaggatctggacaaaaggatctctgaattgcaggataagcatggtaagtgggccgagttaacactttagctggattacttctatctttctacaccctcttcacctatcactatcctccctatgaactctggttaagctattgatgctcctattgtgttctgcgtgtgtgtcaaatgatataaagtcaactatattccaaagattcgaactcgaaaccaactacagagaaatattcaatagtttatccatgagtttgttctgtagcgcgttgcattaagtcccatatcaaagtacataaaacatatataactaaaccgttaaatgtctgtttgtagcgggaacggtaaatgagcttgaggaaatgataacatctcagaagcaactcatggataaactgaccaacgagtgtaaaaccttaacgggcaaattagaggacacgacctacaagcacaagtaattatgatcaaataatacctaagcgtatctcacctagcaattctgcaaactcaaatcgatttggcttttagaaatctattttatactatagtgtaagtctaaataataccagttcgattaagtttatatagtcacagttaattattacaaaacgacacccaaaaaggtatgtgggcaattgattgaaagccttttgacatacggaaaccaccgcacatcgcaatatgaaattcgaggccaaaccaaagttttcccaccagtacattccgaacaccaattttcttttccgagattcattcgttccacaccaaagcaaaagcaataaaataaacatctcgacctagcttgagactggattaacacgctgtacttgtacttcttcaaacctttcttttgctgcctacccgccacgcaaatttcatggtaattagaaccaatttgcgatcttgtgatgccaacaacaacaagcgagcccttgaccccaacaacaatatcagctcctacagcatcaaaagaaagcgcaaacgagttcactttgccgcctaatctggaactgaccgattatccaggagatgcggctgttgatgtcgctgctgccacaactgcggatgctgttgccggcgatggcgatgagatcctgcagaatataatcagaagcaatgagcggctggccaaggagttggcaaagatgccgccgcttcccaagatctccagctacaagaagtccagagccagagcagaggcaccaacgccaatagcagcagcatctgcaacagcagcgacaccagcgtcatccaaaatcaaatgcttttgccccagtttcatgcggcacagacacgagcatgagcacatccatacgttgcgcagacgcagcagcggcagcaacaacagcagcgagacgaatgttgcatgttgccgcaacaacagcagggcaacagcagcaacagcaacatcatcagcatcgccaacagcagcaacatcgttcagcaaagctcgtacacaaaccacgcacagcaagagcatgaaatgtcacggccatgagtccaccgtagacacgcaccaccagcacgagcaccaccgcaccacaagcagcagcagcaccaccatcgccgagccgcatcatcatcctggctgctgccatccatgcaaaacggatccgttgccttggctgcaacagcatttagttttgaaccagatcctcagtagtagtagtgccaccgcctgccagcccacgtgtcacgtgcaacacttgacggtggatgctgatagtatggcagccacatcggcagatgccacatcctccactgcctgcagaggtcctggcagcaatgctcttagcgccagcatcaagccaaagttgtactttgagcagctgctgcgtcgtgacggttgccacaagaagccgcgtccgcccgtcaaagtggacgtcaatgtgcgcctggtgcccaaacagcccatgccgaaggtcactcggtccctgaacgagacgttcgtcaaggaggtggacgaggtggcacaggcgatgaacgaaacctttgtcaaggagacgtcgccggagctggctcggatcgatgagcagctggcagagctggagagcaatcgagagcgcgaggatcacgaggatcacgaggaggtggacgaggagacggaggagcaggagcaggccaccaagctttgataacgttattctaagccacaagaatagtattaagttttaggtatatgcatagggataatccatttgattatatcaatttataagaatattttcatttcctaatgaaactatttataatttaaagcatcatttacgtgcaatgaagcgtagtaaatttagattatagcactagttcttattctagcagcaaattgtatttatttttgcgagcttttagtttgccctgatttatgttgacatattttctgtttttgatgaaccacagtctggagaagcagcagctgagagccacaaacgagcagctaatgtcacgccttaggcaaatctggggcaaatacaaggcacaactgccagcgcaccagggatccccggagctgagctccgaggacatgcgggaggagcacccaataaaatccgtgacggtacctaacagtatttaactaatatctttttccctctttctttcttccatctgattctctttctatctttccgtatcttgatctgtttccctacatttaaactttcttgaagagaggaaatatctgctttacaatcgaatctagagtatctgtccaatcgaatgttgagtaatgaggagcatatgagtaaattagatagctcaccacacgattatactagcttagtacccggaaaaggtaaattccccaattcccgtcaataaccaagtagagcacctccatcccatagtccctaattctaaactgatttaaccactccatcagaatcggaagctgaagtcaaggaggcggatctgcccgataaagaccctatttagagcctcgactcacacgacgactccacccacacacctataacacttgattggcgatccactctaatcaaaattcttgtactcacacagccgcttacgactaccaggcagcgacatatggcaccccaatcgaacccatacaaagcaccccacaaccacacaacagcgccagcgacagtgattacacgtccggagggattggct

SEQ ID NO: 40994 - DNA, 3177 bp, DROSOPHILA
atgaaagcagacaacttcttcaagtacggcgcccctttgtaccaaccgaaaaataccaaccggagccactcgcactcgcagaaccaaccgcaagcccacaccggcaacatcggccatctgacatcgtcgccgcttctgacgagcgacgacctgcgtcatctcacccagcagcggtccaccggatactcggacagggagagcatcgcgagcgtcagcagtgcgggtggccggattaagaggcgatcgagaaatttcccgatgaagtcttcgaagggaggcatcaccaagaagtgcaagactatggattacaccaactacgcctataatgaggcagtgggtcgcctcaaggtaatgctggccgacaactcgtacgtggcacccaaactgggaggaggagtgtcttcctatttgcgcaaccttaacgaggattccggggacaacttctctgacaacctatcggtaattgagcgacccgtcttctcggacatttccaagtacttgtcgcccagccagaagtcgcggatcagctcctatcgccccaagaagagctatgcctcgggatatctctcggcttccaaggagaatctagcttccactccttcgctttacccgagcgcctcagttccgtctgctcctcttccctcggacagtgtcccggctcctgtggagattttcagctttatcgaaaagcaagaggactacatcgaacagctggaaaaggaatccaagtactgtcgcaacgagctgaccaatctgttgggtaaagtcaaggatgtgatcaatgaaaatgagcagttgactgagaacgctcgctctgagttggtgggtctcggttcgggaaattcgaagcatccaattgtcactactagtccttcctcggacagtgacgagcacttgatgttcgccagtggacgtaagaccccgtcgaccccaaggaaaggtgcctccaagggacaggtgcaaagtcctcgttatgcaagtgcacccaatatcgtttacgaggccagaatcagcgagctggaagccgaactaatgcaggccagcatcgatctgaggcgtctgcgtaccgagaacgaggagctaaagcggaaactgagtcatacggatcccctaaccactgtggccaccttgtccggggggtccaactgtgaattgcatcgcaagcagctggagagcctgcagcaggataagcaaactctggaggaaagtgttcgacacttgcagaggcttctggacgaggcaaaggctcagggccagggtagcgcctcgtccaagcgatatatcaacgacttgatgcagatggagcgctcccaggccgagctggaggtacgccacctccgggatgaactggatcgccagcacgagcgggtcagggagctgcagcacgagatggctaggcggttggccgaggagcgggccagtgccgaaaggcgctacaacagccaggtggatcaactgggcggagatctgagttgccaatgggagcaggtgtccaagctccagttggatctggagcgtcaaaaacgctacgaaacagatctcaagcgggatgtggccagtcgcaattcgcagatcgaagagctgaaaatggaactaagagccaataggaccaccttcctggcggacatggcgcaggtgaatgcagagaagcaatctctggagcaggacatcacctcgctgcgccttcagttggatcgggctgccagggaggccaaaacggaggcagctcgtcttaatgcagaaataaattcgctgaggcagcgccttgatcgcggggatgctgatctcctgcactccaaacgagaagtactgcggctcaatgatgagatagccaatcttgaaaaggagcttgcttatggggagttaaagaacgagatacgacctaccaaaaaggatctggacaaaaggatctctgaattgcaggataagcatgcgggaacggtaaatgagcttgaggaaatgataacatctcagaagcaactcatggataaactgaccaacgagtcatcaaaagaaagcgcaaacgagttcactttgccgcctaatctggaactgaccgattatccaggagatgcggctgttgatgtcgctgctgccacaactgcggatgctgttgccggcgatggcgatgagatcctgcagaatataatcagaagcaatgagcggctggccaaggagttggcaaagatgccgccgcttcccaagatctccagctacaagaagtccagagccagagcagaggcaccaacgccaatagcagcagcatctgcaacagcagcgacaccagcgtcatccaaaatcaaatgcttttgccccagtttcatgcggcacagacacgagcatgagcacatccatacgttgcgcagacgcagcagcggcagcaacaacagcagcgagacgaatgttgcatgttgccgcaacaacagcagggcaacagcagcaacagcaacatcatcagcatcgccaacagcagcaacatcgttcagcaaagctcgtacacaaaccacgcacagcaagagcatgaaatgtcacggccatgagtccaccgtagacacgcaccaccagcacgagcaccaccgcaccacaagcagcagcagcaccaccatcgccgagccgcatcatcatcctggctgctgccatccatgcaaaacggatccgttgccttggctgcaacagcatttagttttgaaccagatcctcagtagtagtagtgccaccgcctgccagcccacgtgtcacgtgcaacacttgacggtggatgctgatagtatggcagccacatcggcagatgccacatcctccactgcctgcagaggtcctggcagcaatgctcttagcgccagcatcaagccaaagttgtactttgagcagctgctgcgtcgtgacggttgccacaagaagccgcgtccgcccgtcaaagtggacgtcaatgtgcgcctggtgcccaaacagcccatgccgaaggtcactcggtccctgaacgagacgttcgtcaaggaggtggacgaggtggcacaggcgatgaacgaaacctttgtcaaggagacgtcgccggagctggctcggatcgatgagcagctggcagagctggagagcaatcgagagcgcgaggatcacgaggatcacgaggaggtggacgaggagacggaggagcaggagcaggccaccaagctttga

SEQ ID NO: 40995 - protein, 1058 aa, DROSOPHILA
MKADNFFKYGAPLYQPKNTNRSHSHSQNQPQAHTGNIGHLTSSPLLTSDDLRHLTQQRSTGYSDRESIASVSSAGGRIKRRSRNFPMKSSKGGITKKCKTMDYTNYAYNEAVGRLKVMLADNSYVAPKLGGGVSSYLRNLNEDSGDNFSDNLSVIERPVFSDISKYLSPSQKSRISSYRPKKSYASGYLSASKENLASTPSLYPSASVPSAPLPSDSVPAPVEIFSFIEKQEDYIEQLEKESKYCRNELTNLLGKVKDVINENEQLTENARSELVGLGSGNSKHPIVTTSPSSDSDEHLMFASGRKTPSTPRKGASKGQVQSPRYASAPNIVYEARISELEAELMQASIDLRRLRTENEELKRKLSHTDPLTTVATLSGGSNCELHRKQLESLQQDKQTLEESVRHLQRLLDEAKAQGQGSASSKRYINDLMQMERSQAELEVRHLRDELDRQHERVRELQHEMARRLAEERASAERRYNSQVDQLGGDLSCQWEQVSKLQLDLERQKRYETDLKRDVASRNSQIEELKMELRANRTTFLADMAQVNAEKQSLEQDITSLRLQLDRAAREAKTEAARLNAEINSLRQRLDRGDADLLHSKREVLRLNDEIANLEKELAYGELKNEIRPTKKDLDKRISELQDKHAGTVNELEEMITSQKQLMDKLTNESSKESANEFTLPPNLELTDYPGDAAVDVAAATTADAVAGDGDEILQNIIRSNERLAKELAKMPPLPKISSYKKSRARAEAPTPIAAASATAATPASSKIKCFCPSFMRHRHEHEHIHTLRRRSSGSNNSSETNVACCRNNSRATAATATSSASPTAATSFSKARTQTTHSKSMKCHGHESTVDTHHQHEHHRTTSSSSTTIAEPHHHPGCCHPCKTDPLPWLQQHLVLNQILSSSSATACQPTCHVQHLTVDADSMAATSADATSSTACRGPGSNALSASIKPKLYFEQLLRRDGCHKKPRPPVKVDVNVRLVPKQPMPKVTRSLNETFVKEVDEVAQAMNETFVKETSPELARIDEQLAELESNREREDHEDHEEVDEETEEQEQATKL

SEQ ID NO: 40996 - DNA, 9983 bp, DROSOPHILA
atgccgctccatatccttccagttcacgaaggtaagcagcaggaacgcgacaacggcggtgcgtcgagacctcagcattatgaccatcaaggcactgatcacattgcacacctggaagtacttggcgaggtttcgctgcgtcggattgagggctatccgaaggtaacctgccagccaaagcagtcctgtccccgcataaatcctctttccggtcacaatcagcacggagccaacaaattgtccaatcgccatcaggttgatgcacactccagccgcaatccgcccgcatccacagttaatgttcaaaatgctctgctccagtcgccagttttggcagatgtgcatggcatccgccagaaagctggacacgatcagcatcctggccagagttgaaagcagcatctttaccacacgcttgtggtatacttggaatattataggatcaatgctcaccatcctaatcaacttgacaaatttctgtagctctaacaatctaatattcgatagccgaatatttgattaaagatttttgcaagtcggcaatagaaaaataactttcctatttattttaaatgctttgacaacttgaatgtcaaaactagagtggcaagcctttaaaacgagttaataagaacttttaaaattacaagatatctttttaatttaatcactcacagaaaggttaataataaacttaattatttacagaaaatttccgttaaacgttaagatttatatttgtatgtatcgtgtgtacaaacatgtaaattaaaatcgacagttcacactaattttaaacatagaactacttcgaagtaaaataattttgatttgcaaaatgtagcaataaatgtttaattgattggccaatgagtagtaataaccgctataaatataatcattaaagccgctgtaattaaaaagactagacagacatcgataagatacgataaaatacgctatcgatacttatctaacgcattactagttggacggaccgctttgccatcactaaaccaggagaatattgtttcgttgaaaatttgagttataaatcttaaaactttagttattctcagaatttggataacatttacgtaagttataaacaaaccaacaaagattagataaagcattacacattttaagcaattgttgacatgcacgtgatcgctaatcggaaacatcgccggcgtctgtttgaaaactgattagaaatatgcccgattatcaactaatggaaatttatttaatagattatagttttgcaagtagcacaatgcaccgaaagttgtttacatgtgaccttagcgcgcgcacgccccggtgacgtcacgcctcatgtgcctaatccccaagcgatttaacccttttgagtggcattcagaacaacgcataccggactccaattggaatctgattaataagttcgagttagtaatactcttactgagagcagagattagtttgctaattatctagtttcatattttaacttctcttatgtttcatgattaataacgaagaacagttgcatcataaacgcaatacagttttttggcagtttttttttctttaataatagtaaatacacatttagggtcgctgaatgtcagtgatgaactttgaaaactaacgattctgttcttattatattgacgtccccagaattaccatacatatatgtgtggcatctggtgatgagattaaaaggttgctaaaatttctctatgattatttccgttcgaacgcacacaattcaacagatttaaggctcatcgtttttttaactgcgcactacgaaaactttgttgtttgatacagaaatttatggatgtacataaaaagttgtacatatattattatatgtttgtatgtattaattattagaacgcagtccattacaagtttaatttctttttagtaacaatttaattcctgacctctgaatagaattattgctgtttaagaaaattttctgagttatgtaccttaaaagtttagttaatatttgagtgacccaggtgtcaaggctgtgaggtaatcttttaaagcttcgttgtgcattttctttgtcgcaagcaattcgtctgggtatttcgtagtcgattgcgtttgacataaatatgcaattagatagaagttttggatacaattcgcgtgtcacttgagctcatcttctggaattaaaaaaaaaaaaaacaaaagagctatgcaaaatagccttgttttcgtctgacttcagtggaatatacatatgtaaaatcatgggtctaggaggctgatctggccaactggttttggaccggccaaagtgcgagaaccgcgaactgaactaaaaacagattatgagaggccaggtgtattcacggctaaaccattatctcagccgaacggagaacatcgattagattgcccaaaaagtgttcccgacctgcagctggttccaaagtgcgaaggctaaccccaacagctgcgttggctatccccattattaactttcggtaattgtattgttgacatgccctcatggtaattgactccaaaacttcagcgcctatttcggtttcaattacgcacttcaggtatacatatttaggtactagttcgaggtatatagaaagtatttgtcatttcgccgatgtttacgatttcatgaagattagggcgcccgctggggctacgtgcatgccggtaatctggggaactcgggagaagtagccagcaaatgcacacgacggcggagaaaagctctgacgttgtcccgccgatttgcttaatcgatttgttttcgttttggcaaccgtgcgaacgtttggtcagttccaatcgagttcatctggtgtgcggacgtgtgctttcgccactcctacactcaaaaatatattgcaatcacattgaaagaccgatcgcagagtcctcagtactcggactacccaaccgactgtggaaaagtgataaagtgcgagtttttgggaagctgaagtaaaacaggttcgttttccacctggccacttgttgagtcattgcaataggatttgtatattgtacacatatatacatagttcccagtgtttacgtaaaaccccaaatagaaaatcgagaaaagccagctagagatttggttcgtttagctttgaatctttcaatccgacttccatcaacttttgtgattttcatttcgagggcctctgggcaaacgatcttggttcaagtttttatgtagcgctcactcttcgcttttcaaggttttagttggaaggttagatttggttatatttcaagttgtttcgttgctcaaaaacgcatagaaacaaacatacactactatctagctatccttcaaagaacttattgaattcgattaaggtgcggaaaatgtagggcattgtaccagaatatgcgatatattgatatgcccaactcatttggatgttcaagttttgtactttaatgcccaattaacatccaatcacatttgcaagggcaatcgaagttctgtacccgacgcattcactgcttccgtgctctatttgatttatcatatgaattaattacttctttcgtgcattttaactaagctgggcgttccctctttttttacggtgaataaactttgactgcaattatgcatggatacgcttaaattgcaaattaagtgcttcgaatttgcgagaaatcatttgtcactcttgttgagctacagtttgttcaagcggcgaactagtttggcagttaaagtctatttgtcaaattagataaagtgcaaatactcagttgtcagatacaacatcctaaacaaatcgggcgacacgaactgtactttaaaaaataattgccagaattggtggcatgcttaattgttaggaacatttctagcaatgcattgtgcaaaaaaatcatatatttcgtaagcggcatagttaatttccttgtattaccgtactaggtcgaagaaaatacaagtattaccgtttttatttcacttgcaaatttatgacataatattacttgattatctacaacgttaaaaacttattattattacaaaatgaagtttaaagacagaagaactcttttatttacattccgaattttgaatatagcagttctattagttttgtttaaattacagatcattcagttcatctgaactttaagaacgcgctccagttttctcagcgtgtaatatcttagtgaagcatcacgctcttgcaacgtgataacgggccacaacaataacaaaattaaaactactctcgttccatcttgctcttagcgcttactatcgctctcgttcgctcttgtgtaagctcccacgatgtccattcccttcgcgcaagaaattggcaaaagcagcggcaaatttcaagttcaatgcgtgcctctgataaatggtcaatgtttgctgactttgtattcgaatgtttgctgtcttttggtggcctctggtcggtttttaccggttttcgttctcgtggctcaacagcattcggctgttttgttgacatgctggcggcattagctttttctctctccctctctcactgtctctggccctttcttctttcgccatgttaaaagcttttgcgggtgatctgctgttcttgcattacacatacatgggtgcaattgcgaaattcttcttcttgccacctaatctgttaaaaatcagaggcatatgtaagactattttaaagaagggctcctgaggcacaaatactacatacaacaaatatgtataaaatgaaattagtattttttatgggttttccttaacgtaaactagtattcttaatatatatgtactaacgaaacaaaataaaaagtatttaaaaagtgatgttgatcaatgagttgtatggagtaccttataagaacccccgttgctgacgcctctggccgacattcttctaatcacctttctcgtgttcatttcgcgtaatcgtatgatttgtaagctcttgtttgaccgtaggttcacgtgttaaactggctaatggccccatcctggtttcgaagtgcacaactgtccagttttgtaataaccgctcgtctgataaaatcgcaattatcaggtgattcacatgcgattggataaagattcggtcagatacttaaaaacatatcaaacacatatcggcaagacacgtcgggttgttaagggcgactcttattagatatggccaaagtccccccgtatagagtctagacatatcaaatctaaccctgacctcagcaatgggcaaataaaaccgcccatttggccaacatctaccacatctaatctgctaatgagaatacacgcacataccacacatatgtatgtataggcgcgcgcacgcacacacctgcaaaagctttaactaatctaaagctcacgagcgagcttttcgtgaaatgctgcaggttcttcgtcgtcggcaatttttgcacatcagttttaaaacccaagttaaccgaaacggcttgttaatttctagctgcggcgtataaaacacctttttttttggtgtaatccaggtaaaacaataaacagtggtctcaaatgaaattccatcgaacttgcggctgttcacttttgctgaacagtttgcaattcttgttaatttaacactttctatggcgtgggagtgtgtgtgtgtgtgtataaaaaagcatgctaaagttgattgaagaaggaattttccacgaaacgtgtcacagcgttcctggcttcattcgtaaccttgagccaaggtttccatctgctccggttcccagtgacccacaaaacacatgttccacattaggaaatccacctggtgcttgttcccacaccggctttttacattatgcatgccatgcgaatcctgacacaaggacgcgcaagcagcgtttattgattttttcatccattagccattagccgattaaagcaacagaaatccgtattaggcaagaatatgcatatgtacacaatatcaaagggtactccactcaactcaactcagctcgactggacacctcggggtctggccataaagagccgctcggagtcacctagccaaagcgtgtcaagttcagtcattctgctcacctggctaattgcccaagtcaccaccaagttggcacacacactaattgctcttttgtttatgtcgttactaatttgttggttttatcttttttactcgcacaccagttgatgcaacatgccgcccaacgcccaagccggtgcccagtccatctcagactcactgatcgcagcagctagtgccgccgccgacgcgggtcagagccccaccaagctgcaggaggactccaccggagtgctcttcgagtgcgatgtggaaaccaccgacggtggtcttgtcaaggacatcaccgtgatgaagaaggccgagaagcgccgcctgaagctcgtctggcgcaacatcatcgccttcggttacctccatctggctgccctctacggagcctacctcatggtcacctctgccaagtggcagacgtgcatcttaggtgagtcaataattcattataatagaagtatataaggttaaatatatagtttggtgtccaaagatctgtaaactgctaccaaatagaatggtcataatgtcagatctgcttggtctatccaaaatgcactttggtttatgtaacgaaatatttctattacttaatggcaagaggtcaaggtcatgtcaattaagaaaattgctcaattgctagaatcacacacttcaaagtaaagttttaatgacaatgtctttcttgaaatatgcataaaacgcttttcgcactgatactgcgatactaagatgatatctcaataatcagcgttctgatgaaaatataagtaaaacgtaaaaaagcaaatattatggaaattttatacttttggtaaggcaccgacaaccatgacaacgtaaaacgtaaaaaagcaaatattatggaaattttatacttttggtaaggcaccgacaaccatgacaaccattgccatcttcctgtcgcgtgccgaactctcgaacatataggggttatctaaggcttgcgccctgataaccttcacaaagttgttattgtggaagtccagactaaacatggcacagacggctgatcgtactttccatatacgcgattaccttaatggtgcaggtgcttatttttgtcggaaatcaaattaccttatattaaaacgatcacctttgcgatcaaacttagtaagcattatcaaaatgtgtgtcaagtcaccaaggatctatgttaattaatttaaagtattaagtaaggctactagtaatggatactttaaacttaattaagctatactctttggacaacgtaagctaaccaactgatttcttattttcagcttattttctatacgtcatttctggcctaggcattaccgccggtgcccatcgtctgtgggcgcatcgctcctacaaggccaagtggcccctgcgagtgattctggtcatcttcaacacgattgccttccaggatgccgcctaccattgggctcgcgaccatcgcgtccaccacaaatactcggagactgacgccgatccccacaacgccacgcgtggtttcttcttctcgcacgtcggctggctgctgtgcaagaagcacccggaggtgaaagccaagggcaagggagtcgatctatccgatctgcgcgccgatccaatcctcatgttccagaagaagtatataaaatcatttcgtttcagtcgctgcaaattctaatatgtttattctattgtccagatactacatgattttgatgccgattgcttgcttcatcatcccgaccgtggtgcccatgtacgcctggggtgaatccttcatgaacgcctggtttgtggccaccatgttccgctggtgtttcattctgaacgtaacctggctggtgaacagtgctgcccacaagttcggtggccgtccctacgacaagtaagtgcttagagtttgaacaacttatggatgtgtacttacagaggtttgttctttttagatttatcaatccttcggagaacatctccgtggctatcttggcctttggagagggatggcataactaccatcacgtcttcccctgggactacaagacggccgagtttggcaaatactcgctaaacttcactaccgccttcatcgatttcttcgccaagatcggctgggcctacgacctcaagacggtgtccacggatatcataaagaagcgtgtgaagcgtaccggtgacggcactcacgccacgtggggatggggcgatgtggaccagcccaaggaggagattgaggatgctgtcattacacacaaaaaaagcgaataggcaggttgagcgtagggccaatcatgggagggtttagcagaaaatcaatcaaattcaagtaaagcaaagaaacataaatttccattttgcaaatgtccgcggaacatatttcctaacagagcagaagcccatttaattaattctaagataaagcgttgatgataactgtttgttgtatctcgaaaaactttataccgtctgtgttaaaccagctccggaaatgtttttatttcgctctctttttatggggagacgcaaaactaactttgtatttatacacgcatataattgcttaatacctggatatttatgtacaatagatggcaattggagattttcattcactgttatctcgaaatcacttttgtaatttgagagaaattttcagttaaaaatctaaaagaaaaaatgatacaaatggaggaaaactttccgcttcaaagaaaaagaaatacctgcaaatgaaagattttagtatttagcgtaagccaaaaacaacaagaattatcaaggaactaatatatataaactatataataaacgatcgatgttagaacactaaaagacactttcacctatacatatgatatttctttaaatgttattaaataaaatgggaaaacgcctctgggaaacaaaacatcccagtagacttttccataaactgaaaatgtcaatgctcgccccaacactttcctttcagttgattcccaaaccccaaaagtgaaacacgcacacactcggagaacttttgaaacacacataccaaaacaaaattatcgtattggtcttccaatggacgaatttagagtacccaaaaaggttaaccgtaacgttttcaaggccattagcattcttcaatcttcccgaaccgattttgtctgcgctaatgcaatcgtcgaccaggtaaagttccaaatgcggaaccgcattccggtcgagcatatagatgaggccataaaacagtcgctggccaacttgaccatgctgggcatagtgcggcgtctgggatcgtctaagtattcgcttagcaccatagtgtatggccggttgggaatgcccaatcccattgcacatccgccgggcaatcctggtagaccacatcggcgagctgcgcagaatgcggtatgaatgcaatccaaagggatgttcttaataaataaaaagctaaccataatgttcaacttgcagcgtcaaaagcgacctgtcgggcgcttggatccttggaaatcggtcagcaagatcttgagtgaggactctctgtctggaactgagatgaccaagatgcgcaagcggatgcgcaccaacacaaagcgcgttgtcaagaagaaacgaatccccaaccgtcgactatctcgagccaggaagtataaagaaacagaaatggccaccaccagtatcgacctaagatgttcagaaagtcgtttgggactagacaataacgtgcaaatactattcggatcaccgggatggacctataccaaacccattcaaagtactttggtgttgcccgatgcaccattaagattggatcaaaaagcgaatgatcctgagaccccgaaaacaacagttctttccgggaatagcagcagcacttctgtgacagacgtaaaagggaatgtggtgaaggatgaggagggaggatctcaaccttca

SEQ ID NO: 40997 - DNA, 1915 bp, DROSOPHILA
ctttgccatcactaaaccaggagaatattgtttcgttgaaaatttgagttataaatcttaaaactttagttattctcagaatttggataacatttacttgatgcaacatgccgcccaacgcccaagccggtgcccagtccatctcagactcactgatcgcagcagctagtgccgccgccgacgcgggtcagagccccaccaagctgcaggaggactccaccggagtgctcttcgagtgcgatgtggaaaccaccgacggtggtcttgtcaaggacatcaccgtgatgaagaaggccgagaagcgccgcctgaagctcgtctggcgcaacatcatcgccttcggttacctccatctggctgccctctacggagcctacctcatggtcacctctgccaagtggcagacgtgcatcttagcttattttctatacgtcatttctggcctaggcattaccgccggtgcccatcgtctgtgggcgcatcgctcctacaaggccaagtggcccctgcgagtgattctggtcatcttcaacacgattgccttccaggatgccgcctaccattgggctcgcgaccatcgcgtccaccacaaatactcggagactgacgccgatccccacaacgccacgcgtggtttcttcttctcgcacgtcggctggctgctgtgcaagaagcacccggaggtgaaagccaagggcaagggagtcgatctatccgatctgcgcgccgatccaatcctcatgttccagaagaaatactacatgattttgatgccgattgcttgcttcatcatcccgaccgtggtgcccatgtacgcctggggtgaatccttcatgaacgcctggtttgtggccaccatgttccgctggtgtttcattctgaacgtaacctggctggtgaacagtgctgcccacaagttcggtggccgtccctacgacaaatttatcaatccttcggagaacatctccgtggctatcttggcctttggagagggatggcataactaccatcacgtcttcccctgggactacaagacggccgagtttggcaaatactcgctaaacttcactaccgccttcatcgatttcttcgccaagatcggctgggcctacgacctcaagacggtgtccacggatatcataaagaagcgtgtgaagcgtaccggtgacggcactcacgccacgtggggatggggcgatgtggaccagcccaaggaggagattgaggatgctgtcattacacacaaaaaaagcgaataggcaggttgagcgtagggccaatcatgggagggtttagcagaaaatcaatcaaattcaagtaaagcaaagaaacataaatttccattttgcaaatgtccgcggaacatatttcctaacagagcagaagcccatttaattaattctaagataaagcgttgatgataactgtttgttgtatctcgaaaaactttataccgtctgtgttaaaccagctccggaaatgtttttatttcgctctctttttatggggagacgcaaaactaactttgtatttatacacgcatataattgcttaatacctggatatttatgtacaatagatggcaattggagattttcattcactgttatctcgaaatcacttttgtaatttgagagaaattttcagttaaaaatctaaaagaaaaaatgatacaaatggaggaaaactttccgcttcaaagaaaaagaaatacctgcaaatgaaagattttagtatttagcgtaagccaaaaacaacaagaattatcaaggaactaatatatataaactatataataaacgatcgatgttagaacactaaaagacactttcacctatacatatgatatttctttaaatgttattaaataaaatgggaaaacgcctctgggaaacaaaacatcccagtagacttt

SEQ ID NO: 40998 - protein, 383 aa, DROSOPHILA; identical to SEQ ID NO: 24150

SEQ ID NO: 40999 - DNA, 3495 bp, DROSOPHILA
ctggcagccgcccttaacgacggagtggagcattcaatccacactgaatccgattcagcaagcgaagcagcacagacatcttctacggcggacgagccaccagaaaaggcgcccacaagcaaacactccactagatagtcgctataaccacatgttcctcccaagggcacccaacgtgcgccagccgattgaagtgcatgtacagtagacctaagatcaataaggcaatgacaatggcaatggcaatgactttggtccttcgcagttcatctcggtatttatcgtaattctttctcggctttagttgtaacttgatgacgcacaaattgtaaatgcatgaaattacgtatgtatggataaagtgcctgctagaaagcaacgaattttggcccgatcaaatggcgaaccacaatttatgtcttaatttttcgccgcgtaacattttaccatatgttactaccacgctatcttcgacagattcggtagtttttagtttcgattctaaagtgatagatgttagctctcagaaaagtattacaaatacttgacaatagaaacgcaattaaaagtctagcgcgcaacaaaatgacgaaagagcaggtatagcatccacctaatgattcttttaagttattatcttaacgtttttatacatgctttaagtggatgttttaaagttttctttttaggatccaattcgtggacaggtcaataaaacttgttctacacaaactgatggtatgatgatacagtttaaaaacaagacggtaatagccttctctctacctttgcctacttatacaattattgttaaggtttgtgttattctaaaaaaattccgtaataaactagacacgagttgttctgataagaacaaatagtacgctttacgggaaatcagcagacatcttgaatgtatatttgtacggcgcatttggtttcttcaaaacaatgaatgtataagatttggcacatttttaatatgggttatccaatgtgattaagtttcacttcgtttgtatacaatattgctgtagtctctccgaattccacagcttgccttaaagtcaaagacacgcatattgtgatcggtggccacgaacatatattggctatcacaggcgaggctgtacactggcgacaagccattatgacttcgcgtccttcccggaaagtacaattgtacgtatttcttcattcttatatcgtaaaggttgacccgtgcatgtctgttggtgccaaccagcaccgcgtgcagaccatcatactccaaggagtagaaggaggagtcgaacggatcatcccaaatggctacatcgcgatccacgcgtctgtcaaacatacgaaacgtgctatcgaagttggccgtgaaaatgacctggtcatctttcaatttcaggtcgtaaattgacattgttttggaactaaacaccaattcctcgccactgataaagaaaaaaattaaagatagttaataacagaaataatgatagtaaaatgtaaatcaaatatttctactttgattaatgtttaaggattaactaaaacattcctacacataagatttatatttaactaatagtcggtagggcttacctttcaacatggactgccctcaaggcctggcgaccgttgtcagtgtatagtccaccatacagccactggccatccgaactgagttccagagacctaaaggcgtgcggcagatgcatcacctgatcaaaatgcgtcattccaaactcctgcgcacgctgccacagtctgcagcagtgatctgtgctggttgcgtacagatccttgacaaagtctacgcagtacaagtattcgttggccggatgcatcctctgctccgtcatcaccatgctatcggtgtcgtagtggaagcacgatccacaaacccttcccgcgaatatggtttcattctttttgacgaaatcggagatgtcggtctgtgcggacgtacagatctcctcgtcgaagcgacgatgcagtgcatcgcagctggaccgccggtacttgcgcagatagcaggcatgtgtgatgtacagaaagtcggcctccaggcacagtttggtggggaacatctgggcatggtggaagtatggtcgttcgaaataggtgccactaacccagttccttgacagctcgatgcgttcatagtttttcaggcgtcttcggtttctaggaggtagatagattatcttaagtttattatccgaatctcattcaccaacctctgttcgatccttggattattccggtggccacagagcagcaaatcgtaggccagtgggtagaagtagtaggcttcaataatatactccagagccgggtccgcccggcacaggcacagtaggtccccctccgagcaatagtcgaatatgaggagcaggcattcgatggtcagatccttcaagctcatgcgggagctcatcatatctttcaacgccaattcgtgagattagctcatattcccacgatttccgaacaaaacgcaaacaaatggtatatcgattatttcactctagcgttacctttgcaacactacgaaatttccgttaagtttgactgcagtcaatgattaaattcaaacgtgtgttctttcatagtgttattatattaatgatttgaacatcaactgtatattctttcgtgctattttttcaatatatagatctcagacaatttgattatttcgaataatcgatatgtttttcatttatatttcctcagctaataaacagtgcattgttcacttatgtgtcattgttgaaaatttgacgtaaccagcacagaaattgtgaaatttaaagaacaatgaaacacttgttaatttcatcgacctttgaaaacattttttttaaacatttttcatgttgatgaccatattttttaaaaatttaaacaacaggcaattagtgtatacagatttaaattaactattactacggaaaaatgtgcttaaaagagcaagttaattattaccacccctttagccaataaagcttttaaaatgttactatctaagctttggtctttcaatggttaacaatatccaccagctgtgtcaaggcaatataagaaaatacaattcatgaaatatggttaataaattttataaattttgcttgtgtagaaggttaagcatcaaggctagacttcggggaaccattgcgataaatgacatcgttggacattgagtttttatcattcgataagaaatttagggttgattttagaaagattcccccattgatgtaagccgcctgcaatgccaaacacgaaatagtcagcaactgcacattttggggacaaaagtctaagatatgtatacgatttacgcacataaatatgcggcgtgcgtacgaccacgtactcatacaattgcagcaatctaaagttatttagaacactgtttccgcaattaggcacgaaactgccgagatttttgcgctaaataccttaactgagcatttgattgacttgaaatagcgc

SEQ ID NO: 41000 - DNA, 1291 bp, DROSOPHILA
cgttttgttcggaaatcgtgggaatatgagctaatctcacgaattggcgttgaaagatatgatgagctcccgcatgagcttgaaggatctgaccatcgaatgcctgctcctcatattcgactattgctcggagggggacctactgtgcctgtgccgggcggacccggctctggagtatattattgaagcctactacttctacccactggcctacgatttgctgctctgtggccaccggaataatccaaggatcgaacagagaaaccgaagacgcctgaaaaactatgaacgcatcgagctgtcaaggaactgggttagtggcacctatttcgaacgaccatacttccaccatgcccagatgttccccaccaaactgtgcctggaggccgactttctgtacatcacacatgcctgctatctgcgcaagtaccggcggtccagctgcgatgcactgcatcgtcgcttcgacgaggagatctgtacgtccgcacagaccgacatctccgatttcgtcaaaaagaatgaaaccatattcgcgggaagggtttgtggatcgtgcttccactacgacaccgatagcatggtgatgacggagcagaggatgcatccggccaacgaatacttgtactgcgtagactttgtcaaggatctgtacgcaaccagcacagatcactgctgcagactgtggcagcgtgcgcaggagtttggaatgacgcattttgatcaggtgatgcatctgccgcacgcctttaggtctctggaactcagttcggatggccagtggctgtatggtggactatacactgacaacggtcgccaggccttgagggcagtccatgttgaaagtggcgaggaattggtgtttagttccaaaacaatgtcaatttacgacctgaaattgaaagatgaccaggtcattttcacggccaacttcgatagcacgtttcgtatgtttgacagacgcgtggatcgcgatgtagccatttgggatgatccgttcgactcctccttctactccttggagtatgatggtctgcacgcggtgctggttggcaccaacagacatgcacgggtcaacctttacgatataagaatgaagaaatacgtacaattgtactttccgggaaggacgcgaagtcataatggcttgtcgccagtgtacagcctcgcctgtgatagccaatatatgttcgtggccaccgatcacaatatgcgtgtctttgactttaaggcaagctgtggaattcggagagactacagcaatattgtatacaaacgaagtgaaacttaa

SEQ ID NO: 41001 - protein, 310 aa, DROSOPHILA
MFPTKLCLEADFLYITHACYLRKYRRSSCDALHRRFDEEICTSAQTDISDFVKKNETIFAGRVCGSCFHYDTDSMVMTEQRMHPANEYLYCVDFVKDLYATSTDHCCRLWQRAQEFGMTHFDQVMHLPHAFRSLELSSDGQWLYGGLYTDNGRQALRAVHVESGEELVFSSKTMSIYDLKLKDDQVIFTANFDSTFRMFDRRVDRDVAIWDDPFDSSFYSLEYDGLHAVLVGTNRHARVNLYDIRMKKYVQLYFPGRTRSHNGLSPVYSLACDSQYMFVATDHNMRVFDFKASCGIRRDYSNIVYKRSET

SEQ ID NO: 41002 - DNA, 3824 bp, DROSOPHILA
aagtagtcaatatatacaagatgggcaaagaaaaacagagctccactaaattcgtgttctaatctgaaacataaccgtgaaataatgtgaaattatggttcttcccgctgttatgcttcattgtcatattctctcctccaccgcataaggatctctcaatgtcaacatggttccctttagtccctacaccgacaatgtgaattcgatcaagaggagctactaggatgccatccagagatggtcacagtgcgtcagatcaacgaggactttagtcacagcacccgaggtctcataaagaactctgtgcagcaagatgatttgaccggatccaaaacgtttctgctccccaccttctacttcagtggtcagagtagacttcaatgagaagggggcagttttgctcagttagctagtttcgccagtaccaactatgtaaactattgaacgcaacacttgtcgatggtcgtgatattgctcaaatctgcaattgcattaaacagcgtcaccaatcacttgaaaaccattggattggaatattggttgtcctattccaaagaacatctggggctcacgaagacttgagtctgtattcccaagcttgaaccaactactgacctttcgctaaaaggaatcctaagctagcttagtttctcatgattttcattttaataggcaattgtgatccactataaaatatatatgtacatatatgggcgtccgatatttgttcaataaaaaagggcaaactggaccgaatggcaccggaaatgtactcctgcaaacaaactaccaaataattgccgatgaagagggaaccactgtcgcagctgtgacaatgtctttgatgagcagcagaatggcgagttttcccttcctgtacttgattttggagatggaatccggcctggtgcttttcgccagtcaaggtcggaatcccaaggcggattagcggattatttacatactaaaaagaaaacgattaggcaatgccaaatgatgtttatttcttggtacgtccggcggcctttttgccacccacgggctgttgtttatctttgctggccttgctagaaatgagcggatgcgtttctgtaataagcagttaaagatagttaacttgccagtttaaacttttatggaggcaactttataccataccatcagtgggtgcatcaggtaagctgacatcatagagctgcatgcgtcgtcgcttggaagccattatgtcgtcctcatagtcatgcggttccatgtggccaagcataactgcactgggctccagtccgtcctgaccggtccagccatcctcgggatcctccacctctggtgccattggcaaaaactgcagcgcattctcgtcctcgccctcttcgtcggaggagcaaaaggcagccaccggctccactttctgcacgtctacctcaatttcctcgtcctgttgcgcgtctgcattcagatccacagacttgtcttcgtccgcaatgtcgaactctgactcccgctcttcgtactctacgttttcgtctaattccttgaaatctggtgcaaaggcagaccagttttccacttgattttgggcccaaatggataccagtccggagctaatgctggcaataataggccgcacaggatgccacaccacgtccaagagcagctcacccttggtgccatgcaggatcttcaccaggtttccaatagacttttcccatatgtaaagagcatgctggcgagcactgccagcgcaaatgtactccccatcaccggagaagcagcactttttccaggtggttctagatggaattgatattggtcaatcaaatggttatcaagggtttgtttcataacatacttattgaccaagtcctgtagcttttgtataggttccggttcgccgtctttgcctagagtgattatttcttttgagtcgtaaacacgaataactcgatctgaggtgttgattagaaatgcgctgaaagataaatttgttacgttatgaaatcccgattacttattagtacccactctccacgcctcgcaaactcgatgctttttacagccgttgcacttgaggtgcctacaataatgcgaaaactggcgaccacctcaaaggtttcaacatccagtacgagtatttttcccttggcgttgcctgtgtagatgtgtttgcctctgcgatcgaaagaagccacgatgttcaagtcgccctggtgagaaacaaggatttcaattaacaatcaagctgcgaaaaagcaatgtgcaaactcacatcggaatccaagggcaggcagcggtgagttccgccgacctctacaagaacggcggcatatcgcatggggcacaccaaaagtcggttgtcatttcggggatcgaactgtactttcagcacaggcgatggaaacctatacttgtgttccagttcgccggttagcacatcccaaatgcacacattgttgtccgtggaagctgaaagtaactggagtggattggaaaatgtagatgatcaggtgtacggcgagcgagggcctaccttgtgaccattcctggtccaactgagactgcaaacgggatgcacatgggccgaaataatcttggcaatgcccctcgtcagaaaatcccagattacaatgcggccatcattgcatcccacggccaaaagggttccgtatttgttaaaggcacacgtcacggccaacgaaatgcaatccagcgagccgtcgaactcctctgggtagttttgtccgaaagattcttaataaagctggagttatttactacataagcataaaaaatgggcggcaatctcacctagtagctccaaattcatttttgtttactatcttcttcttttaaaatggcaactgacactcacaccgaacggcaataacatattatgttataaatgataagcataacagaagacgagtttttcgatagttaaggttatattctgtacaactactgaacatcaattattatattataatacgaatttaaaaatctacgtatctacgttggtgttttttgtggttttattaatagaataagtttagttaattttagaggtgaaattaaatattgaaatagttaaacatataaaatagataaatttggtgaagcgtaagtaaattttaaactgcattagttatatcttaattcaagttccccactaatttatgagcgttagatgcgatagtgttatgtctggcgcaagcgattgtctcgacgtttcttcgatattttaagatatcgataatgtcatcggagatttgccacccctattttttgagctctgtgcacgttgtatgagaaaaatttatgcagatgtattcgccaattgtaaccaagtccggattgtgaaattgcacgcagacagcgagcatcataataagcgctctaattggagaaggcagaagtttcgaattaagccatttcggagacgtttcgtccgtggcacgcgattgtgtcaacgtcacctttggagcactcgccctctctcgctcgctcccgctttcgttgccaattttttgcttgccctctctcggtcactcccttcgaaagcttaacggttagagtgtaataatgaaataacccagtttcgaatttcgttcacaacaaaagtgcgggcctttcatgccaaaataacatttggtttcgaattgtttttcaaattcgaatcgaggttttccagctttccagtttgacagcgagagaacgagagagagcgagggcgaattacggtgttcgcgctctgcttgtgctttccactccactccccttcttaacttcccccctcccagcctatttactctgtgtgcatgtgtaaa

SEQ ID NO: 41003 - DNA, 1470 bp, DROSOPHILA
atgaatttggagctactagaatctttcggacaaaactacccagaggagttcgacggctcgctggattgcatttcgttggccgtgacgtgtgcctttaacaaatacggaacccttttggccgtgggatgcaatgatggccgcattgtaatctgggattttctgacgaggggcattgccaagattatttcggcccatgtgcatcccgtttgcagtctcagttggaccaggaatggtcacaagttactttcagcttccacggacaacaatgtgtgcatttgggatgtgctaaccggcgaactggaacacaagtataggtttccatcgcctgtgctgaaagtacagttcgatccccgaaatgacaaccgacttttggtgtgccccatgcgatatgccgccgttcttgtagaggtcggcggaactcaccgctgcctgcccttggattccgatggcgacttgaacatcgtggcttctttcgatcgcagaggcaaacacatctacacaggcaacgccaagggaaaaatactcgtactggatgttgaaacctttgaggtggtcgccagttttcgcattattgtaggcacctcaagtgcaacggctgtaaaaagcatcgagtttgcgaggcgtggagacgcatttctaatcaacacctcagatcgagttattcgtgtttacgactcaaaagaaataatcactctaggcaaagacggcgaaccggaacctatacaaaagctacaggacttggtcaataaaaccacctggaaaaagtgctgcttctccggtgatggggagtacatttgcgctggcagtgctcgccagcatgctctttacatatgggaaaagtctattggaaacctggtgaagatcctgcatggcaccaagggtgagctgctcttggacgtggtgtggcatcctgtgcggcctattattgccagcattagctccggactggtatccatttgggcccaaaatcaagtggaaaactggtctgcctttgcaccagatttcaaggaattagacgaaaacgtagagtacgaagagcgggagtcagagttcgacattgcggacgaagacaagtctgtggatctgaatgcagacgcgcaacaggacgaggaaattgaggtagacgtgcagaaagtggagccggtggctgccttttgctcctccgacgaagagggcgaggacgagaatgcgctgcagtttttgccaatggcaccagaggtggaggatcccgaggatggctggaccggtcaggacggactggagcccagtgcagttatgcttggccacatggaaccgcatgactatgaggacgacataatggcttccaagcgacgacgcatgcagctctatgatgtcagcttacctgatgcacccactgatgaaacgcatccgctcatttctagcaaggccagcaaagataaacaacagcccgtgggtggcaaaaaggccgccggacgtaccaagaaataa

SEQ ID NO: 41004 - protein, 489 aa, DROSOPHILA
MNLELLESFGQNYPEEFDGSLDCISLAVTCAFNKYGTLLAVGCNDGRIVIWDFLTRGIAKIISAHVHPVCSLSWTRNGHKLLSASTDNNVCIWDVLTGELEHKYRFPSPVLKVQFDPRNDNRLLVCPMRYAAVLVEVGGTHRCLPLDSDGDLNIVASFDRRGKHIYTGNAKGKILVLDVETFEVVASFRIIVGTSSATAVKSIEFARRGDAFLINTSDRVIRVYDSKEIITLGKDGEPEPIQKLQDLVNKTTWKKCCFSGDGEYICAGSARQHALYIWEKSIGNLVKILHGTKGELLLDVVWHPVRPIIASISSGLVSIWAQNQVENWSAFAPDFKELDENVEYEERESEFDIADEDKSVDLNADAQQDEEIEVDVQKVEPVAAFCSSDEEGEDENALQFLPMAPEVEDPEDGWTGQDGLEPSAVMLGHMEPHDYEDDIMASKRRRMQLYDVSLPDAPTDETHPLISSKASKDKQQPVGGKKAAGRTKK

SEQ ID NO: 41005 - DNA, 6591 bp, DROSOPHILA
tgtgttccagttcgccggttagcacatcccaaatgcacacattgttgtccgtggaagctgaaagtaactggagtggattggaaaatgtagatgatcaggtgtacggcgagcgagggcctaccttgtgaccattcctggtccaactgagactgcaaacgggatgcacatgggccgaaataatcttggcaatgcccctcgtcagaaaatcccagattacaatgcggccatcattgcatcccacggccaaaagggttccgtatttgttaaaggcacacgtcacggccaacgaaatgcaatccagcgagccgtcgaactcctctgggtagttttgtccgaaagattcttaataaagctggagttatttactacataagcataaaaaatgggcggcaatctcacctagtagctccaaattcatttttgtttactatcttcttcttttaaaatggcaactgacactcacaccgaacggcaataacatattatgttataaatgataagcataacagaagacgagtttttcgatagttaaggttatattctgtacaactactgaacatcaattattatattataatacgaatttaaaaatctacgtatctacgttggtgttttttgtggttttattaatagaataagtttagttaattttagaggtgaaattaaatattgaaatagttaaacatataaaatagataaatttggtgaagcgtaagtaaattttaaactgcattagttatatcttaattcaagttccccactaatttatgagcgttagatgcgatagtgttatgtctggcgcaagcgattgtctcgacgtttcttcgatattttaagatatcgataatgtcatcggagatttgccacccctattttttgagctctgtgcacgttgtatgagaaaaatttatgcagatgtattcgccaattgtaaccaagtccggattgtgaaattgcacgcagacagcgagcatcataataagcgctctaattggagaaggcagaagtttcgaattaagccatttcggagacgtttcgtccgtggcacgcgattgtgtcaacgtcacctttggagcactcgccctctctcgctcgctcccgctttcgttgccaattttttgcttgccctctctcggtcactcccttcgaaagcttaacggttagagtgtaataatgaaataacccagtttcgaatttcgttcacaacaaaagtgcgggcctttcatgccaaaataacatttggtttcgaattgtttttcaaattcgaatcgaggttttccagctttccagtttgacagcgagagaacgagagagagcgagggcgaattacggtgttcgcgctctgcttgtgctttccactccactccccttcttaacttcccccctcccagcctatttactctgtgtgcatgtgtaaatgaatactttaaaacgtttttaatcgttgcagtgtattcatcgccagccacgttaaaaggaagaacgtgtatgtgaatacgaccatcagaggatcttagcgaaggattcaggagcccaaattcttaatccccatcccacacacacacatatactcgcacgtaggcacgctctctgtgagaggaagggtaaataaaagaagcaacgagcaaaatgtctggcgaggaaacgtctgccgatcgcaatgtcgagatctggaaaatcaagaagctcatcaagagcctggaaatggcccgcgggtgagtcttatcaatgatatacatgtcctttaacgtcccccccaacgactgttttgcgtacgtgtgtggggtatacacaatgcatggcacgaaaacaacaacactggggtggaagtgggcgtactggacgtgggtgtgggtggggacttgagggagcggcgagtacaaccacctttccttgttgtcgccgtgtgaatctcctttgcattgtttccaatcttggcaagatcccccgcctcactctatctctcttttttgcatacgagcaacacgtttttgtcgagtttttatcagttcaaactagactgattgagagacggagagagagagagagagagaggagtgagtgagtgagtgagtaatcgcctcgtggctgttgtgcgtatgcgtgcatgtgtgtgtgtgtttttcccccaaaatgggccaagctttgtggacccctcgctctcactcatcctgcctcgctcactcccttgacccggtccttaccgcttcacaccgctttagagtgggtaacaaggtcagcaaatcgagtgacccccacaggagcatatctgctatgtatatacatatatatgtatattgttgtcaatatgctccacaattggagctaacattacacctcttccaattggagttggccactgttgccaattgggattcgctttgacagatatcttcctattggttttcagccatatgcgaaatatatacacacatatgtatttgtttttctttttttaagttctgtgctattttttgttgtattttgcattccaacattttgtacaaattacgattggcactcctctgtattataacgaacgagaaaatgatttgcatcagagaaacaaacgtttggaagttacagaaacgtatttgtttcaataaattaatcaaagtttaaatttagtccaataaccgaatgtcaagtttaaaagacatatgccacgaaatttcacggctaattaaataactttaaagtaggttgctattatgtgcatctgacgcgcaaatatacgattgaatagcactgttgctatgggagaaagagccatttccgcgacttatgttctcccttgtttgggtttcttgcagcaatggaaccagcatgatttctttgattattccgccaaaggatcaaatctcgcgcgtcagcaagatgttggccgatgagtttggaacggcgtcgaacatcaagtcgcgtgtaaatcggttgtccgtcctcggtgccattacgtcggtacagcacagactcaaattatacaccaaaggtaagctgagctaagaaattgttcataaacaatcgaacaaacgaactctaaaccgtatcaccaaccgcttcaattcagtgcctcccaacggtttggtcatctactgcggcacaatagtcacagaggagggcaaggagaagaaggtgaacatagactttgagccattcaagcccataaacacgtcgctctacctctgcgacaacaagttccacacggaggccctcactgccctgctcgccgacgacaacaaatttggattcatcgtgatggatggtaacggagcgctattcggtacccttcagggcaacacgcgcgaggtgctccacaagttcaccgtcgatctgccgaagaagcacggtcgtggtggtcagtccgcccttcgtttcgcccgtctgcgtatggagaagcgccacaactacgtgcggaaggtcgccgaggtggccacccagctcttcatcacgaacgacaagcccaacattgccggactcatcctggctggtagtgcggatttcaagactgagcttagtcagtctgatatgttcgatcctgtaagtgggagttaacctatttccatcgatgccatattaagccttacacttgaatcttttttcagcgtttgcaatcaaaagtcatcaagctggtggacgtgtcgtatggtggggaaaacggttttaaccaggccattgaactggcggccgaatcattgcagaacgttaaattcatacaggagaagaaactcattggtcgctactttgatgaaatttctcaggtgagttgccggatacgagttctgaggcatttcgaaattaaaaaccacatccgtatgctttctatatttaaaaggatactggcaaatactgttttggagtggaggacactttgcgggcactggaacttggctctgtagagactctcatttgttgggagaacctggatattcaacgttatgttctcaagaatcatgccaactcgacgtcaacgacagtattacatttgacgcccgagcaggaaaaggacaagtcgcacttcactgacaaggaggtgagagctaaactgagtaatgatactaatccgcacgctaactgggaattcaatcgtatagagcggggtagaaatggagctgattgagtctcagccgctgctggaatggctggcaaacaactacaaaatgttcggcgccacactggagattatcacggataagtcccaggaaggaagtcagttcgtgcgaggtttcggtggaatcggcggtaagtttgagcggccaaacagcacggctggctagttgtagattggttatgtactaaacaaatgctgcaactatatccattcctcttccctcatgctgctttcacacggtcgtcaacgctataatgtaaatgttaatttgcaaactggtacctcaattcgatatgtaggcattttgcgctataaagtagatttccaatccctacaggccgatgagccgctggaggatgtcgatctcgatgactattaagcctgttaagggtgggctgcgaatgggtctcgattatgcgttacatacataataaaccagtactttttgggaaacctcgtaaagcaaaacgttcaaattgattaggaaccaatttacttgccacatagttttacctatgttcagcgtagccgttcaatatttatcaccaatagggtccctctcatcagtcggatggtgcattcccttgtcgatcagatcagcgtgcatctagatatgtacctatacgttttaccaaattttttaattagtcgtgcaccaggcggaatcgcgtacttttaagcagcatattaaattcgtatttcgtactcgtaattcgtaatttgtatttcaatggtcatgtaaaagcgatgcgatagatattagcgcattctccgttcatctggttcgatttcgactgcggtattaggagcaaaagatcttcggttaactgccacatgccactttcgaacgtatctgcatttcccctattcaaattatagccgagtgttataagaaagtatacaaatctaatccataaaattgtaataaaaattaaaccagaataaaaacaccacacaatgaggatggggtatccgtttatattcagtcgcgaagtacaacaaatattttatttagtgtatgaaaagttaaatgtggatacaaaggaggtgagaatctgagtttcggttgaactatcctgtgtgttgatccttttgttttttcctcttcatttatttttcaattttcaatcagcttctgttcttctattttttttttttttttgtttcttattttaatttaattcaattgctgggtgtgcctctgcaggtatcttacgctacaaggtggatttccagagtatgcagctcgatgaattggacaatgatggcttcgatctagatgattactaggaaatgtatctgtagaaatgaatttgccactacgttcgaccgcaaactgaactgcaactacaactatatgaatccaggaaatcaaatagaatatttaaataatatgagaaaacacaaaccttcttccatttttacgttgttggcgaaaaaagtaaaattttaaataatgcatatagatacaaacgataaaatgttaaatcgaggaaaacatattaaaatgcaaccgttttacgtgaacaaatttgcaatttgaatatattttcgagggactagagctcttgttatataattaattgttcctctataaatctaaatctaaatctacattgacaatacgccacgtttcctaaagtttttgggtacaaggagaattgtatctgtgagttttaatcgttctattatagcttgaaaacgaaatttgcaccgaaagctgataaaattccgactctgctatctgctggataagtaaaatgctggtagccacttggagtactaccagtacagcaatgaaagtaaagtgaaatgggcatttcattttctactttctatttgcaggcacactggaaacagtttactgcgagattcccacttcattagttggcaatgcacgtggacgacagcaaaaagcactcgtagtacttgtttcgcccttgatttgcatctaagaatcgctcagatacatctggtgagctgaaactcgtttctgagccgcagtgtcgtgcaggtatccgtactcgtttgaatatttgtaagtaatcattgcagcgagacttccaaaaagtaagctcagctaagttctgcggtgttgggcatccaattagttgaccaagttttctggtggcatgcacatgaaacttgtttaatcgatagggtaaatatgcaaatttcgattgaatttgacgataatgcgtcgagatgaaaagaaaacgaattgtgcaggattttggttacgagataagccgaatcagctaataaggcacgtgcttaattgatatatattgtatgtttaagtaacctaaatatgcacgactttaatatcacttttatttcgctttcgtaataaaacgaggttcactctaaagagcacaagcgtggaggtgtatgtgtgttcttacagccccgatcatttgtatttccatttgagtgcgagcgaagacgagggtttacaacttgatgagaatttgatcaagata

SEQ ID NO: 41006 - DNA, 2217 bp, DROSOPHILA
gcagaagtttcgaattaagccatttcggagacgtttcgtccgtggcacgcgattgtgtcaacgtcacctttggagcactcgccctctctcgctcgctcccgctttcgttgccaattttttgcttgccctctctcggtcactcccttcgaaagcttaacggttagagtgtaataatgaaataacccagtttcgaatttcgttcacaacaaaagtgcgggcctttcatgccaaaataacatttggtttcgaattgtttttcaaattcgaatcgaggttttccagctttccagtttgacagcgagagaacgagagagagcgagggcgaattacggtgttcgcgctctgcttgtgctttccactccactccccttcttaacttcccccctcccagcctatttactctgtgtgcatgtgtaaatgaatactttaaaacgtttttaatcgttgcagtgtattcatcgccagccacgttaaaaggaagaacgtgtatgtgaatacgaccatcagaggatcttagcgaaggattcaggagcccaaattcttaatccccatcccacacacacacatatactcgcacgtaggcacgctctctgtgagaggaagggtaaataaaagaagcaacgagcaaaatgtctggcgaggaaacgtctgccgatcgcaatgtcgagatctggaaaatcaagaagctcatcaagagcctggaaatggcccgcggcaatggaaccagcatgatttctttgattattccgccaaaggatcaaatctcgcgcgtcagcaagatgttggccgatgagtttggaacggcgtcgaacatcaagtcgcgtgtaaatcggttgtccgtcctcggtgccattacgtcggtacagcacagactcaaattatacaccaaagtgcctcccaacggtttggtcatctactgcggcacaatagtcacagaggagggcaaggagaagaaggtgaacatagactttgagccattcaagcccataaacacgtcgctctacctctgcgacaacaagttccacacggaggccctcactgccctgctcgccgacgacaacaaatttggattcatcgtgatggatggtaacggagcgctattcggtacccttcagggcaacacgcgcgaggtgctccacaagttcaccgtcgatctgccgaagaagcacggtcgtggtggtcagtccgcccttcgtttcgcccgtctgcgtatggagaagcgccacaactacgtgcggaaggtcgccgaggtggccacccagctcttcatcacgaacgacaagcccaacattgccggactcatcctggctggtagtgcggatttcaagactgagcttagtcagtctgatatgttcgatcctcgtttgcaatcaaaagtcatcaagctggtggacgtgtcgtatggtggggaaaacggttttaaccaggccattgaactggcggccgaatcattgcagaacgttaaattcatacaggagaagaaactcattggtcgctactttgatgaaatttctcaggatactggcaaatactgttttggagtggaggacactttgcgggcactggaacttggctctgtagagactctcatttgttgggagaacctggatattcaacgttatgttctcaagaatcatgccaactcgacgtcaacgacagtattacatttgacgcccgagcaggaaaaggacaagtcgcacttcactgacaaggagagcggggtagaaatggagctgattgagtctcagccgctgctggaatggctggcaaacaactacaaaatgttcggcgccacactggagattatcacggataagtcccaggaaggaagtcagttcgtgcgaggtttcggtggaatcggcggcattttgcgctataaagtagatttccaatccctacaggccgatgagccgctggaggatgtcgatctcgatgactattgtatcttacgctacaaggtggatttccagagtatgcagctcgatgaattggacaatgatggcttcgatctagatgattactaggaaatgtatctgtagaaatgaatttgccactacgttcgaccgcaaactgaactgcaactacaactatatgaatccaggaaatcaaatagaatatttaaataatatgagaaaacacaaaccttcttccatttttacgttgttggcgaaaaaagtaaaattttaaataatgcatatagatacaaacgataaaatg

SEQ ID NO: 41007 - protein, 464 aa, DROSOPHILA; identical to SEQ ID NO: 24549

SEQ ID NO: 41008 - DNA, 3408 bp, DROSOPHILA
atgggcaatggtaggtagggaacctactcgacgtagctgtgcttctgcagactggcaaagtagaacccgaaggtgccccacacatcggtggctatgaacttgacgcccaggtcccggcaaatggtgtcaatgcgcaacagttcctcgttggtcgcgccattgaccaccacaacgtcgaactgaccgaagaactcagaggtcttctccttcaagggctcgcggtcggcggagatgtccaccatgggattgagagcacgtgcccgtgtcaatgatgcttcggcccggttggtgttcagcgattcacgggggacaaggaattgtgaacaaaagtcctcctcggttacgtccttgtcatccagcagcttcacggagttcactccggacaggatgatgttcttggttatctcggcgcccaggccgcacagtccagcgatgagaatcttggccgtgcgaaggcttaaatcgaaaatatattttagcgcattatagcgccattgcggaatgccggtttttttgcactcaccgtttctgagattccagaccccagagtcggatttgtctgtcgtacagctcgttctccgcctcagtgagctccacggctgtctcgctggtgtccatatccacgaccattatttatttatcaagtttaaaatgtatttttcacaacttaatacaaatttcttgcaacaactttcagtgagacgccgcaacaagaaactaacgccttttgaaaatgccaaaacgccttttgcagaatcagtgctgccaactgtttttgtacgtacagaataaaactaaataaagcacttaaaatctagcacttataattataatatttataattttctatactgtactatactatactatatactattctatagtttttataacatcctaacaacaaattgaggtgaatttattttgtaacttaccgccaagcaaaccaagctttaaaatagccaagtttagcgggaaaaagctaacacaataggattgccacaaaacggtggcagctctgtaagacaattactatcgaattgtttttacgaaatctgaccaatatttaattttccggtaagtctttaagcttgttgctctccattgtgaagaataattgattgccattttggcttagatcatgcttcgcaaatttggaggtctgttggcccagcaggtgggtcagcaagcacgtttcaccgccgcgagtcgcacattttcctcgacaaaagcgctgcacaaaggtatgtaagtcggcgaaaaagccggtgacataatttggacttatactgttgtaaccgttcaatcgctacagatccagcgacccaggaagcagaggcggcgccaccgaagaacatccttgtggaaaaggataagaacatcacgctgatcggcatcaatcgaccgcagcagcgtaatgccatcgattcgcttactgcatcgcagctttgcgacgccttcgccaatttcgaggcggacgacacgtcgccggtggccgtgctgtacggcgtgggcggctccttttgctccggcttcgacatcctggagattagcaccgacgagaaggaggagatcagcgtggacatcctgatgcgaccggagggctccgtgggtcccacgcgtcgccagatcaagaagccggtcgtgtgcggcatcaatggctactgcatagccaacggtctggagctggctctcatgtgcgatctgcgcgtgatggaggagtccgcagtactgggatttttcaatcgacgctttggagtgccaatgctcgatgccggcaccatccggctgccggctatgattggattgtcgcgtgccctggacctgatacttacgggacgtccggtgggctcccaggaggcccacgacattggactggtcaacaggattgtgcccacaggcacggccttgggcaatgccctggagctggccacctgtctggccaagttcccgcaacgcgcgctcatccacgatcgcaactcggtctactcgagcacgttcgagacctcaacgttccaccaggcggtgcagaatgaggtgatgttcacgtcccgtgaaatcatcgaggacatgcagaacggcatcaaatggttcaaccagagtgagtttctccagcgccagtggctgtacattttctcaatcccttatattcccatgcagccttcaagccggacaccacgcattcgtggctaaagcgcgaccgctcgatggccgactgggacgatgaggaagtggctgaggctgcagcgcagaaggaaaaactaaaacaggagcaggaggctgctctggctgaggccgaaaagcaaaagcaggctgaaaaggcgcagaaaaggtcgaagaagaccgaggaaagtgcggctgaaagtgtcgatagtaaagatcccaaggataagccaaacgaaaagtagttgtgccatatccaaacaaaattatctgttccaaatcatttaatttaattttgtacataacgcacctattaccagtttcaaactgatccattcgacctttctaacttattcaaatacatttccgtaaacggatcaaatgtaaatgactttaatcttatattacattgaaaatatgtaatggagtggcttacttattattttctgaatttgttctatatattaattattcataatccctcaagatttatgactttcaactgccgcttaaagttatttcactaaaatgtacataaaaaatgcataaatttcggttaaacaaatttctttgttcatccctttacatactagtgtatgtgcaagtataacgacatcgttattcgttcttggaccgatcctaagcgattccgactcggaaccacttcgatataaagaatgtcttatgagtttacagggacttaggttaatctaaagcaaatatgataatttgatataacattgttgctaccagaaatatttcaattttacaattttcattagcatttttattcaagagctcgccagctatctacgactgaaaaggttcttcaggttcggcctattttaatattgctgatctggggtcaattgtaattatggttgcttctggttgttaaaggcgaaccaaagtcaagttgctattacgtgagcttatatgtttaagcttcagtgattccaatggcagtaaaaatagagaaatcgtgagattcggtcgggccaagaaccaagattgcatcgtgcaaggatatcaatcaaattattcgagaaaggataaggaccgttccctgaacattaaaattgataaggactgttaacttaaatacgataaggataatagtgctaagtggttgagtgcagtgaaagaaagtgacgatatggcgccctactcaaggatataccatcaggataagtcctccagagaaacgggtgtccttttcgaggacgatgcgcaaacagtcgacgg

SEQ ID NO: 41009 - DNA, 1217 bp, DROSOPHILA
cacaaaacggtggcagctctgtaagacaattactatcgaattgtttttacgaaatctgaccaatatttaattttccgatcatgcttcgcaaatttggaggtctgttggcccagcaggtgggtcagcaagcacgtttcaccgccgcgagtcgcacattttcctcgacaaaagcgctgcacaaagatccagcgacccaggaagcagaggcggcgccaccgaagaacatccttgtggaaaaggataagaacatcacgctgatcggcatcaatcgaccgcagcagcgtaatgccatcgattcgcttactgcatcgcagctttgcgacgccttcgccaatttcgaggcggacgacacgtcgccggtggccgtgctgtacggcgtgggcggctccttttgctccggcttcgacatcctggagattagcaccgacgagaaggaggagatcagcgtggacatcctgatgcgaccggagggctccgtgggtcccacgcgtcgccagatcaagaagccggtcgtgtgcggcatcaatggctactgcatagccaacggtctggagctggctctcatgtgcgatctgcgcgtgatggaggagtccgcagtactgggatttttcaatcgacgctttggagtgccaatgctcgatgccggcaccatccggctgccggctatgattggattgtcgcgtgccctggacctgatacttacgggacgtccggtgggctcccaggaggcccacgacattggactggtcaacaggattgtgcccacaggcacggccttgggcaatgccctggagctggccacctgtctggccaagttcccgcaacgcgcgctcatccacgatcgcaactcggtctactcgagcacgttcgagacctcaacgttccaccaggcggtgcagaatgaggtgatgttcacgtcccgtgaaatcatcgaggacatgcagaacggcatcaaatggttcaaccagaccttcaagccggacaccacgcattcgtggctaaagcgcgaccgctcgatggccgactgggacgatgaggaagtggctgaggctgcagcgcagaaggaaaaactaaaacaggagcaggaggctgctctggctgaggccgaaaagcaaaagcaggctgaaaaggcgcagaaaaggtcgaagaagaccgaggaaagtgcggctgaaagtgtcgatagtaaagatcccaaggataagccaaacgaaaagtag

SEQ ID NO: 41010 - protein, 378 aa, DROSOPHILA
MLRKFGGLLAQQVGQQARFTAASRTFSSTKALHKDPATQEAEAAPPKNILVEKDKNITLIGINRPQQRNAIDSLTASQLCDAFANFEADDTSPVAVLYGVGGSFCSGFDILEISTDEKEEISVDILMRPEGSVGPTRRQIKKPVVCGINGYCIANGLELALMCDLRVMEESAVLGFFNRRFGVPMLDAGTIRLPAMIGLSRALDLILTGRPVGSQEAHDIGLVNRIVPTGTALGNALELATCLAKFPQRALIHDRNSVYSSTFETSTFHQAVQNEVMFTSREIIEDMQNGIKWFNQTFKPDTTHSWLKRDRSMADWDDEEVAEAAAQKEKLKQEQEAALAEAEKQKQAEKAQKRSKKTEESAAESVDSKDPKDKPNEK

SEQ ID NO: 41011 - DNA, 4638 bp, DROSOPHILA
tggatatggaacatgccttcgagtcgctggcctttgcttgtgtggagtgtgtcatcacggaacgatttggctcaaaggcagcccgaatatttcgagtgattcgatgcaagaaatacatagaacaggaggacctgcaaaaggaggccatgatcccatccaaagaggccaagtcgctggcgtataatttgttccaggaacagtttattcatgtcaagattattaagaagcctggcggaggcagtaatggccccgcaaaggcattttacctcttccaggtcaaggagaaagatgtgagtgtggtcgaggaaaagttgttcttctatctctaatgttattcatgcatttcagaccgtgagaatgctgcttgatgccagctacaaatccctttataacacaatagagcgatctaacttcgaaaaaaatgagcacaagggcctaattgaaaaatcacaaaggctggacagcatcgtagaggccatgaaggaacgtggagagacggacgagtatatcgcagaggtacatattatttaggttgatagggaagtacattttaagcagctccctgccatttcagattgttgagactttcacgccgccggaatgcgagatccttaataaggtgaaaaatcgcataaagaccttgtcaaaagctgaactgaccctagacgatacaatctttcttctgcaaatgtatcagcatcattgcactacgctgccaacgggtattcgtaaatttaaataaattgtaatcataagggaatcagattgtcttatttattcagaagtttttcgtattgcccgaggagaggcattttgaagaaaactaagactatgcattttctgaacatttacgatcagcatcttcttggaaaatcatttttatggttactgccgacattttaaagtatattagactcaaatttattaaacacacatatgcgaatgaaaggactgcacactgaatcacaggctatataaataaggtatgcataaaagaaggctagttgctttcaggagtaattacactccgcttccggtgcacaatacgctgctcgcgatgggctttctgcaatttaatgaaatgttgttccaaggcatcgaaatcaatgccacttttgtactccagtgagttgcgttcatccctgcggattaaaaaaagctgcattgaaggtattaactcgaggaaatatcttacacaggttcgtgaccccagtagttgggcacgcattgcaaacgattccgaagcgtgtcaaaggcttccgtctgcggtagcagcattaggatgccaaacagggcatgagccaagtactgagcatccgcgcagttattcgctttggaaacaagcgtaagacgcaaaggagcaaatatgggagactctatcaactgaaccagtttgtcgaactcggtcagcagctccaaagtgatttcaacatcggcactgcataataataataaatacacattcaataaactaagcaagggagccatacgtattaatcacttacaatagcgtaaccaagcgggacacatgttggtagctctgggtgagcaggcacaaggaaagtgtagacactggacagtgggcccagctcttgtagagacattgaaagagatccgctgacttctcgttggatatatttcgcaaactagtacgcaattcgaatagctccgttgatgtaagtagaatcatgttcagcaggcgcacaaccgtcgaagcaaacttcaagttgggcacgccctccgctattatttcagcaaaagtgcggtaaatgtattcggcattcagcagcacacagagttttctttaataaatatggttatatgtgggcatatttgatgaaaaaagtatatacaatgggtttacctaataataaggctggctctgttctccaatataagtttctcctcgctgaaaaggttcaataagctcaacaaaaacttgcgatagtgcgatttgttaaaatcgttaagctctgtaagaagagagtataagttactatattgactaaaagtatttcgggaatatgttctcacccctgctctcttgagaatttacgatttccgccaaaacggacaggctttggaggactacctcatccgagttgtcggccagagttgacaacagattagtgttcaggttactcgcatgcacggacatttcgtttggaaagttggtgaataggtggtgaatccactttagtactgcgatctttgtgtgcatcgaattgtgcgtgagatactgtgaaagaacgtccataatcgaacgcaaatcaatcttggccactgtctccgttttcagctccttggtcgaaacgagcaacatcatcgagttgtttacagacacggcgcactctttaatgcctgaaaattaatggaattaaacgagcgctttctattagaaccattagcttactcctcttcgattccacattgtattccagacacggcaatatcgccgtaaatatgccactagcatacggcagcacattgggtccaaatatttggacaaactctcgtatccaggtgatcgcaatggacttgatgagctcattgggcgattgtgcgtgggttatgagtgtattgatagtatcctccatacgcacggatgacgagtcgttccttatggacttcagaaactggctgattgtggtctcgcacatgcgctggatctcaagcgtattgtcctcgagcatgacgaacaatccgtccaaaatctcggtcaaatagttgaccatgtttatatccggtacggcatttaggatcgatatccatgagatcacatactgacgggcaaacgcatcctttacatagatgtgctccctcagcaaaggaatgaacgcctgcagattgaatgtttgcgacgattccgtgacaatgtcctaatagtagggtaggtcctataactttgattcctttgagattaaataaaattctaagggtagctacctttagaaggcgatccagcaattcgctgccgtccttcaccatttgatctgaatcagtgacgagacgcgatagtgctgcaaaaagctccgggaagaagggaatgatcgcagagcgggccaccttcaccacgttgtacagggactcgcaggcgaagtaccgcacacggatatccggatccgacaggcaggtcatgatgggcgtcaccatgccctggacatacttgccggaatcctgcaaaagtagacgcactcttgaaatgggaacacgattccgatgactaatggtcacaaataccttgcccagccctaaacccatggctgccagaccgataagcgctccttttcttcggtttgcgtcccgtgatgtggcataatccgtggccagaacctcgatcagcttgcggatctgggccgagttgtttttgttgttgaattccgtgaccattctggcaaagattacatttcccaattaggatgacgaatctcggcggtggctatttcatgtgctactcacttctcgatctcctgcgaggccagcttacgtttctcgtacaccttgtcgcccagcgccttggcgcaggactcacttagcggggcgtacggcggttccattctgtaatccgtaatctaatcaaaataacaatatttgtaggcgggtttttcgtttgcactgcatatcttcacgaacagctgtttactagggatgccaactcgtgcttttaagcgcgtaaagttttcgattcggcgccaactctccatcgcatttaaataaataatttctcgaggacagatctaaacgagtttttaagcaaactcactccctgacaataaaaacgcaattatctttaaataaatatattctatttattaaccaagtagctaatatagctaaaatcaatttgttgctaacttaaaactaacataattatgtattagttatttacattcttttggttggttacaaccaaataaataatatcacttttaaaaacttaagccaggaactgaataattttctatttggctttagtcgacctcctcgactgtgggtccagagtagccgccaaatcctccggcctgttggccacagttggctcccggacccccaagctgctcccgctccctgctgatgcatcttggtcatgataggggagcagtggcgagtgagctcctccatcttgtggtcgaactcctccttctcggcggtggtgttgctgtccagccatcgaatagtttcgttgcacttgtccaggacggagttcttgtcggcctcgtccagtttgccagcgggcgcctgctccacggactgctttacgttgaatacgtagctctccagagcatttctagaggttatgcgctggcgatgcttttcgtcctcgtcggcgtacttctcagcctcgttcaccatgcgatcaatctcggcctgcgagaggcgtcccttgtcgttcttgatcgtgatgttcttggccttgcccgtgctcatctccttggcgctgacgttcaggattccattggcgtccaagtcgaaggttacttctatctggggcacaccccttggtgcaggtggaatgccggacagatcgaaggtgcccaatgcattgttgtccttcgtcatcgcacgttcgccctcatacacctggatggagactccgggctggttgtccgagtacgtggagaacgtcttagtctgctt

SEQ ID NO: 41012 - DNA, 2145 bp, DROSOPHILA
cagctgttcgtgaagatatgcagtgcaaacgaaaaacccgcctacaaatattgttattttgattagattacggattacagaatggaaccgccgtacgccccgctaagtgagtcctgcgccaaggcgctgggcgacaaggtgtacgagaaacgtaagctggcctcgcaggagatcgagaaaatggtcacggaattcaacaacaaaaacaactcggcccagatccgcaagctgatcgaggttctggccacggattatgccacatcacgggacgcaaaccgaagaaaaggagcgcttatcggtctggcagccatgggtttagggctgggcaaggattccggcaagtatgtccagggcatggtgacgcccatcatgacctgcctgtcggatccggatatccgtgtgcggtacttcgcctgcgagtccctgtacaacgtggtgaaggtggcccgctctgcgatcattcccttcttcccggagctttttgcagcactatcgcgtctcgtcactgattcagatcaaatggtgaaggacggcagcgaattgctggatcgccttctaaaggacattgtcacggaatcgtcgcaaacattcaatctgcaggcgttcattcctttgctgagggagcacatctatgtaaaggatgcgtttgcccgtcagtatgtgatctcatggatatcgatcctaaatgccgtaccggatataaacatggtcaactatttgaccgagattttggacggattgttcgtcatgctcgaggacaatacgcttgagatccagcgcatgtgcgagaccacaatcagccagtttctgaagtccataaggaacgactcgtcatccgtgcgtatggaggatactatcaatacactcataacccacgcacaatcgcccaatgagctcatcaagtccattgcgatcacctggatacgagagtttgtccaaatatttggacccaatgtgctgccgtatgctagtggcatatttacggcgatattgccgtgtctggaatacaatgtggaatcgaagaggagcattaaagagtgcgccgtgtctgtaaacaactcgatgatgttgctcgtttcgaccaaggagctgaaaacggagacagtggccaagattgatttgcgttcgattatggacgttctttcacagtatctcacgcacaattcgatgcacacaaagatcgcagtactaaagtggattcaccacctattcaccaactttccaaacgaaatgtccgtgcatgcgagtaacctgaacactaatctgttgtcaactctggccgacaactcggatgaggtagtcctccaaagcctgtccgttttggcggaaatcgtaaattctcaagagagcagggagcttaacgattttaacaaatcgcactatcgcaagtttttgttgagcttattgaaccttttcagcgaggagaaacttatattggagaacagagccagccttattattagaaaactctgtgtgctgctgaatgccgaatacatttaccgcacttttgctgaaataatagcggagggcgtgcccaacttgaagtttgcttcgacggttgtgcgcctgctgaacatgattctacttacatcaacggagctattcgaattgcgtactagtttgcgaaatatatccaacgagaagtcagcggatctctttcaatgtctctacaagagctgggcccactgtccagtgtctacactttccttgtgcctgctcacccagagctaccaacatgtgtcccgcttggttacgctatttgccgatgttgaaatcactttggagctgctgaccgagttcgacaaactggttcagttgatagagtctcccatatttgctcctttgcgtcttacgcttgtttccaaagcgaataactgcgcggatgctcagtacttggctcatgccctgtttggcatcctaatgctgctaccgcagacggaagcctttgacacgcttcggaatcgtttgcaatgcgtgcccaactactggggtcacgaacctgtggatgaacgcaactcactggagtacaaaagtggcattgatttcgatgccttggaacaacatttcattaaattgcagaaagcccatcgcgagcagcgtattgtgcaccggaagcggagtgtaattactcctgaaagcaactag

SEQ ID NO: 41013 - protein, 687 aa, DROSOPHILA
MEPPYAPLSESCAKALGDKVYEKRKLASQEIEKMVTEFNNKNNSAQIRKLIEVLATDYATSRDANRRKGALIGLAAMGLGLGKDSGKYVQGMVTPIMTCLSDPDIRVRYFACESLYNVVKVARSAIIPFFPELFAALSRLVTDSDQMVKDGSELLDRLLKDIVTESSQTFNLQAFIPLLREHIYVKDAFARQYVISWISILNAVPDINMVNYLTEILDGLFVMLEDNTLEIQRMCETTISQFLKSIRNDSSSVRMEDTINTLITHAQSPNELIKSIAITWIREFVQIFGPNVLPYASGIFTAILPCLEYNVESKRSIKECAVSVNNSMMLLVSTKELKTETVAKIDLRSIMDVLSQYLTHNSMHTKIAVLKWIHHLFTNFPNEMSVHASNLNTNLLSTLADNSDEVVLQSLSVLAEIVNSQESRELNDFNKSHYRKFLLSLLNLFSEEKLILENRASLIIRKLCVLLNAEYIYRTFAEIIAEGVPNLKFASTVVRLLNMILLTSTELFELRTSLRNISNEKSADLFQCLYKSWAHCPVSTLSLCLLTQSYQHVSRLVTLFADVEITLELLTEFDKLVQLIESPIFAPLRLTLVSKANNCADAQYLAHALFGILMLLPQTEAFDTLRNRLQCVPNYWGHEPVDERNSLEYKSGIDFDALEQHFIKLQKAHREQRIVHRKRSVITPESN

SEQ ID NO: 41014 - DNA, 6676 bp, DROSOPHILA
ttttctccctcaaaacagcaagtttatactacttattaaccaaggtaaaattaaaatgttttacaactgtcatcggaaaataaagcattccatgttttaaaaacacccaatcgaatggattatgtaaaagtattggattttttttattttgcccacttagtagcaagtggcgcttacggatgcccgatccatggggcaaccataaacttggatgtctgtgattagggtaaggaaacataacacttatttcacaagaattcgccagctgcttaaatggtacatgtaaaaatattgaagtatttttatttttctagacattctgagtggcgctcgatgtgtacgtacatacaactctttggattctgtgtgtacagtcaatttacgatgcccaagccgccctgagcgaattccatatttacaagagaagggggtggggattgggaggggggggggtgtcggaaagggttggggccttaaaatacctaaactcaactacactcaacaatttgcttatggtcactacttatacgccttatacaccggcggttgcactttaagcttcaacgttatagatttggccaggacaccagcggaggaaccacgatcccgacggccaatccccgcaccgaacactccttccgtgctagccggaagtggatcggcggtgggcgtggccgcaaggaacggccaaccggggcgtcatttgggatatgagccgcgccggagccggcagtctgctgtgcccggaattcgtgggggaatcgttcacgggaccgaccagcagcccctgccgggcggacgcagttgactagtggcggacaaaactttcaaagcaatcgaaagcgaaacctttgtacacacttaatagattcctgcgggtcgagttcgtggtcagttcgtcgtcaatgctcagtgtccagtaatcttttcgtttgttttttggatgagaaaatgagggaaacttaaacggctcggtaaaaaagaaaggcgtggcagcgcgctaaacaaattgctctgagctgttggcggacagctccatcagccgccaggcagccttggggttgagttcgttgcggtcgcggcacagcacccagacgtagtgaacccgcatcaccttctccggatctccctcgacgacctgactcttctggtcccgcacgcacataatctgctgggcttggaacgtgataatcagtaccgggccctgctccataaccttgcccattgccagttcaatgttctcgatgtcgaggatcttggagtccaggtacacgccggccttcttagcctccttaatgggatttgcgataatattgaaagtgctctcaaagcaccaatccttcagaatctccagatccccacggacaatcgattccagaatatttggaatgatgtccgtttcgcaatcgcggaggaaatccttctgatcaaagctcggatcgattttcaccagctccgtcatcgtttccgaaagctctgtctttgaaaagagtccacccatgacgtcggacactttatcggtcagcaggcgggaggcacgaataacagggttctcggactcgtcgtatttaaccttccagtcaagcaccttgttcacgtaggtattgttgttcttgaagttctcccacgactcgtagaacttggagtccttgtgcagctccatacctgaaaagtaacattacattatggccatgacctttgatcttattgaaggaaaaagatggagactcaccagtggcttccgtgttgggctccacaacgcgatcactatcgctcatgacgagctggacgcgctttcgcaacttggcaggagcacgatagacacgattctctatgctcgcgctgtccatctccttcttgatggtcgtcgtcgtgttagagatagcctggaatgcgctggtctggcccagcttgccactggtgtcggagatcgtgtcgctgacccccctagccttcttcgagagctcctcggtaacctttttggccaggtgggatttgctggcgtcctccagaacatcgcctacgcgctccttgatggcgcccagctgctcctttagcatgctagacgacttttgcgcctccgattcgacaatgttaaacttttgccgcgccgatttcagggcatccgattcttccagcttctgggcctcctcacggaactttcggatattgtccttgatctccttgttcttatccatctccgccttcatgttgtcgaagaactgcgagaagaagccggccctgcgacctggcgcactataaaagcggggctgcggagtaaagtcatgacttaggccggttgcgccatggggttttatgagccaaactctaacctgctgctgctgcaggttctgcgaggcctgctggcacgtgaagagacaggcgcgatcccgcacaagggcagctattctgtactgcaaggagaaaaaatcattgaaagcttcgaccgttttaacctcgaaatatgcacatgtaaggacggatgtgagcgaacgccagtgatgaccgggatcagaggtaacctaccatggtggggattaggtgaccgttcgcaggtagtttgatcggagcgaatgttcggggggtctggcgtcagaggctctaaactttatgtaattcctgccgcgaaacacgcacgtatcaagcagtcagctgttctcttcgttcagcgcgcgccggtgttgcaaaacgagcgctcttcgccggcggtggctcgtgcgatagttcgttttgtcggtaatccgatgttgccgcgccgatatcatgtgatgttgtcacagtgcgcgaaattcgaatggtggtgtgcagtgattgtgttgtgacggcgagtggcgcgtgtgggtgcttagttttgggagatgttttcgtatttttttgttgataactcaggctttgttgctgtgttgtagtactattttccattgcgcggtgtccagcttttaattagtggcacatattcttagcaagtaaaaattattttgcatactattaaatttcttataaattattttctaaaattaagtttaccttttcaattttactaaaaatatcgatatatttattatcgctggaaaactacattattccacctctaagcaagaaccgttagttggcgcgtagctttaccacaaaattcctggaattgccgtacgcttcgcagttgtttcaagttgtctaagggacatacgattttttttgcctctgcgtcacgattttaacccaaaagcgagtttagttacatgtacattattattagataaagaagtatcgcgaatacttcagttgaataaactgtgcttggtttttgggtgaggatttgtggaaagtagagtgcgcgataaccgtaactttcgacccggattttcgccatgttccgcagcaacttggagggcagtggcgcagcagcagtaggtgttgcaaatcccccctcgttggctcagtctggaaagattttccaattgcaggataacttttctgcttttcacgccagaggagggctcaacattctgggcctgcaggacatgtatttggataccagtggggccaactcgtcggccactttgagtccgcccattacgccggtgacccctgacccgtcgacgtctgcgcagtcgacgcacttcccttttctggccgacagcgcagccaccgccaattcgctccttatgcagcgacagtaccactaccacttgctgctccagcagcagcagcaactggccatggcgcagcaccaattggcgctggctgcatcagcggcagcggctagtgcgagtcaccagcaaacggacgagattgcgcgatccttgaaaatctttgcgcaggtgacgacgggcgcagcaggtaagaagaaatggcgaatatggcgtcgtttaaaacagaatagccaaaaacagtgcgcgggagcgagatgactatctgtacaagtacagttatgccaaagtcaatggccatgggcttagttaaaggggcaacgaaagcacagagcaaaacagaagtaaaattgtgtaaatgtataattgctgcagaggtcagaggattttcgccatttagtgtagtatattttttattttactattttgtatgtgctttaaaatatatctttgcccaacacttgtatccccttcaagaggtttttcgagcgcccctgaattttcggccattgaccttagcattttcgctattcctttttgttttaacttcggaaagccattttgcgtcttacattttctagaagttctttgctttttctcgtctgttcttgttttttttttgtatgcaaaaactaatccgtatttgcttattacatttctgaaatgcaattgaaacgcgaataataaaaaaaatacgttcaggacaaggtaatgaaaagcttgctattcccagaaaatgcggctggctcgatgcaggatgtgatgcaggagttcgcgaccaatggctatgccagcgatgatctcggtcgcatgtcctacgggagtgctccgccacaggtgcaaatgccaccgcagcagcagcatcagcaacagcaggggctgcacctgccactgggccgcaatcctgcccagctgcagaccaatggcggcaacttaatgcccattccactcgccacccactggctgaacaactaccgggagcatctgaacaacgtgtggcgaaacatgtcgtatataccagccgctcccaatacaatgggtttgcaggcccaaacagcggccactgtgtccaccaatctcggcgtgggaatgggtctgggattgcccgtgcagggcgaacagctgcgcggagcttccaattccagtaacaataataacaacaacaacaaggtgtacaagcgttacaacagcaaggccaaagaggtgagtggatctgatccaggattcgcagaattaaaacttgcaaaatatatttgttatcttgtttctccaacagatcagccgccactgcgtcttttgtgagaataacaacgaaccagaggcggttatcaatagccactcagtgcgagataactttaaccgagtgctgtgccccaaactacgcacctacgtgtgccccatctgcggggcatctggggactcggcgcacacgattaagtactgccccaagaagccgatcatcaccatggaggatgcgatcaaggcggaatcgttccgcctagccaagagcagttactacaagcaacagatgaaggtttagagagggcgaatccagctctggagcagaggctctggcagcttttgcagcgtttatataacatgaaatatatatacgcattccgatcaaagctgggttaaccagatagatagatagtaacgtttaaatagcgcctggcgcgttcgattttaaagagatttagagcgttatcccgtgcctatagatcttatagtatagacaacgaacgatcactcaaatccaagtcaataattcaagaatttatgtctgtttctgtgaaagggaaactaattttgttaaagaagacttacaatatcgtaatacttgttcaatcgtcgtggccgatagaaatatcttacaatccgaaagttgatgaatggaattggtctgcaactggtcgccttcatttcgtaaaatgttcgcttgcggccgaaaaatttcgatatatctacaattgatctacaatctttactaaattttgaaaaaggaacactttgaatttcgaactgtcaatcgtatcattagaatttaatctaaatttaaatcttgctaaaggaaatagcaaggaacactttcgtcgtcggctacgcattcattgtaaaattttaaattttgacattccgcactttttgatagataagcgaagagtatttttattacatgtatcgcaagtattcatttcaacacacatatctatatatatatatatatatatatatatatatatatatatatatgttatatatttattcaattttgtttaccattgatcaatttttcacacatgaaacaaccgccagcattatataatttttttatttttttaaaaaatgtgtacacatattctgaaaatgaaaaattcaatggctcgagtgccaaataaagaaatggttacaatttaaggaaacaaatgtccttcttgcgtttgaaacaactaatccttttcgccctcgcggcgtttctcgaaaagggccaggaagatgccatcggtaagatcactgtccggctggcaatacaggacgttcttgccaatattgggatagtccttgtcgcccacattgtgccacttgttgcgcaaggccttcttgcagctgagcagcttgaaggatggatttagctgaagacaacgctgcaccacctgctcgttttcctccttccacagcgaacacgtgcagtaggcaatgcgtttgacgttcggaaaggcgcccatcgcgtgcgacaggatcttaatttgcaaaccctgcagcttttgcagccgcttgtcctccttcggctcgtcgcacacggtcatgcggttttgcattccgctgccagagcaactagggtccaccaggatgtactctacgtccggaaagcgttcgggtgctgaaattcaaacgtgttacttttttaaatattcattgtgaaatatataaatataaaactcacttaggttcaaggcgtctcccaaaatgggttttacaatatcgcaaccagcatcctttgttatttcgcacagcgtattgtagcg

SEQ ID NO: 41015 - DNA, 1483 bp, DROSOPHILA
acagttcgaaattcaaagtgttcctttttcaaaatttagtaaagattgtagatcaattgtagatatatcgaaatttttcggccgcaagcgaacattttacgaaatgaaggcgaccagttgcagaccaattccattcatcaactttcggattgtaagatatttctatcggccacgacgattgaacaagtattacgatatttacagaatagctgcccttgtgcgggatcgcgcctgtctcttcacgtgccagcaggcctcgcagaacctgcagcagcagcagccccgcttttatagtgcgccaggtcgcagggccggcttcttctcgcagttcttcgacaacatgaaggcggagatggataagaacaaggagatcaaggacaatatccgaaagttccgtgaggaggcccagaagctggaagaatcggatgccctgaaatcggcgcggcaaaagtttaacattgtcgaatcggaggcgcaaaagtcgtctagcatgctaaaggagcagctgggcgccatcaaggagcgcgtaggcgatgttctggaggacgccagcaaatcccacctggccaaaaaggttaccgaggagctctcgaagaaggctaggggggtcagcgacacgatctccgacaccagtggcaagctgggccagaccagcgcattccaggctatctctaacacgacgacgaccatcaagaaggagatggacagcgcgagcatagagaatcgtgtctatcgtgctcctgccaagttgcgaaagcgcgtccagctcgtcatgagcgatagtgatcgcgttgtggagcccaacacggaagccactggtatggagctgcacaaggactccaagttctacgagtcgtgggagaacttcaagaacaacaatacctacgtgaacaaggtgcttgactggaaggttaaatacgacgagtccgagaaccctgttattcgtgcctcccgcctgctgaccgataaagtgtccgacgtcatgggtggactcttttcaaagacagagctttcggaaacgatgacggagctggtgaaaatcgatccgagctttgatcagaaggatttcctccgcgattgcgaaacggacatcattccaaatattctggaatcgattgtccgtggggatctggagattctgaaggattggtgctttgagagcactttcaatattatcgcaaatcccattaaggaggctaagaaggccggcgtgtacctggactccaagatcctcgacatcgagaacattgaactggcaatgggcaaggttatggagcagggcccggtactgattatcacgttccaagcccagcagattatgtgcgtgcgggaccagaagagtcaggtcgtcgagggagatccggagaaggtgatgcgggttcactacgtctgggtgctgtgccgcgaccgcaacgaactcaaccccaaggctgcctggcggctgatggagctgtccgccaacagctcagagcaatttgtttag

SEQ ID NO: 41016 - protein, 459 aa, DROSOPHILA
MKATSCRPIPFINFRIVRYFYRPRRLNKYYDIYRIAALVRDRACLFTCQQASQNLQQQQPRFYSAPGRRAGFFSQFFDNMKAEMDKNKEIKDNIRKFREEAQKLEESDALKSARQKFNIVESEAQKSSSMLKEQLGAIKERVGDVLEDASKSHLAKKVTEELSKKARGVSDTISDTSGKLGQTSAFQAISNTTTTIKKEMDSASIENRVYRAPAKLRKRVQLVMSDSDRVVEPNTEATGMELHKDSKFYESWENFKNNNTYVNKVLDWKVKYDESENPVIRASRLLTDKVSDVMGGLFSKTELSETMTELVKIDPSFDQKDFLRDCETDIIPNILESIVRGDLEILKDWCFESTFNIIANPIKEAKKAGVYLDSKILDIENIELAMGKVMEQGPVLIITFQAQQIMCVRDQKSQVVEGDPEKVMRVHYVWVLCRDRNELNPKAAWRLMELSANSSEQFV

SEQ ID NO: 41017 - DNA, 4394 bp, DROSOPHILA
tgaatatattttcgagggactagagctcttgttatataattaattgttcctctataaatctaaatctaaatctacattgacaatacgccacgtttcctaaagtttttgggtacaaggagaattgtatctgtgagttttaatcgttctattatagcttgaaaacgaaatttgcaccgaaagctgataaaattccgactctgctatctgctggataagtaaaatgctggtagccacttggagtactaccagtacagcaatgaaagtaaagtgaaatgggcatttcattttctactttctatttgcaggcacactggaaacagtttactgcgagattcccacttcattagttggcaatgcacgtggacgacagcaaaaagcactcgtagtacttgtttcgcccttgatttgcatctaagaatcgctcagatacatctggtgagctgaaactcgtttctgagccgcagtgtcgtgcaggtatccgtactcgtttgaatatttgtaagtaatcattgcagcgagacttccaaaaagtaagctcagctaagttctgcggtgttgggcatccaattagttgaccaagttttctggtggcatgcacatgaaacttgtttaatcgatagggtaaatatgcaaatttcgattgaatttgacgataatgcgtcgagatgaaaagaaaacgaattgtgcaggattttggttacgagataagccgaatcagctaataaggcacgtgcttaattgatatatattgtatgtttaagtaacctaaatatgcacgactttaatatcacttttatttcgctttcgtaataaaacgaggttcactctaaagagcacaagcgtggaggtgtatgtgtgttcttacagccccgatcatttgtatttccatttgagtgcgagcgaagacgagggtttacaacttgatgagaatttgatcaagataacattaaaacacaatctgctgcagtcggacggggcacttctgattgaatcgtcgacggaagaggttcggatctcgaaagccaaaaataatcagccttttactggccaattgagatacggaaacttctaccgaccgagtgtagtatggctgaatcagtggatggagcagagactgttgaccagattcgcgatggcctcatggacgactggaagatcctggagaacgtattccaccttctccggaaggaggataccttctgcgtggatccccagaaatgggacaagcagaagatagtcccctttttgcagccagacaaacttaaggtgagtggagcaagtgatagacgattcggcgtctgccgatgtggagataaccagagataacagagaactgattaatggaagagttcattcgaaaattgaccacccgaccgcaaattgtagcaattgtactatggcttgcccgacgaaatgtgagtcaattgatagtagcacttcctgattgagcacactcatgctagtatctgatagttttaattataattgaattgtttgttatttcatagattatggtcggttttttctgggtaaagatattattagttcgaaacagaaaacgttttagaaatatgttgaatctttaatatactttcttattgcaaaagtcgctgttctataacaatcttgagattacatgatttcgcaccatcacttccaggaactgattaacctgaaggttcgagagacggaaaactgctcgctcgcggagatcgaggagctgtgccagcaggtgatccattactctgtgaaaacctcgcacggccgcttccacaatcagctctttggccagctggacccgtttggactggcaggagccctggtcaccgaggccatgaacggcagcacgtaagtctgcgccttattccacacatgtgtcttgtctatatgagtgaccgctgattgcatctcgtgttccaatctacaagtggtgtcggggttcaacgtacagataattgcgctatgtaatggagattgcaaagtactacatgtatgtttcataacccccccccccccctttcgattaatttaaatggggattaagcagagttcatacacaatcattgcaagttattaatcatttagatgagatttcctagataggactaccaaaatcagacttttaaccgaggtatccaacaagacacaataaacttttgtttcagatacacctacgaagttgcgcccgtgtttagcttgatcgaaactgaggtgatcgcgaccatctgcaagttagcgggatacaaggaaggcgatggcatctttgcgcccggtggctccacctccaacatgtacggcatggttctggcccgctataagatcgcgcccgaggtgaagacgtctggaatgtttggaatgcgaccgctggtgctctttacctccgacgagtcgcactacagcttcgtgaaggcggccaactggctgggattgggcagctacaactgtgtgtcggtgaggaccaatgagcggggtcagatgctgttggacgacctggaggcgaagatcgcagaggcaaaggcacgtggcggtgaaccgttctttgtcaactgtactgcaggcaccactgtgttgggtgcctttgatgatatcaatggtgcggcggatgtgacggaacgacatggtctgtggctccatgtggacgcctgtctgggaggcgctgcactactctccgccaagaaccgatcgctcattgccggcctcgagcgggcgaattcgttttcctggaatccgcacaaaaccatcggcgctccattgcagtgttcactctttttgaccagggaatctggccgtctgctggaaagatgcaacagcaccgaggcgcactatttgttccagcaggacaagttctatgatgtatcctacgatacgggaaacaagagtgtccagtgcggccgcaagatcgacgctttcaagttctggctaatgcttaaggctcgcggatatggaaagtatggactcatggtggaccacgccatccacatcgccaggttgctggaaggcaagctgcgccagcgtggagatcgctttagactggtgatcccggagcacgagtactccaatgtctgcttttggttcattccgaaagcaatgagggtgtccagcgaggaggagacgcctgaatggtggagtcgactttacactgtaagtgaataacaatggctttgatagaccatttaagctcacatttttatatgctcctttaaaggtggccccgaaaattaaggagcaaatggcccacagcggcactttgatgattggttactcgcctcttaaagctaaaaatctgggcaacttctttcgcatggtcttcacttgttttcccatcctgaaaagcaaagagttggacttcattttggacgaaattgagagattgggcgagaaaattgtgctttgaattattttctatgtgaattaagctaattaatggaaatcgttcaattgtacatttcattgtagttattactttgtgataaaaaatacgcctttattatgtaaactcggcttaatctctattttgaatatttaaataaaaatctttcaagaaatgaatattaagttttttaaattcattttctaccgctatcaacaaataatattagcctggtcacacgaacatcccccagcagtaactatcgataaaagtgttcacgggtattgttgttataccccagcgcggtcatacctttacgtgagatcaaaacaataagtttttgttgagaaattatttgtaaaaccacgcacataaaaagacgctacgatgggtcgcgccgaggtaggtacgcccaagtacctcgccaacaagatgaaatcgaagggtctgcagaagctgcgctggtactgccagatgtgcgagaagcagtgccgcgatgaaaacggcttcaagtgccacacgatgagcgagtcccaccagcgccagttgctcctctttgcggacaatcctggcaaattcctgcacagcttcagcaaagagttctccgacggctacatggagttgctgcgccggcggttcggcacgaagcgaaccagcgccaacaagatctaccaggagtacattgcccacaaggagcacatccacatgaacgccacccgatggctcaccctgtccgactacgtgaagtggctgggccggactgggcaagtgatagcggatgagacggagaagggctggttcgtcacctacattgatcgcagtccagaggccatggaacgacaggcgaaggctgatcgcaaggagaagatggagaaggacgacgaggagcggatggccgacttcattgagcagcagattaaaaatgccaaggccaaggacggcgaggaggacgaaggccaggagaagttcaccgagctaaagcgcgaagagaacgaaccactcaagcttgatattcgccttgaga

SEQ ID NO: 41018 - DNA, 1619 bp, DROSOPHILA
gaagaggttcggatctcgaaagccaaaaataatcagccttttactggccaattgagatacggaaacttctaccgaccgagtgtagtatggctgaatcagtggatggagcagagactgttgaccagattcgcgatggcctcatggacgactggaagatcctggagaacgtattccaccttctccggaaggaggataccttctgcgtggatccccagaaatgggacaagcagaagatagtcccctttttgcagccagacaaacttaaggaactgattaacctgaaggttcgagagacggaaaactgctcgctcgcggagatcgaggagctgtgccagcaggtgatccattactctgtgaaaacctcgcacggccgcttccacaatcagctctttggccagctggacccgtttggactggcaggagccctggtcaccgaggccatgaacggcagcacatacacctacgaagttgcgcccgtgtttagcttgatcgaaactgaggtgatcgcgaccatctgcaagttagcgggatacaaggaaggcgatggcatctttgcgcccggtggctccacctccaacatgtacggcatggttctggcccgctataagatcgcgcccgaggtgaagacgtctggaatgtttggaatgcgaccgctggtgctctttacctccgacgagtcgcactacagcttcgtgaaggcggccaactggctgggattgggcagctacaactgtgtgtcggtgaggaccaatgagcggggtcagatgctgttggacgacctggaggcgaagatcgcagaggcaaaggcacgtggcggtgaaccgttctttgtcaactgtactgcaggcaccactgtgttgggtgcctttgatgatatcaatggtgcggcggatgtgacggaacgacatggtctgtggctccatgtggacgcctgtctgggaggcgctgcactactctccgccaagaaccgatcgctcattgccggcctcgagcgggcgaattcgttttcctggaatccgcacaaaaccatcggcgctccattgcagtgttcactctttttgaccagggaatctggccgtctgctggaaagatgcaacagcaccgaggcgcactatttgttccagcaggacaagttctatgatgtatcctacgatacgggaaacaagagtgtccagtgcggccgcaagatcgacgctttcaagttctggctaatgcttaaggctcgcggatatggaaagtatggactcatggtggaccacgccatccacatcgccaggttgctggaaggcaagctgcgccagcgtggagatcgctttagactggtgatcccggagcacgagtactccaatgtctgcttttggttcattccgaaagcaatgagggtgtccagcgaggaggagacgcctgaatggtggagtcgactttacactgtggccccgaaaattaaggagcaaatggcccacagcggcactttgatgattggttactcgcctcttaaagctaaaaatctgggcaacttctttcgcatggtcttcacttgttttcccatcctgaaaagcaaagagttggacttcattttggacgaaattgagagattgggcgagaaaattgtgctttga

SEQ ID NO: 41019 - protein, 510 aa, DROSOPHILA
MAESVDGAETVDQIRDGLMDDWKILENVFHLLRKEDTFCVDPQKWDKQKIVPFLQPDKLKELINLKVRETENCSLAEIEELCQQVIHYSVKTSHGRFHNQLFGQLDPFGLAGALVTEAMNGSTYTYEVAPVFSLIETEVIATICKLAGYKEGDGIFAPGGSTSNMYGMVLARYKIAPEVKTSGMFGMRPLVLFTSDESHYSFVKAANWLGLGSYNCVSVRTNERGQMLLDDLEAKIAEAKARGGEPFFVNCTAGTTVLGAFDDINGAADVTERHGLWLHVDACLGGAALLSAKNRSLIAGLERANSFSWNPHKTIGAPLQCSLFLTRESGRLLERCNSTEAHYLFQQDKFYDVSYDTGNKSVQCGRKIDAFKFWLMLKARGYGKYGLMVDHAIHIARLLEGKLRQRGDRFRLVIPEHEYSNVCFWFIPKAMRVSSEEETPEWWSRLYTVAPKIKEQMAHSGTLMIGYSPLKAKNLGNFFRMVFTCFPILKSKELDFILDEIERLGEKIVL

SEQ ID NO: 41020 - DNA, 9552 bp, DROSOPHILA
aaaatagttatgtatctagcttagagggcaaaatgcttgtagagagtaaatattcaatggaaattcctttgtttcgctttatatttaaaggtatacatcgagatatacacatatacatatatatatatatatatattcgccattaattatagcttgtttgtatttttttctaattttgttcttatcggttggtccaaattggatattgaaactttaacgaattggttcacttggttttattcccctcgttggataatatagtacatgtattgtatgtatagagaatagatttcatatatgtagatgacttgaagagttgttgaacttttgattttctgttttattgaaattctttcatgtacttaggtttaataaatcttgaatttcactaagaatttatcagggactgaccttttcatcaaatgcagtcctaagttacggatatggagaggttcttctcgaatttacatgtatgtttcgaaaacttatttggtatttaagtagcttatttatggttggcatgcttaagtattctctcttagtactcattgagaaagaaaaacaccatttgccagtaaaagcaaataccatccattcgcagctgccatcttgttcgcacacttggctagttatacatattttattgtacgcaactcatgttggcaaactgaatttttatgtttatactttaatgcacaatcgatacgcggggagaagtacacatggggggggtatcttgatatgtgggtgcacactaaggtaggcgaggccataaaaaccgagcaacaggaaagtgaaaacgaaggaaatgcggagcctggcttaaatcctaagccacatgtgtgattgtttcccatgttcggtatctgttcccaggccggtgtttgcggtgcgtgcgagcgcaataaaatttaatttgatgcaggcaccaacaacgcagagacccagccaaccatcccagcaaaacccacaaaaagccgacgtcagaaagaaatgtgaatttttttttttgcccagcccacagaacgaacgaaaacaaaactgccggccacacacaaagcactgcatagttgtgggctggaaaaattaaaccacaaatgcgggcgggacggaagtggttacaactccatgaaaggaggatacaaatccaccgccaacccttcgccagaggttcgtttaggcgggcggcatggagcttatggccgacgggcgtgtggcaacgacataacatgcaataaaaatgtggaaaggctgccgtccgcaaaggaccctgaagttacggatgtggaaacccatgcccagcgccagtctatctcagcctggccaagaaataactcagtgcctgtgtgagtgtgggatgttaattagctttcgctacgccgctttcaaactcaatttgaggtgctttaagctgacctttggcacggtggcacttgacctgcttcggatagacaggcgccaaggcttgggccgccataaatttaaaccgacaaggacattagacgggcaaagctgccactcttttccaccccatatatgcaaaacagcaaatcaattgtcgcgtcgcctgccactgacacacagcaccagttgtccagggacacaacgtccggcaaattgcgattgcatgcactctgtcgctatttcgatttaaggatatcaaaacacacgtgttgtgggatttaaattccagttcgccggatcgatcgatgcttcattaaatgtataagcatcataagctctgtcacaaacataaatcaaaatcgcttattgatgtctgcgcaacacgctgcgtatactcgatgacataaacgtgccggcagacaaaggaagataagaaaaggagccaagggaatggcggatacatacaagtgacatcatttctcaggacaacaatagggccaatacattaactaataccaaaataataataacaacaggataatggactaatggagcggtgccacctcaattatgaggcgcgaccataaatagatagctaaattgtggcgggaactcaaagtccaagggcaaggatgaatcgaatgtaaatgtctgtcatccacatgccagtatacactatggactataacctgctcaatatttgcgggcaaagcctggcgtgcccggattcagaacacggcaataatgcgagctggtcacgcaatatggatcccgatcaagatcgccgccatcctcgtcctcgtcaccggtggccagttgttggtggtggtgctgctgatgctgcgtctgtggcctccggcgcatcgacaacggtcattggcgctgttgagcgttactgatgaactcgccgtgcttttgcacctaaaaaaaaaacaataaaggcaggcaaatggtgaatagttcatggtatcagaacattctttttaaccataataggcaagcttatttcaatagttagaatagttacatcaaaaaccttcttaaatatttaaaaacaccaattgaatttacccgactttcacttgctctgttttaatgcacatttaagcacgaaacgaaacggacacatttgagttgttatggcacttattcacttaccacatcggccacgatgggctcctcgatctcgagtccttgcagcgtctgttcgcgagtcaaatgcagctcgtaggaatctgtgggcgtgacgaacaccacgcgatgcttgcgtgtctgcagcacattggcaatgaccagctggatgatgacgcggaagaaattagaattcatattaggtgtttcctggccggctgcaagttagctcaccttgtgcttgtatttgttgagactgtcacgtgccttcacaatcaataggctctcgtccgtttccagtttaaaggacaccacaaaggcgtgcgggacccacaaactggcgaggggggccagcatttttggcaccagctgcagcgaaatcgtcggcgctccatctcctgattgcattttgtgggtgggctgaaaatccgttgacagcggttagtgttttaatggaatgatgggaccacgttgcgtatacgcgatgtgatgcgatggcatgggattgcttcggcggttggctggttcgttgcccacaaaagccaacgcggcaacatcctcttaaatggagaggacgagcgcacacacacaatgcagcacacacagacactcgcacgcatactcgggcagcaaagcgtccttgcaaaatacgcagacaaacagcgaaatgaaaggccagggctgtctttcagctttcacttttttttctcccccgtatttattcgcttcttttttgttgccgccacgtggcatatgaattacaactaattgaaagcataactcagccgtaatgagctaacgacaaatgtgcctggctgcacatcctgggcaaggttctttttaaagccttgctaaaaatatttctcatacgccatgtgggccagcccagcaacttgttgagtgcttcccgtctgttctcattagctgggcaacgccgtaagctgctctaagcttgctgaccagcctcatttatccggcacacaaaagcgggcatagccggacaatgcggtcggactggcggacaggtggactggcgaacggacacacaaacggacaggcggacggacatgcctaagtagccgggacattgggcgaggagaaatgaaaaatgtagctcaaggcactaagttgacaacgaaaagcgaaaggaaatgcgaaatgcgatggaaactttaagcttttggggaaagttttttttttgggtcgtggagctcagtgggaaatgctagcagctgttgacattgaatttgtttttcttgcttttccagcttggccgcttttccctcccaaaagaattcaactacactatgaatgtgcgttgatgcgtgctcttgtaaaatcttttgatttgatttgcggatttcggcacgttgccttttgtcctgctctcggttttcgtttgcctccgcttagtttactcttttaattttctgtttgtttttacttattacgagtacaatttacattcggttcaaccagagtatataccgccccgggcccggaattaattcaaattgtaaagcaagttgccttcttccccgctccacttccgttgcataaatttgtaaaggcttttaggccatgttttctggaaggcgtgtgcgtcgcgttgatgcgattgtgaaattcaatttttagtatcatctcgaaagtagtatatacagtatatatacagtatataaactcattgctatgtatgtaagcagcgacaaactttgccaattggcttggcaaacgtgtctgggctgcggtttgacttgttaaaattcagtatggcagctgaccttggctttaaggctaacgagagggcgacccaatctctgggaatgagttttcaattttccaagaaactctgtcgaccagctaatgttggaaaatagattttagttgcctacttttgagccaggcaggcagtccttgaaatcactcgaaaaaccacttgagcgcccttcagtttcgatgcatcgagcttgaatgcttttatttataacagcgccagagagattattatgcaaattccaatcgattgtgggaaaatcgtattgccaacggggaaaggctccgagcagcactcaaagatgatgccaaatatgcgcataaatttgactagacacgtgcataaacatcaacaggccatttgcgccattttcggcatattccgcatttcacccaaggcaatgtgccgtgagagcaactaacaatttaatcaagcgaacggacgatttgtggccaaggcacacgtgcagatagacacatgttcaggtagcgacaaagtgggtggggattttcttgagcaaaaaaaaaagttaaacggaaaatgcacgagctgagcggaaacaaggcgtaggaaatgccacggcgatgctcggaatcggaatcggaatcagaatcaggctcacatggctggcggtggcatccacgaaagtggaatacggactgtgtgaaaacatcaggtcgatggattaaatttgttggtctaaacagattgtagttgtgttctaccaaaaaaaatactccttcaatattcttaaattaaatgtcaaaaatttcccaagcatactttccagcatattttgcatttctaaatcgcatttaaactggcaaagctttaaaaactggcggaaaactttagaaaatgatttagaaccgaggagattccccctggcattgaagtgctataactttgacctcgactgtgcactcgaataaaatgcatgtgggatgtggtatgcaaatgcaaaacgggcaggtaaataaggagggctgacatgcggagccattcacgccccgccaatggacatttgatgcacttgaaagccttttgctgctgcgccaacaagtcagctgacagacggtggaggatgggctcctgacaggtaaacaccacccacgccacagagggctggatgaaagcgaaaggtgaaaaaggagactagaaaggcactagatgggcggagggtgtggcgggaatcaagtgaagcgtagaacagaaacacgctaacaagcaaaattatgcaaatcaaattatacgatgacaatgttaaggctgctggcggacaaggccacaaggccagcgtgagtgacactgacagcctgtgataaggctcctgctggccagtggatggaattggaggaagctagagaggaactggaggagcagcagcagcagccatagttgacttagcccagtcgaacgtcaataatgtggagaggaaatgtgtcacagaccggggacttgcacagcgaccgggaatcggaaggagcaccaggcacaagggtagcgaaaacaactagaaacacactgccaggaaatggtgctttaaagtgcattatacatacatacattccatgcatcagcaaaatcaggatcaaaatgattgacgcttttgcaatgtcaactagtagttgctgctttgaaaatcgatacgaattcacaatcactatgccatggccttacttttaagtactacatccttaatttgccgcagtgcagctttgggaatcgataaaaaccaatttccactcactcattccgcactcgtcgcagtgaggagcgcaatcaattacgagatttcccacatgaccgcccacccgcctcatccggcatcgtccgtagtctcatcttaccatcatgtcctcgggtatgtagaaatcggatacggctgcggctaggtagagcacggctcgctcctcgaaggcggccaggcactcgcaggcggcgcggagcagccacatgtagtccaccacgctggtgaagttcacgtacaggatcatctgcgtttcgcgggctatcttgtatttggccagcaccggagcaaacacgtccaccgaatccggtttgatggctatcgtcgaactctggctgttgtccgcaatgtccagcatgtcgaagaactgctggccggtgaagtggcgcgtgaagggctccagcgacttgtggcgatgcatgaaaatcacggcatagtcgtggtcgaggaagtattccgccgaggcggagccacgcgttccagcactaaaattgtccacaaaccgcaccgtattgtgctccaggggaactgtggtgccaccggactggaaatgttgaacaaattagggttcttttagaaaatattttggttcattttggtattttttctttgctcctatttaatattgattattctgtttcctaatcgttatgttgcaattaaagcaacttttaaattctattctctattaaattttcatgttcaaaaactggggttaaatgctcgtggtggttataccctttactcgtagagttgaaagggcatactagaatcgctgaaatctatgtccgtccatttgtccgtatttctgtccgtatgaacgctgtgatcctggtaactaccagatctgcaaaattaagtttagatatgcagattctaaccatttttactaatatcaaatataaatttttgatgttcttcttagtactgggtgtctgacagccgagtaactcgactagttttctcttgttttgtatcttcttatgtattttctcccctttaacatcctttcttataggcacaataacagttttgtgcaaatcattacaataatttcttataaaacaaattagaataaccaagtccctttcatgtaaaatccaatgacttagaacaaatccaagatatttggcagcatttagttattcaaatcaggcagataaatcagcaagttgaccataaatcttatagagagaaactaatgtgcctcgttgttaactatttgcgtaaatcatgttcggattaagctggccccagtgaataaacaccagttgacccacataatttcatatttaactttgagctttaggaggcgaatcaagtatttgcaagacttgcagatatttgcaatatatattatttacgcatagcagcattttaaagtggaaaacttaacttaaagtgaaacttaactaagattaaatttctaaaatgttaaattaaaaactaacaaaaaaaaggtgattttggttttttaaagtatgttaaaaaaacacttaacaacttttgttttctccattcacaaaatgctaattgtttatgcatgcgcccctgcatgtgtttaacatttacgaactttgttctagccaatttaaatttattcacttccacactttacacatttgtttttaatgccccaggcgctcggctcaaccatgaaagctttcaccagcttgggcagttaattaacggagtacagtggttatttagcgctaatcctaatcctaattcggatttggatcatcccagctcaccgtgacgaggacgatgcgattctggagcttgttgtgccgttcgcagaactccttgagcagggagcgattgtcctcgaagtccgcgggcggcaggtgcgtgttgtagaagtcctcccagtgcgtcatgttggcttatcctttacgcttgtttttgctttttctttgtcgacctgctgctaattggccgacaaacggaagctcgaaaatgaacggaaagttgccctcttccgccggaagctatgcactgccaattaataaatacagaatgtgcgaaatggcaaccaaaattaattaacacacgcactgcactattcggcgtactatcttaattgattgatttgcttttgctttgctttggtttggtttttttttgcagtttccgaaatgcgaagggcggaatatgcgtggcaggggggcggggcaggggctgcgggtggcgctgcttatcaatggaaccgttaaggggagcgcgcgcgagcgggagagcggaacggagcgctctgaaaaaccggagagagagagagcgaacgaaaatgctgaaaaacgcagctgtggaaatgcgatgcgatgtgcacggcagcaaggtccgcgggattctgaaccgaaaatgcgataggcagcgatggatggcggagcgggacgagcgggaatgtggacaggcgcactcaaatccgtatctttattcgcacgaaacctcggggttcaaagtgcaggccaaaaaaaaaaaacgcgttggccaggtaacagctgattgcagtgttggacagggacgaattggaggcattgctgactggttccggcgcatgcagcaaacttgttgcttgtcaagattaagtttttcatgtatcgttctaaggaagctatacaaaggtttcatttagctaataagtaagaaagaccaccacttctgcctagttatctgtcagccagaaggtgtttttgttgaatattcatatttgtgaactagttcttagtcttgtggtacccatgagctatctgagcaaagttggctgcgctttagatattatttcagtgttgttaattaagaaaacgcgcctaattcaaattcaaatttgagctataaatacctgtacgaaaacaaattatttcaatttttaaagggaaaccttttttattttagggttaagaaagaataaatgcataacaaataaaagcaatgtaattgttaactccaaaaataccttatactactgcattttattgggtgtgtaactcgttctttgtgtggctatttttaatttaatggcttacctgagtgtgttaagtgtaaacaaggcttgtgaagatttatatccaataaaactcaaaatgaatcaagtcagataacatgttttggttatttttaaattgcttattcatttataatccattaaataattccagtattttgaaaaccacagagtcttaagcagctgtgaaagaggtaacttgcaggaatttaccatcaacaaaataaagacgcctaagttaaatattcatttacatttacatatagtttttattatcgattagcaacgtgggttctatgcgtattgttagtgcaaggacgtacaaaagaatctctagaacaatatcacagaaacttactaactaattggtcttgtcaactgcgctgttagaaatcggcgtgacctttagcaacgccattagagtgtaattgggaagcggaatgcttttcagcttgtcgtggaaatttatggcatacattagacgat

SEQ ID NO: 41021 - DNA, 2160 bp, DROSOPHILA
ccaacgcgttttttttttttggcctgcactttgaaccccgaggtttcgtgcgaataaagatacggatttgagtgcgcctgtccacattcccgctcgtcccgctccgccatccatcgctgcctatcgcattttcggttcagaatcccgcggaccttgctgccgtgcacatcgcatcgcatttccacagctgcgtttttcagcattttcgttcgctctctctctctccggtttttcagagcgctccgttccgctctcccgctcgcgcgcgctccccttaacggttccattgataagcagcgccacccgcagcccctgccccgcccccctgccacgcatattccgcccttcgcatttcggaaactgcaaaaaaaaaccaaaccaaagcaaagcaaaagcaaatcaatcaattaagatagtacgccgaatagtgcagtgcgtgtgttaattaattttggttgccatttcgcacattctgtatttattaattggcagtgcatagcttccggcggaagagggcaactttccgttcattttcgagcttccgtttgtcggccaattagcagcaggtcgacaaagaaaaagcaaaaacaagcgtaaaggataagccaacatgacgcactgggaggacttctacaacacgcacctgccgcccgcggacttcgaggacaatcgctccctgctcaaggagttctgcgaacggcacaacaagctccagaatcgcatcgtcctcgtcacgtccggtggcaccacagttcccctggagcacaatacggtgcggtttgtggacaattttagtgctggaacgcgtggctccgcctcggcggaatacttcctcgaccacgactatgccgtgattttcatgcatcgccacaagtcgctggagcccttcacgcgccacttcaccggccagcagttcttcgacatgctggacattgcggacaacagccagagttcgacgatagccatcaaaccggattcggtggacgtgtttgctccggtgctggccaaatacaagatagcccgcgaaacgcagatgatcctgtacgtgaacttcaccagcgtggtggactacatgtggctgctccgcgccgcctgcgagtgcctggccgccttcgaggagcgagccgtgctctacctagccgcagccgtatccgatttctacatacccgaggacatgatgcccacccacaaaatgcaatcaggagatggagcgccgacgatttcgctgcagctggtgccaaaaatgctggcccccctcgccagtttgtgggtcccgcacgcctttgtggtgtcctttaaactggaaacggacgagagcctattgattgtgaaggcacgtgacagtctcaacaaatacaagcacaagctggtcattgccaatgtgctgcagacacgcaagcatcgcgtggtgttcgtcacgcccacagattcctacgagctgcatttgactcgcgaacagacgctgcaaggactcgagatcgaggagcccatcgtggccgatgtggtgcaaaagcacggcgagttcatcagtaacgctcaacagcgccaatgaccgttgtcgatgcgccggaggccacagacgcagcatcagcagcaccaccaccaacaactggccaccggtgacgaggacgaggatggcggcgatcttgatcgggatccatattgcgtgaccagctcgcattattgccgtgttctgaatccgggcacgccaggctttgcccgcaaatattgagcaggttatagtccatagtgtatactggcatgtggatgacagacatttacattcgattcatccttgcccttggactttgagttcccgccacaatttagctatctatttatggtcgcgcctcataattgaggtggcaccgctccattagtccattatcctgttgttattattattttggtattagttaatgtattggccctattgttgtcctgagaaatgatgtcacttgtatgtatccgccattcccttggctccttttcttatcttcctttgtctgccggcacgtttatgtcatcgagtatacgcagcgtgttgcgcagacatcaataagcgattttgatttatgtttgtgacagagcttatgatgcttatacatttaatgaagcatcgatcgatccggcgaactggaatttaaatcccaaaaaaaa

SEQ ID NO: 41022 - protein, 313 aa, DROSOPHILA
MTHWEDFYNTHLPPADFEDNRSLLKEFCERHNKLQNRIVLVTSGGTTVPLEHNTVRFVDNFSAGTRGSASAEYFLDHDYAVIFMHRHKSLEPFTRHFTGQQFFDMLDIADNSQSSTIAIKPDSVDVFAPVLAKYKIARETQMILYVNFTSVVDYMWLLRAACECLAAFEERAVLYLAAAVSDFYIPEDMMPTHKMQSGDGAPTISLQLVPKMLAPLASLWVPHAFVVSFKLETDESLLIVKARDSLNKYKHKLVIANVLQTRKHRVVFVTPTDSYELHLTREQTLQGLEIEEPIVADVVQKHGEFISNAQQRQ

SEQ ID NO: 41023 - DNA, 3077 bp, DROSOPHILA
taatatatagatatgtttatctaccaaatttcgccaggattttttgctgccttgccaacacttttgctaattagtcgagcaaatatttaagcgagggctgagtggaaaactttaaggctaatgcggctggcatttttcaccgatgaatttttgtgctcaaaaaacttttggctggctataaatcagctgctacccctgcccggccattcgctcttaacaattccattacaaaaattaaaagcaaatgcaaagataactttttccaacaagcctgggaaaaaatggcaagaaaatagttattaaatatttctttggctcaatcgccgagcgaacttttgcagcacctacacataaatgaaaagaaaaactcaccagccaaaaaagcaaccagaagttgatcctgataaagttttgtgtatatttttttctaccattctcgttagcttttttataaactcttataaacgtattaatttgtgtgattatcgccctagaacttaaaagagcaatgggttttacaaaggagattaccaatatattattccacaacaaaaagaattttgatatttattaagtgttttttttttttttgtttataaaaaagtaaaatatcttgtctacaggtttccttacaccgattgaataaaattctcagccaaaacttaggttcaacaacttcaactaatggctaatatatgcgcagactgaccaaacttcaaggttatctgaatgattaacgagttggactgatttggcaagtgaaataaactttccagacattagtagaaaacatggagagtggccaataaaattcgaatgatctcaatcattaaggaggctgtgtgaaaaaaggctaagctgaaatttctagcatatgcccacaactaaactcgtattcaaattgaacgtacataaattgttgaggtcatcagtgtagatataaaatttataaagtgtatgttttgttaacttaaattagtttagtacaaaattcacaaccatgagttcgcataagattaacctggagaatgcctaccagaagatgatagaacagaatatcaaaagtcagttggagaaaaatggaaccatggcggcactacggagcgaaatgcacgtgaagatcctccagatgatacgtggccagcagaataagtccaaagtccaagcactaactggtggatccaatcaatcggaggatcacagcctggtcaagctgatcaaccagatgattatggagttcctcgattggttcggctacaagcacaccatggaaacatttcgcatggagacgggtgaaaacgtggccaatcgcagggagatggaacaaagtctacacatcacacccgagtcaaaggattttccgctcctggctcaactagttatgcgcgattggaagttcggtgtgcaaaaaggaggttccaaaaagttggttcagctaccggatcctatggaggccactgtgcaaaggagtcgaaaattggtacaggaactaaaagttatgagagcacaaaaatcagaagttaaccaaggcagactagttcaaaacaatcgaaaactcatcactaataatacgttcacgaaaggtctcacacccaagagcattagtactccacctcgttcgatcaagaacgagaatccgaagtcatacgtagatagttctgaatccgatgtcctggaatcggattacagcgaagaagaatcggaggacagtgacgcatataaggacatacccgatagacagatatttatcgatgacttgccgccagagggaaaatatgccccaaattatggagaagaaggtccttttgagggtaaacaaaatcaggcaaatgaacgcgacaatattccgagcacatcgaggaagcaacatttttcaaggaagccagaaactgaaagttccgactctgatgataagccttcgatcagtggaataaataaagtttcaaggcaggactattggaattccccgcgaggagtgcaactacggaacaaaaataccttaaaaccggaggaagaatgtgatacccacataagaaaagtcaatttagacagcgattacagctcggatgaagattgatcaatgccagaagttccttatttttaaattagaaagtcaatttgtgtatgacagttgtcttggaaatttcttgcagctacactaataaacaatacattttgattggagcattttttttaatttttaaggatattaaggattcttaatgcgcatctcttacttgcgaaatatttagatatttactgccttgcctttcaattaattactgctggagtttactgctggttttctatttaatattcgaaacacaaaccacgaggttaacaattagttaactcgcctccgggtcaacggggctaagggtaaggaatgaccaaaatggcagtcaatgggggaccggcgaccattgtgttacatcattataattgaaatcaatatcccccagacgatggccacccccgatggaaagggggtggtggcatgaggtgcagtaatcgcgaatcggatgccgcctgtcaattcgattgcattaaaatggcgtgcgagtcttaacaccattaattacaacggcaatgagtcaatattatgacagttgcaactgtgaccccgacaacaaagcgaacacggtggtggccgaaaccaaagccggccgacaacatcctcaatcaattaattaggcctatcgggaatgtcgtcggaggtctctgaccctcttaagcaatccggtgtgcgattgattgattttatgcagatggatgaaacccgaaaagatgaatggcgaaaacagatattgttcaggtggggttttcaaaacaaagaggtaagtatttggaatgaacaatctattcacttttacaaataatctagttgcttaaattcctttcattttatggtaagaaaacttgctcgtaataatactaataccaatgattgcaatcacatcctttagtttgctctactctatccaaaccaaacggcaggcacttacatacaagcacccagtaaacgatggccaactggtgcctacatatatacggatatatacggatatacgcggaaa

SEQ ID NO: 41024 - DNA, 1077 bp, DROSOPHILA
atgagttcgcataagattaacctggagaatgcctaccagaagatgatagaacagaatatcaaaagtcagttggagaaaaatggaaccatggcggcactacggagcgaaatgcacgtgaagatcctccagatgatacgtggccagcagaataagtccaaagtccaagcactaactggtggatccaatcaatcggaggatcacagcctggtcaagctgatcaaccagatgattatggagttcctcgattggttcggctacaagcacaccatggaaacatttcgcatggagacgggtgaaaacgtggccaatcgcagggagatggaacaaagtctacacatcacacccgagtcaaaggattttccgctcctggctcaactagttatgcgcgattggaagttcggtgtgcaaaaaggaggttccaaaaagttggttcagctaccggatcctatggaggccactgtgcaaaggagtcgaaaattggtacaggaactaaaagttatgagagcacaaaaatcagaagttaaccaaggcagactagttcaaaacaatcgaaaactcatcactaataatacgttcacgaaaggtctcacacccaagagcattagtactccacctcgttcgatcaagaacgagaatccgaagtcatacgtagatagttctgaatccgatgtcctggaatcggattacagcgaagaagaatcggaggacagtgacgcatataaggacatacccgatagacagatatttatcgatgacttgccgccagagggaaaatatgccccaaattatggagaagaaggtccttttgagggtaaacaaaatcaggcaaatgaacgcgacaatattccgagcacatcgaggaagcaacatttttcaaggaagccagaaactgaaagttccgactctgatgataagccttcgatcagtggaataaataaagtttcaaggcaggactattggaattccccgcgaggagtgcaactacggaacaaaaataccttaaaaccggaggaagaatgtgatacccacataagaaaagtcaatttagacagcgattacagctcggatgaagattga

SEQ ID NO: 41025 - protein, 358 aa, DROSOPHILA
MSSHKINLENAYQKMIEQNIKSQLEKNGTMAALRSEMHVKILQMIRGQQNKSKVQALTGGSNQSEDHSLVKLINQMIMEFLDWFGYKHTMETFRMETGENVANRREMEQSLHITPESKDFPLLAQLVMRDWKFGVQKGGSKKLVQLPDPMEATVQRSRKLVQELKVMRAQKSEVNQGRLVQNNRKLITNNTFTKGLTPKSISTPPRSIKNENPKSYVDSSESDVLESDYSEEESEDSDAYKDIPDRQIFIDDLPPEGKYAPNYGEEGPFEGKQNQANERDNIPSTSRKQHFSRKPETESSDSDDKPSISGINKVSRQDYWNSPRGVQLRNKNTLKPEEECDTHIRKVNLDSDYSSDED

SEQ ID NO: 41026 - DNA, 3294 bp, DROSOPHILA
aactcgtccaactggagtatgcattggcggccgtatctggcggagctccctccgtgggcattataggttagcatgccgcacagccagtcagcctgtcagccagtactgtgcattcaactaacacactattatttatttttcttggctgtagcttccaacggcgtcgtcattgccacagagaacaaacacaagtcaccgctgtatgagcagcacagtgtacatcgcgtggagatgatctacaaccacatcggcatggtgtactcgggaatgggtccggactaccgcctgctggtcaagcaggcccgcaagatcgcccagacgtactacctgacctacaaggagccgattccagtgtcacagctggtgcagcgcgtggccacgctcatgcaggagtacactcagtccgggtaagtgtgcgcgcttttctcgactttgggttcccatagataatcgtatgcaatcccaccaacagtggcgttcgtccctttggcgtttccctactgatctgcggctgggacaatgatcgtccgtatctctaccaatccgatccttcgggcgcctacttcgcctggaaggccactgccatgggcaagaacgcagtgaacggcaaaactttcctggagaagcggtaagtaccaataatagtacaccaattaaagtcgcaagtcactcatattttcatcaacctgcagctacagcgaagatctggagctggacgacgctgttcacaccgccatccttacgctgaaagaaggttttgagggaaaaatgactgccgacaacattgagatcggaatctgcgatcagaacggattccagcgtctggaccccgcctcaatcaaggactacttggccagcatcccctaaacttaaacgccccgctaagattaccacaagctaagctttcttaataagtacgggacattaaaaaaccaataaaattttacaactggtgttatttgatattcagatttttataaataagccctttgtggtaaattcacttcgctccgatggcctcaacgtatccggcacaagtctctgggtcaaaaacgaacagattacggtgtggcgcctccaatttagtaaccaccttgatgacctcttgtgccacaacgccgccgacaacagcgaccgctggcgagatctgtgcaaaaatcagacctagagcttcgtcgcccagtatagagttgggcagcagttcgtcgcgaattccgcgaagcaattccaggtcagcttctcgggtcttgtagctgggatcccgcttgtgggttgtgcggaacttttgcaggacacttaatagcaaaacacccgggccattgcgcttcaattttcgcaaataactaggctcggtaacatcgaaatcaagccaggcagagtagccgggataatccacatcacgctgcgttggaatggacacggtttcatacttctttttcttctccgaattggctacgaccttgtgcttaataacatccctggaaaaaaggtggacattaagttagcaatgggcaatggtaggtagggaacctactcgacgtagctgtgcttctgcagactggcaaagtagaacccgaaggtgccccacacatcggtggctatgaacttgacgcccaggtcccggcaaatggtgtcaatgcgcaacagttcctcgttggtcgcgccattgaccaccacaacgtcgaactgaccgaagaactcagaggtcttctccttcaagggctcgcggtcggcggagatgtccaccatgggattgagagcacgtgcccgtgtcaatgatgcttcggcccggttggtgttcagcgattcacgggggacaaggaattgtgaacaaaagtcctcctcggttacgtccttgtcatccagcagcttcacggagttcactccggacaggatgatgttcttggttatctcggcgcccaggccgcacagtccagcgatgagaatcttggccgtgcgaaggcttaaatcgaaaatatattttagcgcattatagcgccattgcggaatgccggtttttttgcactcaccgtttctgagattccagaccccagagtcggatttgtctgtcgtacagctcgttctccgcctcagtgagctccacggctgtctcgctggtgtccatatccacgaccattatttatttatcaagtttaaaatgtatttttcacaacttaatacaaatttcttgcaacaactttcagtgagacgccgcaacaagaaactaacgccttttgaaaatgccaaaacgccttttgcagaatcagtgctgccaactgtttttgtacgtacagaataaaactaaataaagcacttaaaatctagcacttataattataatatttataattttctatactgtactatactatactatatactattctatagtttttataacatcctaacaacaaattgaggtgaatttattttgtaacttaccgccaagcaaaccaagctttaaaatagccaagtttagcgggaaaaagctaacacaataggattgccacaaaacggtggcagctctgtaagacaattactatcgaattgtttttacgaaatctgaccaatatttaattttccggtaagtctttaagcttgttgctctccattgtgaagaataattgattgccattttggcttagatcatgcttcgcaaatttggaggtctgttggcccagcaggtgggtcagcaagcacgtttcaccgccgcgagtcgcacattttcctcgacaaaagcgctgcacaaaggtatgtaagtcggcgaaaaagccggtgacataatttggacttatactgttgtaaccgttcaatcgctacagatccagcgacccaggaagcagaggcggcgccaccgaagaacatccttgtggaaaaggataagaacatcacgctgatcggcatcaatcgaccgcagcagcgtaatgccatcgattcgcttactgcatcgcagctttgcgacgccttcgccaatttcgaggcggacgacacgtcgccggtggccgtgctgtacggcgtgggcggctccttttgctccggcttcgacatcctggagattagcaccgacgagaaggaggagatcagcgtggacatcctgatgcgaccggagggctccgtgggtcccacgcgtcgccagatcaagaagccggtcgtgtgcggcatcaatggctactgcatagccaacggtctggagctggctctcatgtgcgatctgcgcgtgatggaggagtccgcagtactgggatttttcaatcgacgctttggagtgccaatgctcgatgccggcaccatccg

SEQ ID NO: 41027 - DNA, 1171 bp, DROSOPHILA
ctgtacgtacaaaaacagttggcagcactgattctgcaaaaggcgttttggcattttcaaaaggcgttagtttcttgttgcggcgtctcactgaaagttgttgcaagaaatttgtattaagttgtgaaaaatacattttaaacttgataaataaataatggtcgtggatatggacaccagcgagacagccgtggagctcactgaggcggagaacgagctgtacgacagacaaatccgactctggggtctggaatctcagaaacgccttcgcacggccaagattctcatcgctggactgtgcggcctgggcgccgagataaccaagaacatcatcctgtccggagtgaactccgtgaagctgctggatgacaaggacgtaaccgaggaggacttttgttcacaattccttgtcccccgtgaatcgctgaacaccaaccgggccgaagcatcattgacacgggcacgtgctctcaatcccatggtggacatctccgccgaccgcgagcccttgaaggagaagacctctgagttcttcggtcagttcgacgttgtggtggtcaatggcgcgaccaacgaggaactgttgcgcattgacaccatttgccgggacctgggcgtcaagttcatagccaccgatgtgtggggcaccttcgggttctactttgccagtctgcagaagcacagctacgtcgaggatgttattaagcacaaggtcgtagccaattcggagaagaaaaagaagtatgaaaccgtgtccattccaacgcagcgtgatgtggattatcccggctactctgcctggcttgatttcgatgttaccgagcctagttatttgcgaaaattgaagcgcaatggcccgggtgttttgctattaagtgtcctgcaaaagttccgcacaacccacaagcgggatcccagctacaagacccgagaagctgacctggaattgcttcgcggaattcgcgacgaactgctgcccaactctatactgggcgacgaagctctaggtctgatttttgcacagatctcgccagcggtcgctgttgtcggcggcgttgtggcacaagaggtcatcaaggtggttactaaattggaggcgccacaccgtaatctgttcgtttttgacccagagacttgtgccggatacgttgaggccatcggagcgaagtga

SEQ ID NO: 41028 - protein, 337 aa, DROSOPHILA
MVVDMDTSETAVELTEAENELYDRQIRLWGLESQKRLRTAKILIAGLCGLGAEITKNIILSGVNSVKLLDDKDVTEEDFCSQFLVPRESLNTNRAEASLTRARALNPMVDISADREPLKEKTSEFFGQFDVVVVNGATNEELLRIDTICRDLGVKFIATDVWGTFGFYFASLQKHSYVEDVIKHKVVANSEKKKKYETVSIPTQRDVDYPGYSAWLDFDVTEPSYLRKLKRNGPGVLLLSVLQKFRTTHKRDPSYKTREADLELLRGIRDELLPNSILGDEALGLIFAQISPAVAVVGGVVAQEVIKVVTKLEAPHRNLFVFDPETCAGYVEAIGAK

SEQ ID NO: 41029 - DNA, 2660 bp, DROSOPHILA
tgcggccaaaatatgtcagactgcaaatcaaaatggcagacaggactgacaaataaaccagacgagtgcagcagatggagatacatttcagacagcaggacattcagacatttgccagtgattgcagcaaggattccgtttcaatgccaaaaattcagaaggtaagtaagtgcagcataggccgtctgtcatgaatgagtgcctgatggttggatatggatggctaacccccacatcccggcaaactcattaacaagttggcacataaaagcccaacaactactcggcggtaacccaaagaagtcaatgccttggcgacaagctgccgcatcagcagccgcaactaatggctgccagacttgtgtcggtttaggagttctcagaccacagttctcagttctcaagactcaggactcacatctcagaacccagacctccaacttccccggtttctcaaagttctttttcggcaaggccaaggcaaatacttggcggctgtgtgcaagttttattaaaagccaacagtcggcgacatcctgcaagcggttggccaaagttggaggttttgggcgaagggacacggtttgataaatacagccaaaattattgcggcactaaatacaggggagattcccaacataatccagcaatgttgtaaataaaagtcctcatcccattcctccaacactatgttttaggaagattgtaataatcctaaattatggatcagtttagttcgggaaaaaaagtacccacaatgcaatagttcaccacagccaataaccactttatttgcaatccaagaggcaagtaccgcgaaaattatggctcacatgtgttgccagtcgcaaactactcattggaactgcggatttctggagcgacgccggcagtcgaagaacagacggaggaagttctgatttcctttgccaagatggagttccaagtcgaaattaccagcaggagtggctcggagtgggctgggcacatcctgcattccctaactctgcaaatgatcctcacagcaggccgtatgggtggcatagcaacggcactggccagtgggacagcagcactgcctcaggatggaggtgctgtaggggaacacgatgatcttccactgctggtcaagttccagggtctcgtagtgataacctcgcttgtagaccaccatgggcgtgtggtccaagtagtggggcataatctccatcaggcaggcatccatgcagttcacaaagaactgcacacaattgatgagcttggccaagatgtagacacctgtgatggtctcatcgaagaagtaaaccgcatcgaatttgggcgtctccttgccaaagatcagcgccacctcccgcatgctactgaaggtgtgcagggtggtacatcccgagggtccgctgggaaagaacaagtgggtgacgcctcccgtcaccaagatgggactggcgcaggccggagcatcggccacatcggccagaatatatttcactggtcgcaacccatactttagctcattgacggctcttatgaaattcggatgattggccacatgtggctttagctgcctgaaccgactcctcaccctctcgatgaactcgtcccggatcgaatgatgcactgccacggtggccatgggaaatggctgaaacggctcgtgcatcaattcggccaaacaatatgcagccgtattcaagtctccctccttacaaacgcacataaatcgcgctccgggccaggctcttgtctttttcatgaggtgccgctaatcggaattcaaacatttggaatagggaaagctttttgggtaggaaaatctcttcgaacttacaaccttcggactgcgcttattgcaacgcagattgtgcaccagatcgtgtgtcacgaaattttgctttatttcacacatatttggtcagtttaatcacaactagtattcacaataaatttagaaacaaatattgactttaaaatcttaaaaacatattttcaaaaagtaaaaatcttcaaacttgaggataaatgatgtacaacgctaccaaaccaagaaaacagctttataccatggcaacaaatatgtcttatgatgctccgataccagatagtacatataaattgcaatcaaactggggaataagcggcgaatttaatatgcaaaattgtggaagccgtccaaattgagcaatcaaaagttctgggaaattaactcccaaagctgggagcttccacactttggaacgcctgcttttgggcgaagtcaagtccctttcttcataatgtatatcgcatactcacttatggcgaaaagttaatggaaccaaggaaaggcgggatttccatagaataaaccagcattttcgcaggcacagacacacaaacaactatggaaaacaaatcaagcgcaaagtaaacccagccgagaaaaaataacattttggcgcgataagaaacttgctcagacttttcacaaggaatgcaaagacatatatatatgagaaaaatagagtgggaaaggcagcagccaggtccttaaggatggaaagacaatgctaatgccatttgctcaagtgccatcatcggaggcaaacttgtgtcatataaagtctaaacaaaggtaataaacaagttagtctttgtttttgtgcgctagcaaagggtacttt

SEQ ID NO: 41030 - DNA, 660 bp, DROSOPHILA
atgcacgagccgtttcagccatttcccatggccaccgtggcagtgcatcattcgatccgggacgagttcatcgagagggtgaggagtcggttcaggcagctaaagccacatgtggccaatcatccgaatttcataagagccgtcaatgagctaaagtatgggttgcgaccagtgaaatatattctggccgatgtggccgatgctccggcctgcgccagtcccatcttggtgacgggaggcgtcacccacttgttctttcccagcggaccctcgggatgtaccaccctgcacaccttcagtagcatgcgggaggtggcgctgatctttggcaaggagacgcccaaattcgatgcggtttacttcttcgatgagaccatcacaggtgtctacatcttggccaagctcatcaattgtgtgcagttctttgtgaactgcatggatgcctgcctgatggagattatgccccactacttggaccacacgcccatggtggtctacaagcgaggttatcactacgagaccctggaacttgaccagcagtggaagatcatcgtgttcccctacagcacctccatcctgaggcagtgctgctgtcccactggccagtgccgttgctatgccacccatacggcctgctgtgaggatcatttgcagagttag

SEQ ID NO: 41031 - protein, 219 aa, DROSOPHILA
MHEPFQPFPMATVAVHHSIRDEFIERVRSRFRQLKPHVANHPNFIRAVNELKYGLRPVKYILADVADAPACASPILVTGGVTHLFFPSGPSGCTTLHTFSSMREVALIFGKETPKFDAVYFFDETITGVYILAKLINCVQFFVNCMDACLMEIMPHYLDHTPMVVYKRGYHYETLELDQQWKIIVFPYSTSILRQCCCPTGQCRCYATHTACCEDHLQS

SEQ ID NO: 41032 - DNA, 4045 bp, DROSOPHILA
gcctcctcacggaactttcggatattgtccttgatctccttgttcttatccatctccgccttcatgttgtcgaagaactgcgagaagaagccggccctgcgacctggcgcactataaaagcggggctgcggagtaaagtcatgacttaggccggttgcgccatggggttttatgagccaaactctaacctgctgctgctgcaggttctgcgaggcctgctggcacgtgaagagacaggcgcgatcccgcacaagggcagctattctgtactgcaaggagaaaaaatcattgaaagcttcgaccgttttaacctcgaaatatgcacatgtaaggacggatgtgagcgaacgccagtgatgaccgggatcagaggtaacctaccatggtggggattaggtgaccgttcgcaggtagtttgatcggagcgaatgttcggggggtctggcgtcagaggctctaaactttatgtaattcctgccgcgaaacacgcacgtatcaagcagtcagctgttctcttcgttcagcgcgcgccggtgttgcaaaacgagcgctcttcgccggcggtggctcgtgcgatagttcgttttgtcggtaatccgatgttgccgcgccgatatcatgtgatgttgtcacagtgcgcgaaattcgaatggtggtgtgcagtgattgtgttgtgacggcgagtggcgcgtgtgggtgcttagttttgggagatgttttcgtatttttttgttgataactcaggctttgttgctgtgttgtagtactattttccattgcgcggtgtccagcttttaattagtggcacatattcttagcaagtaaaaattattttgcatactattaaatttcttataaattattttctaaaattaagtttaccttttcaattttactaaaaatatcgatatatttattatcgctggaaaactacattattccacctctaagcaagaaccgttagttggcgcgtagctttaccacaaaattcctggaattgccgtacgcttcgcagttgtttcaagttgtctaagggacatacgattttttttgcctctgcgtcacgattttaacccaaaagcgagtttagttacatgtacattattattagataaagaagtatcgcgaatacttcagttgaataaactgtgcttggtttttgggtgaggatttgtggaaagtagagtgcgcgataaccgtaactttcgacccggattttcgccatgttccgcagcaacttggagggcagtggcgcagcagcagtaggtgttgcaaatcccccctcgttggctcagtctggaaagattttccaattgcaggataacttttctgcttttcacgccagaggagggctcaacattctgggcctgcaggacatgtatttggataccagtggggccaactcgtcggccactttgagtccgcccattacgccggtgacccctgacccgtcgacgtctgcgcagtcgacgcacttcccttttctggccgacagcgcagccaccgccaattcgctccttatgcagcgacagtaccactaccacttgctgctccagcagcagcagcaactggccatggcgcagcaccaattggcgctggctgcatcagcggcagcggctagtgcgagtcaccagcaaacggacgagattgcgcgatccttgaaaatctttgcgcaggtgacgacgggcgcagcaggtaagaagaaatggcgaatatggcgtcgtttaaaacagaatagccaaaaacagtgcgcgggagcgagatgactatctgtacaagtacagttatgccaaagtcaatggccatgggcttagttaaaggggcaacgaaagcacagagcaaaacagaagtaaaattgtgtaaatgtataattgctgcagaggtcagaggattttcgccatttagtgtagtatattttttattttactattttgtatgtgctttaaaatatatctttgcccaacacttgtatccccttcaagaggtttttcgagcgcccctgaattttcggccattgaccttagcattttcgctattcctttttgttttaacttcggaaagccattttgcgtcttacattttctagaagttctttgctttttctcgtctgttcttgttttttttttgtatgcaaaaactaatccgtatttgcttattacatttctgaaatgcaattgaaacgcgaataataaaaaaaatacgttcaggacaaggtaatgaaaagcttgctattcccagaaaatgcggctggctcgatgcaggatgtgatgcaggagttcgcgaccaatggctatgccagcgatgatctcggtcgcatgtcctacgggagtgctccgccacaggtgcaaatgccaccgcagcagcagcatcagcaacagcaggggctgcacctgccactgggccgcaatcctgcccagctgcagaccaatggcggcaacttaatgcccattccactcgccacccactggctgaacaactaccgggagcatctgaacaacgtgtggcgaaacatgtcgtatataccagccgctcccaatacaatgggtttgcaggcccaaacagcggccactgtgtccaccaatctcggcgtgggaatgggtctgggattgcccgtgcagggcgaacagctgcgcggagcttccaattccagtaacaataataacaacaacaacaaggtgtacaagcgttacaacagcaaggccaaagaggtgagtggatctgatccaggattcgcagaattaaaacttgcaaaatatatttgttatcttgtttctccaacagatcagccgccactgcgtcttttgtgagaataacaacgaaccagaggcggttatcaatagccactcagtgcgagataactttaaccgagtgctgtgccccaaactacgcacctacgtgtgccccatctgcggggcatctggggactcggcgcacacgattaagtactgccccaagaagccgatcatcaccatggaggatgcgatcaaggcggaatcgttccgcctagccaagagcagttactacaagcaacagatgaaggtttagagagggcgaatccagctctggagcagaggctctggcagcttttgcagcgtttatataacatgaaatatatatacgcattccgatcaaagctgggttaaccagatagatagatagtaacgtttaaatagcgcctggcgcgttcgattttaaagagatttagagcgttatcccgtgcctatagatcttatagtatagacaacgaacgatcactcaaatccaagtcaataattcaagaatttatgtctgtttctgtgaaagggaaactaattttgttaaagaagacttacaatatcgtaatacttgttcaatcgtcgtggccgatagaaatatcttacaatccgaaagttgatgaatggaattggtctgcaactggtcgccttcatttcgtaaaatgttcgcttgcggccgaaaaatttcgatatatctacaattgatctacaatctttactaaattttgaaaaaggaacactttgaatttcgaactgtcaatcgtatcattagaatttaatctaaatttaaatcttgctaaaggaaatagcaaggaacactttcgtcgtcggctacgcattcattgtaaaattttaaattttgacattccgcactttttgatagataagcgaagagtatttttattacatgtatcgcaagtattcatttcaacacacatatctatatatatatatatatatatatatatatatatatatatatatgttatatatttattcaattttgtttaccattgatcaatttttcacacatgaaacaaccgccagcattatataatttttttatttttttaaaaaatgtgtacacatattctgaaaatgaaaaattcaatggctcgagtgccaaataaagaaatggttacaatttaaggaaacaaatgtccttcttgcgtttgaaacaactaatccttttcgccctcgcggcgtttctcgaaaagggccaggaagatgccatcggtaagatcactgtccggctggcaatacaggacgtt

SEQ ID NO: 41033 - DNA, 1429 bp, DROSOPHILA
ccgtacgcttcgcagttgtttcaagttgtctaagggacatacgattttttttgcctctgcgtcacgattttaacccaaaagcgagtttagttacatgtacattattattagataaagaagtatcgcgaatacttcagttgaataaactgtgcttggtttttgggtgaggatttgtggaaagtagagtgcgcgataaccgtaactttcgacccggattttcgccatgttccgcagcaacttggagggcagtggcgcagcagcagtaggtgttgcaaatcccccctcgttggctcagtctggaaagattttccaattgcaggataacttttctgcttttcacgccagaggagggctcaacattctgggcctgcaggacatgtatttggataccagtggggccaactcgtcggccactttgagtccgcccattacgccggtgacccctgacccgtcgacgtctgcgcagtcgacgcacttcccttttctggccgacagcgcagccaccgccaattcgctccttatgcagcgacagtaccactaccacttgctgctccagcagcagcagcaactggccatggcgcagcaccaattggcgctggctgcatcagcggcagcggctagtgcgagtcaccagcaaacggacgagattgcgcgatccttgaaaatctttgcgcaggtgacgacgggcgcagcagaaaatgcggctggctcgatgcaggatgtgatgcaggagttcgcgaccaatggctatgccagcgatgatctcggtcgcatgtcctacgggagtgctccgccacaggtgcaaatgccaccgcagcagcagcatcagcaacagcaggggctgcacctgccactgggccgcaatcctgcccagctgcagaccaatggcggcaacttaatgcccattccactcgccacccactggctgaacaactaccgggagcatctgaacaacgtgtggcgaaacatgtcgtatataccagccgctcccaatacaatgggtttgcaggcccaaacagcggccactgtgtccaccaatctcggcgtgggaatgggtctgggattgcccgtgcagggcgaacagctgcgcggagcttccaattccagtaacaataataacaacaacaacaaggtgtacaagcgttacaacagcaaggccaaagagatcagccgccactgcgtcttttgtgagaataacaacgaaccagaggcggttatcaatagccactcagtgcgagataactttaaccgagtgctgtgccccaaactacgcacctacgtgtgccccatctgcggggcatctggggactcggcgcacacgattaagtactgccccaagaagccgatcatcaccatggaggatgcgatcaaggcggaatcgttccgcctagccaagagcagttactacaagcaacagatgaaggtttag

SEQ ID NO: 41034 - protein, 401 aa, DROSOPHILA
MFRSNLEGSGAAAVGVANPPSLAQSGKIFQLQDNFSAFHARGGLNILGLQDMYLDTSGANSSATLSPPITPVTPDPSTSAQSTHFPFLADSAATANSLLMQRQYHYHLLLQQQQQLAMAQHQLALAASAAAASASHQQTDEIARSLKIFAQVTTGAAENAAGSMQDVMQEFATNGYASDDLGRMSYGSAPPQVQMPPQQQHQQQQGLHLPLGRNPAQLQTNGGNLMPIPLATHWLNNYREHLNNVWRNMSYIPAAPNTMGLQAQTAATVSTNLGVGMGLGLPVQGEQLRGASNSSNNNNNNNKVYKRYNSKAKEISRHCVFCENNNEPEAVINSHSVRDNFNRVLCPKLRTYVCPICGASGDSAHTIKYCPKKPIITMEDAIKAESFRLAKSSYYKQQMKV

SEQ ID NO: 41035 - DNA, 3375 bp, DROSOPHILA
cagctgcaggcccactgcaaggagttaaatgtggactttacggcttccgccatggatgaggttgatattaattaattgttaaccaattactactactaacaattccttttttcccttgtttcttgcttaaatagttattaatgtgtgtatatgctattttaaacagagatcgttggagttcctttctgctctaaatgttcccttcatcaaaattggttccggagacgcaaacaactttccgcttctcaaaaaggccgccaatttgaacttgcccctggtgatctccaccggaatgcagactatgcaaactgtggagaggattgtgcaaactatgcgggagtcaggaaaagaggactacgctctaatgcactgcgtttcatcgtacccaactgacccaaaagattgcagcttgcagttgatatccgtcttaaggacacgctttcccaatgtggcaattgggtactcgggtcatgagctgggagtgatcattagccaggccgccgtcttgctgggagcacgcatagtggagcgccactttacgctggacaagagtcagaagggctccgatcatcgctgctccctagagccgcaagaattaaaagctctgactacagccatcaccaacttcaaactctcttcagttcccatgcctccacaagaaatagttaaaaagttaaatggagatgaggaactagaggcagctcttcagcacgttgagtctaaaaccattttgccgtgcgagctgccctgccgaaataaactgggcaaatctattgtggcagctaggaatctcaataagggttacaggttgcaattggcagatatggccattaaagtcagtgaacccagcggcctgacagcggaggatttcttggacttggtaggcaaggaattggcagacaatattggtgaggatgaacccatacttgggaatagtataatcaattgaatcatgggttgggaatttaaatacacttgtaaatgaatagcttggtctgtattactcggcgccatcgtcgctgccctcttcttcgttctcattctcgatcatgtcgatgtcctcctcgaggtcgccctccttcttgtccgttggcttctcgtagacagcggtcagcggggaaatgcacacgccgttccagacggacatttcgcgcacaacgctggtgttgccctccagtcccaaaatgtgtttgtatccgccgtgggccagcacgcgcagtagtgtctgcgatgtgtagcagcacacatcctgctgctccaatgtcatggcagtgtgcacacggatgtgtcccggctcggtgggatccgtgatgccggccgagcccggcaggaagagcccggcggagagtagctgaaagacgcgacggaaggccaggttgatgggcagtgcctgtcgcgacgggttgttcatgatggccaaatgggcgatcaggtccagcatccaggccgacagcggcgaaaaagcgtcgaaacgcctagtgagatccttgagaatgcgaatgagcacctttatcgaggagtggtgggcattttcctcaaaccagcgcgtgtgccgaatggcagccagatggctctgcatcagtttgtgatccaaatggatctcaggctccagcttgcgaagattctgcggcaaggtggcgatcagaatgcgcaccttggcatgcacgttggcgatgtcgaagccccgctcatggatctgtacggtgtgctgatcgcccttggtcagaacttcagtcttcatgctggccttcaggtcggcctccacttttttggccagcgcatcgacggcctccttggtgggcagggttttgaggataaccaccacatcggctacattgttgcccgtcagtatggtgcccttcttgaaggagccaacctgacgcacttcctccagttgctgtggaataatcagaacagtttaaacatgcaaatcacaaggagttgtgtaatgtactcacacaagttgtcagatccccgggtgcaaccaccagattgtcgagaacagcctgcaccttggtcactagattgccaatagccgtctgctcgctgggagtgggactcaggtcctggttacgcttcagcagcgcctgaaatgcaattgttttcccattgcagacaccttggatacgcaagtaatttattgatttaccgcagtcaaagcagaatcgtcaacggcgccggcggatggaactttgggaaagaagacctccgcgagggtcagatcgaaggggtggcgcggcacgaatgtctttttgaacggcggacgtatgccgccgcgcatggggcggccacctcggagagctccgcgaaccatattcctgtggggatgaatttttaataattttcgcaacgccggagcgttctgttttttttaacagataggtaaacagtgtgaccgaagctggaccggtaaggaaacgacatcaaagatgggctaagcgcgttttcaaagtataccgcataaaatatttttagagggcaaacattttgaacatttaaacattttactacattagaatgcataaattgattgaattaaaatacggagactggtgtttttaatctgcataattttgtagttgtagctagtgcaacaaggtttctatcagttccaggaaaacgctttgtttacaagcaaagtgctgatttttatgttgatggtcttacccttttgttgtacaaaattccggtgctaaaatcggattaaaagcgcatgaagttattcgtaagtagttgaaaatcgcactagagatgaatcctaatgtttatagttttcagaactatggatctggcgaacgtagatcaacgccccgtgaaggacgaaccacctcaagaagacactttcgaagaagaattaatcttcatttctaacagcgacttcgaagagcttgaaagcgaaataaagattgagaacttctgtagttatggcaaagatttggagccagttaaaggcgtcccgtcgaagctgaagacgtgtaaatccaaaatagcaaagaagcgccccttgcgaaagcaaacagatacgtttaagtgtacccaatgccaaaagacgtttacaagaaaggaaaacctcgaatcacacttgcgacttcacgcagaagaacgtccgttcgagtgttcccactgctccaagagctttggacgcaggacgcattacaagcgacacttgctcaaacacgaaaagcgacctcataagtgttcccactgctcaaaaacctttacccagaattcatcgcttaaacaacatctgcatgagcacacaggagagcgcccctttaagtgtacccagtgctcgacgtcgttcgcgcgaaaatctcatcttcaggtacacttacgtacgcatagtgaagaacgaccctttgagtgtacccattg

SEQ ID NO: 41036 - DNA, 1252 bp, DROSOPHILA
ttaaaaaaaacagaacgctccggcgttgcgaaaattattaaaaattcatccccacaggaatatggttcgcggagctctccgaggtggccgccccatgcgcggcggcatacgtccgccgttcaaaaagacattcgtgccgcgccaccccttcgatctgaccctcgcggaggtcttctttcccaaagttccatccgccggcgccgttgacgattctgctttgactgcggcgctgctgaagcgtaaccaggacctgagtcccactcccagcgagcagacggctattggcaatctagtgaccaaggtgcaggctgttctcgacaatctggtggttgcacccggggatctgacaacttgtcaactggaggaagtgcgtcaggttggctccttcaagaagggcaccatactgacgggcaacaatgtagccgatgtggtggttatcctcaaaaccctgcccaccaaggaggccgtcgatgcgctggccaaaaaagtggaggccgacctgaaggccagcatgaagactgaagttctgaccaagggcgatcagcacaccgtacagatccatgagcggggcttcgacatcgccaacgtgcatgccaaggtgcgcattctgatcgccaccttgccgcagaatcttcgcaagctggagcctgagatccatttggatcacaaactgatgcagagccatctggctgccattcggcacacgcgctggtttgaggaaaatgcccaccactcctcgataaaggtgctcattcgcattctcaaggatctcactaggcgtttcgacgctttttcgccgctgtcggcctggatgctggacctgatcgcccatttggccatcatgaacaacccgtcgcgacaggcactgcccatcaacctggccttccgtcgcgtctttcagctactctccgccgggctcttcctgccgggctcggccggcatcacggatcccaccgagccgggacacatccgtgtgcacactgccatgacattggagcagcaggatgtgtgctgctacacatcgcagacactactgcgcgtgctggcccacggcggatacaaacacattttgggactggagggcaacaccagcgttgtgcgcgaaatgtccgtctggaacggcgtgtgcatttccccgctgaccgctgtctacgagaagccaacggacaagaaggagggcgacctcgaggaggacatcgacatgatcgagaatgagaacgaagaagagggcagcgacgatggcgccgagtaa

SEQ ID NO: 41037 - protein, 396 aa, DROSOPHILA
MVRGALRGGRPMRGGIRPPFKKTFVPRHPFDLTLAEVFFPKVPSAGAVDDSALTAALLKRNQDLSPTPSEQTAIGNLVTKVQAVLDNLVVAPGDLTTCQLEEVRQVGSFKKGTILTGNNVADVVVILKTLPTKEAVDALAKKVEADLKASMKTEVLTKGDQHTVQIHERGFDIANVHAKVRILIATLPQNLRKLEPEIHLDHKLMQSHLAAIRHTRWFEENAHHSSIKVLIRILKDLTRRFDAFSPLSAWMLDLIAHLAIMNNPSRQALPINLAFRRVFQLLSAGLFLPGSAGITDPTEPGHIRVHTAMTLEQQDVCCYTSQTLLRVLAHGGYKHILGLEGNTSVVREMSVWNGVCISPLTAVYEKPTDKKEGDLEEDIDMIENENEEEGSDDGAE

SEQ ID NO: 41038 - DNA, 3313 bp, DROSOPHILA
ttgccggcctcgagcgggcgaattcgttttcctggaatccgcacaaaaccatcggcgctccattgcagtgttcactctttttgaccagggaatctggccgtctgctggaaagatgcaacagcaccgaggcgcactatttgttccagcaggacaagttctatgatgtatcctacgatacgggaaacaagagtgtccagtgcggccgcaagatcgacgctttcaagttctggctaatgcttaaggctcgcggatatggaaagtatggactcatggtggaccacgccatccacatcgccaggttgctggaaggcaagctgcgccagcgtggagatcgctttagactggtgatcccggagcacgagtactccaatgtctgcttttggttcattccgaaagcaatgagggtgtccagcgaggaggagacgcctgaatggtggagtcgactttacactgtaagtgaataacaatggctttgatagaccatttaagctcacatttttatatgctcctttaaaggtggccccgaaaattaaggagcaaatggcccacagcggcactttgatgattggttactcgcctcttaaagctaaaaatctgggcaacttctttcgcatggtcttcacttgttttcccatcctgaaaagcaaagagttggacttcattttggacgaaattgagagattgggcgagaaaattgtgctttgaattattttctatgtgaattaagctaattaatggaaatcgttcaattgtacatttcattgtagttattactttgtgataaaaaatacgcctttattatgtaaactcggcttaatctctattttgaatatttaaataaaaatctttcaagaaatgaatattaagttttttaaattcattttctaccgctatcaacaaataatattagcctggtcacacgaacatcccccagcagtaactatcgataaaagtgttcacgggtattgttgttataccccagcgcggtcatacctttacgtgagatcaaaacaataagtttttgttgagaaattatttgtaaaaccacgcacataaaaagacgctacgatgggtcgcgccgaggtaggtacgcccaagtacctcgccaacaagatgaaatcgaagggtctgcagaagctgcgctggtactgccagatgtgcgagaagcagtgccgcgatgaaaacggcttcaagtgccacacgatgagcgagtcccaccagcgccagttgctcctctttgcggacaatcctggcaaattcctgcacagcttcagcaaagagttctccgacggctacatggagttgctgcgccggcggttcggcacgaagcgaaccagcgccaacaagatctaccaggagtacattgcccacaaggagcacatccacatgaacgccacccgatggctcaccctgtccgactacgtgaagtggctgggccggactgggcaagtgatagcggatgagacggagaagggctggttcgtcacctacattgatcgcagtccagaggccatggaacgacaggcgaaggctgatcgcaaggagaagatggagaaggacgacgaggagcggatggccgacttcattgagcagcagattaaaaatgccaaggccaaggacggcgaggaggacgaaggccaggagaagttcaccgagctaaagcgcgaagagaacgaaccactcaagcttgatattcgccttgagaaaaagttccagcctgacactgtgctagggaaatccgctctagccaagcgacctgcccctgaagctgaagaaaaggtgttcaagaaacccaaatccgtggctggagacagccaaacgcggtcggtgctggacgagatcatcaagcaggaggaaagcaaaaaggagcgtgccaaccgcaaggactactggctgcacaagggtatcgtggtcaaatttatttccaaatccatgggcgaaaagttcttcaaacaaaaagcggttgtcctggacgtaattgacagatatcagggcaaaatcaagttcttggagactggggaaaagctaaaagtggatcaagtaagatggaaacccaattttaatctataacggatatttacccaggtgtttttatttttttttgttttccaggctcatttggagacggtaatccccgctttggacaagcctgtcatggtggttaatggcgcttatcggggatccgaggctctgctaaggaaactggacgagcgcagatattcagtcagcgtggaaatattgcacggtcctctcaaaggcagaattgtagacaacgtgcaatacgaagatatatctaaactacatggcgcctagctgcgcttttctaagttaaattctatagttgtacctttttatgcctaatttgatatatatgtaagtaaaaaatcttaaccatttcggagaaaggctgaaatcgaactagacaaaaatctgcacataatacgttcgttacttaaatttggactgctcagcatttgggttaataaaacatgactttttaatgaaaataactagaacactctcatttactcagtgtacgaatatttcagtgggtatgcaaacaatattttcgagttcagtttgggaacaataaaaccagcgaacaatggccgctttactagcgataatttctatacttgcaaaacttaaactagttccagcatcggtgtgctaaagaagggatatgaggattctgtgtggcattgttatcctattacgcctcggagcattgggagatatagctgttgacgaagagggaaggttgacgcgaagctggtgggatgcagtgcctagacttttaactgacatcgccaccattaaggcgaacatactcacagctgctccacttgaattggcttccaacataattgatgctgtgtgtaaggataacgtcctgtgtttatcaacatataaaaagttatttgattttattgtgatctaaatgccaggttcttccaccctctttatggacagaatccctgcgcaaatcactccggacataaggaagatgcattttcagtacatgacgccgtgccagaactacagtgtgcccctgctggaggcctcgaagctgtggaagcactctcgattcagcaagggacgtaaggtggtaattctggccaccggatggaccaacaccgtaaacgaatcctcggccatttcgatgatctctaaggcattcatgtgtcgtggcgatgtgaattttgtggttcgtctcgtgaatcaattctgaaagttcatatctaaggcttccatctcagattgtagatgcggctgactatgtggacaccttctacgcgtggtcggcgctgaa

SEQ ID NO: 41039 - DNA, 1241 bp, DROSOPHILA
tgagatcaaaacaataagtttttgttgagaaattatttgtaaaaccacgcacataaaaagacgctacgatgggtcgcgccgaggtaggtacgcccaagtacctcgccaacaagatgaaatcgaagggtctgcagaagctgcgctggtactgccagatgtgcgagaagcagtgccgcgatgaaaacggcttcaagtgccacacgatgagcgagtcccaccagcgccagttgctcctctttgcggacaatcctggcaaattcctgcacagcttcagcaaagagttctccgacggctacatggagttgctgcgccggcggttcggcacgaagcgaaccagcgccaacaagatctaccaggagtacattgcccacaaggagcacatccacatgaacgccacccgatggctcaccctgtccgactacgtgaagtggctgggccggactgggcaagtgatagcggatgagacggagaagggctggttcgtcacctacattgatcgcagtccagaggccatggaacgacaggcgaaggctgatcgcaaggagaagatggagaaggacgacgaggagcggatggccgacttcattgagcagcagattaaaaatgccaaggccaaggacggcgaggaggacgaaggccaggagaagttcaccgagctaaagcgcgaagagaacgaaccactcaagcttgatattcgccttgagaaaaagttccagcctgacactgtgctagggaaatccgctctagccaagcgacctgcccctgaagctgaagaaaaggtgttcaagaaacccaaatccgtggctggagacagccaaacgcggtcggtgctggacgagatcatcaagcaggaggaaagcaaaaaggagcgtgccaaccgcaaggactactggctgcacaagggtatcgtggtcaaatttatttccaaatccatgggcgaaaagttcttcaaacaaaaagcggttgtcctggacgtaattgacagatatcagggcaaaatcaagttcttggagactggggaaaagctaaaagtggatcaagctcatttggagacggtaatccccgctttggacaagcctgtcatggtggttaatggcgcttatcggggatccgaggctctgctaaggaaactggacgagcgcagatattcagtcagcgtggaaatattgcacggtcctctcaaaggcagaattgtagacaacgtgcaatacgaagatatatctaaactacatggcgcctag

SEQ ID NO: 41040 - protein, 390 aa, DROSOPHILA
MGRAEVGTPKYLANKMKSKGLQKLRWYCQMCEKQCRDENGFKCHTMSESHQRQLLLFADNPGKFLHSFSKEFSDGYMELLRRRFGTKRTSANKIYQEYIAHKEHIHMNATRWLTLSDYVKWLGRTGQVIADETEKGWFVTYIDRSPEAMERQAKADRKEKMEKDDEERMADFIEQQIKNAKAKDGEEDEGQEKFTELKREENEPLKLDIRLEKKFQPDTVLGKSALAKRPAPEAEEKVFKKPKSVAGDSQTRSVLDEIIKQEESKKERANRKDYWLHKGIVVKFISKSMGEKFFKQKAVVLDVIDRYQGKIKFLETGEKLKVDQAHLETVIPALDKPVMVVNGAYRGSEALLRKLDERRYSVSVEILHGPLKGRIVDNVQYEDISKLHGA

SEQ ID NO: 41041 - DNA, 3777 bp, DROSOPHILA
ccagcgtctgcgcgccatcatcaacggcatcaatcccgacgtgctccagggtcatcagccagtggcttcaagtgaagtagtggtcgcaacggaggcgccacagaccgtggccgagtccactgaggcggcggagcagcagcagcagcagcagcagcaggagaacggcgagactgagctggagaaacctaacgaaagttcggcggacgttgcggagataactgccgctgtggaggcctgccagattgaggggaactcggtggtgaccaccgatgaagccgcacagccaagcccaaccgtccaagctgaagccagtggctccagtgagtagatctcagatgacagcagcacgtgccagcacacaccaaacgtaaaaacaaaaacatcccatttagaacgcattcatttagaagaaatgttaagtattttccggaatttacatgtaaataaagcgaaataaagcatgagcgcatgcagcgtattatggatttttcaaatgtgtttattgaaatcagtttcataattcatacacgttttatatcatttgtttattaatacaaaggattattgataatacatattaataatagttaatttttaaaaaacacatccttaaaatgacgggaagcggacgtttgaatagctgatgaatggtaaggagttttagggacaaactaatatatttcgctgattttcttgcagatatttctctggctggctggctggctggtccattcggtcggactgcattgtggacgaacaaaaaaaaaactgattcaaggtcgaaacttagtgcttataattcctctttatacttcttggcaagcattcgcctccacctcctcggttcaacgatttcccctcttcgattttttgtttcttgttttgttttcacttgctctatactcttaaggccaacgagcactacagggcccccacatctgtatgctttgtgaccgactggcgtccagtcgctcctctgctgctccgtttccatctaatctgcatggttatgcgcttggtgctctgctcgaacggtcagttgattaacctagtgtttaaattttggacaaaacctataaaagcgctggtgttcaaatgtgtgtacatgtgtgtgcgtgggtgaatggttggtcggtcggtagatatacatatatatatatatatacgggggctattacaaataaatatgtggcttttaatcatggtatttgtcaatgtgtttgtaattgcgatttaaatctcaatgggtgtggggtggaaggggaaaactgcagtcatctgctggaagggatgtctctggggatgtcctttgatcgtggcgctgctattccataccaaattaatggtgcaatttcttgtggatttcgactcgccccggctgccgatgataaaagtgaccaaaaacagagataaggttggggtgagagtgtgattcactagtttgttactctgcgtcagcagcccatacttacgtttcatgcatcatttgatgtgttgtttcaaaggattttatttctggttgattgtgtggttgggtttgtggttgtttttgtcgtgtttatcttttgtatcttgtttggatttcttattgatctgttttagatagaaaaagactgctcgtggtgctgcagttgtgtgatattactttttacgcttgtcggctggcttgaggatttggaacgagcacatcagcgtatcgtccacggacatcatggcgccggcattgtcgaactcgccgcagtagttgggcgccgagaacagggtgaccagcatgcgtttggcaaagaactcgtacccatcctcgacgacttgatgggctcggcagatgagatcgaactcgtgcttctgcaaaaacttggccaccacctcggcaccgaaggtgaagctaacgccgcggtcgttttcgccccagcccatggtatccttatcgggatcggaccacaggagatcgcacagcagtccctggtcgggcacatcggttggccgcataatgcgacggatctgctccatggaggtcaaatcgggactgagaccaccgtggcagcagaagatcttctcgtcgacaatggccgccactggcaggcagttgaagcagtccgtgaatgtcttccacaacttgatgctgtagcgacgcttgcattcgtcgtagaatccgtatatgcgattaatgctggcgcattcgtggttgccgcgcagcaggaagaaattctccgagtatttgatcttgtaggcgagcagcaggcagatcgtctccagcgattgcttgccgcgatcgacgtagtcgccgaggaacaggtaattcgattccggcggaaagccgccgtactcgaacagacgcaacagatcgtagtactgtccatggatgtcgccgcagatcttcaacggtgcctctagctcgagcagaatgggctgcgacaggaagatctcgcgcgacttcaagcaaagtccccggatctcgccctccgagagctgtacgtttttacctggccgtgccccacgcacctcgagaagtcgcgatattatgctgtcgatattcatcacgtcgcccatgtttgcgtgcgaaagtgtggatctggtgcactagtgctgctgttgggtgtcgaggttaccgcgaacgatcgttggtagcgccgaaatagcctcgaaatctttaatttccgaaatctatttctgctaaatacttttcacagctaacaagtatgaaaatttcttcgtatgctgttgcgtgagtgcgggcgggatggcgagtgtgcttctagctgatgttgccacactgccggaagtcgcggatatggccagataatagacgccatcttatctaatcgataacatgcaaatatagtgcataatcgataacgaagttgctgtaatattactcttattacattaaggacatttccaatccattgcaagagttccgcaatagctctacttttatattttcattcgaaacgggtcttctcgaccctatagtggctcgaaactgctgttagtaatcgattaaacgcatggcgtccagttactctatttcagcggtgtggcagcctgatcagggggacactagccatcccgcttgcactcaggcacgcctggcatgacttactgtggaaaagagatgggagactgatgcatttggcgaggctattcgatataccggtaacaaggggatatttaaatacattggaaattcaaataagccaataagaatattcgtttacagaacataggttaattcattttccttattggaataacttccacatgagttatgatttaaaatgccaaatttcccttaaattctcacaaaactaaataatatattgatagatatattaacaatcacactatgtaaaaattttgtatgaaatgtgctcatgtcttgttatcgataattcgatactctatgcatttcctgcctacgcccgctaatcatttaattaactgttaaataggcgggtttcaatttaatcaaaatgctgttaaacgatatcataagcggaaaattagttgattccgtctatattatagcggaaattggccaaaatcaccaaggttgtgtggaaacagcgaagaaaatgatatgggaggccaaaaaagccggttgccactgcgtcaagtttcaaaaatcggatttgccagcaaagtttacgagatccgctctagatcgcgaatatatcagtgatcacgcctggggaaaaacgtacggggagcacaaggagtacctggagttctccaaagatcagtatctccagctgcaggcccactgcaaggagttaa

SEQ ID NO: 41042 - DNA, 1683 bp, DROSOPHILA
gcagtgtggcaacatcagctagaagcacactcgccatcccgcccgcactcacgcaacagcatacgaagaaattttcatacttgttagctgtgaaaagtatttagcagaaatagatttcggaaattaaagatttcgaggctatttcggcgctaccaacgatcgttcgcggtaacctcgacacccaacagcagcactagtgcaccagatccacactttcgcacgcaaacatgggcgacgtgatgaatatcgacagcataatatcgcgacttctcgaggtgcgtggggcacggccaggtaaaaacgtacagctctcggagggcgagatccggggactttgcttgaagtcgcgcgagatcttcctgtcgcagcccattctgctcgagctagaggcaccgttgaagatctgcggcgacatccatggacagtactacgatctgttgcgtctgttcgagtacggcggctttccgccggaatcgaattacctgttcctcggcgactacgtcgatcgcggcaagcaatcgctggagacgatctgcctgctgctcgcctacaagatcaaatactcggagaatttcttcctgctgcgcggcaaccacgaatgcgccagcattaatcgcatatacggattctacgacgaatgcaagcgtcgctacagcatcaagttgtggaagacattcacggactgcttcaactgcctgccagtggcggccattgtcgacgagaagatcttctgctgccacggtggtctcagtcccgatttgacctccatggagcagatccgtcgcattatgcggccaaccgatgtgcccgaccagggactgctgtgcgatctcctgtggtccgatcccgataaggataccatgggctggggcgaaaacgaccgcggcgttagcttcaccttcggtgccgaggtggtggccaagtttttgcagaagcacgagttcgatctcatctgccgagcccatcaagtcgtcgaggatgggtacgagttctttgccaaacgcatgctggtcaccctgttctcggcgcccaactactgcggcgagttcgacaatgccggcgccatgatgtccgtggacgatacgctgatgtgctcgttccaaatcctcaagccagccgacaagcgtaaaaagtaatatcacacaactgcagcaccacgagcagtctttttctatctaaaacagatcaataagaaatccaaacaagatacaaaagataaacacgacaaaaacaaccacaaacccaaccacacaatcaaccagaaataaaatcctttgaaacaacacatcaaatgatgcatgaaacccggggcgagtcgaaatccacaagaaattgcaccattaatttggtatggaatagcagcgccacgatcaaaggacatccccagagacatcccttccagcagatgactgcagttttccccttccaccccacacccattgagatttaaatcgcaattacaaacacattgacaaataccatgattaaaagccacatatttatttgtaatagcccccgtatatatatatatatatgtatatctaccgaccgaccaaccattcacccacgcacacacatgtacacacatttgaacaccagcgcttttataggttttgtccaaaatttaaacactaggttaatcaactgaccgttcgagcagagcaccaagcgcataaccatgca

SEQ ID NO: 41043 - protein, 302 aa, DROSOPHILA
MGDVMNIDSIISRLLEVRGARPGKNVQLSEGEIRGLCLKSREIFLSQPILLELEAPLKICGDIHGQYYDLLRLFEYGGFPPESNYLFLGDYVDRGKQSLETICLLLAYKIKYSENFFLLRGNHECASINRIYGFYDECKRRYSIKLWKTFTDCFNCLPVAAIVDEKIFCCHGGLSPDLTSMEQIRRIMRPTDVPDQGLLCDLLWSDPDKDTMGWGENDRGVSFTFGAEVVAKFLQKHEFDLICRAHQVVEDGYEFFAKRMLVTLFSAPNYCGEFDNAGAMMSVDDTLMCSFQILKPADKRKK

SEQ ID NO: 41044 - DNA, 4832 bp, DROSOPHILA
agcgcgtgatgcgtttagcatcacttccttgctacgctttacagcacttcaattatatcgatatctggcgcggcattcaaatagcagatatatagaactgcattttaattatattcttccccctatattttgtctcgaaaatgtatataagtcctgagatttattattgaaaatcgatccatgtctaaaatgaactgcttaatgttattattcaaaattataaattattattttgcactttttctccaaaattaaaatgttagattaggaaaatgtcgtatagaaatgaaaatgaccaacaatgatgccttataaaacaaataagtcgaattttagacagttttccttccgttcaataaatatgttcataccaaatttaataataatgtaggtatacaaaactattttgcttacccagaatgttattcaaaacttaaaatttaacattgtacaactcagggtatttgaaacctgtttagcagaaataaaattgaagattattacttttcttaaaaaagtcaaataactggtagacaaaataagtgcaactcgtttataaaaaaaatcaaaagcaacttaattcaaattaacgttacaaattagtgtattggagatatttatcagtatccggtgtttggcacggttaatgaactttagatcgcagaatgaattaggctgcttcgatgcatccactaattacatcatctcctactgcgatgcaagatattatgcaaatgaccaatgcaacgaacctgatttttggagaacatcattttaatctaagctgtgctggctgcataatttgaataagggcataaatgcctttctttcatcccgaaattccggttggtaggtgtatttagaagctttataatacagggacgggttttaatttattgtctcagtgtttttttataattcgactcgcattttcggtccctgtcttaccgggctcgtataaataagcctccaactgcgaaatgcggcttagtcgatccgtagacttcgtaacgccccgaccagtcgaaagttagttcatcaaaattccgtgcgatgcgtgctctccggttctttgcggctcttgccctccaactcacggcctgtagcagccagtacaaatatgggccaggtgcgtaacgtcaagaccgagatcagaaacgggcccaaaagacccgaaatgaataaatgaaaaacgagtgagagtgtgccaggtcgaaagcaaactcaaaacatatgcagaattgattaatcaagtgctaaacggagtataaaaggcgtcagcaaaatactcgtaaattgaattaaatatttgacacccgctaacagagctgtcaaacatcactttttccgaaggagaatgttttaacgaaagtggatataagactaatactttaaaatttaaatttgaattaattttaatgcttaatttccataggtttctttcggtgttttatttatgtgctatcttctgaaagcaatttccctttttaatgattaattcgaaagtggagtggaaaacaatggcaattgtgtctgtgcttttgttttgtaaaacgaaacatgtgcttggaattgataaattcttgaggttgtacttgaaatgtgtatgcatatcggctagtaacaaaaaatggtttcaattaatcagaataatatgcattcttaatttataatgaaataagctaaaatcgcattactttcagagcaatcctgggacctcgactctatttccgagttgaagagcaaggagttctggtttcacgacgcccagcgcacgctctacaataagctatccactccaccaaaccaatatcgtgccaagaatgtcatatttttcctgggcgacggtatgtccgttcccacggtaaccgcaggcaggatcttcgatggacagctgcgtggagtggtgggcgaacggaatcgtctggagttcgagaaattcaactatgtcggtctgtccaaggtacttagaagtcaacgaagtcatttgttatctcaataaactgctaataaatttattaagtccgttaataactagacagtaattacgcccttctgtcattgtagacttattgcgtcaataagcaagtggctgactccgcctgcacagcatcggcctatctgtcggggatcaaggcgaactatctgaccatcggagtgacagccgatgtggagttgaacgactgcaggggatcgcgcttgccgcagaataggctctcctcgattgccgcctgggcgcttaaaggtagcaaatccgctggattggtgaccaccactcgggttacccacgccagtccggccggagtttatgcgcacacttcgaatcgcgatttcgagagcgactacgacgtgaccaaattgggtcaaaatccaggaaactgtccggatatcgcccagcaattgatagacggagatgtgggcaagcgactgcgtgtggtcatgggcggtggaaccattaaattcttgcccaataccacgaacgatgtgttcggaaacaagggccagcggttggataataggaacctcattgaggaatggcaacaaacaaagccgggtaatgctagggtggtgtttagtcgtacggatctcctgaacaatgatgcgcagaacactgacttcctgctggggctcttcaatgcctctcacttggcgtaccacatggacgacagcatagacacacccacgctacccgagatgacggcagcggccataaatgtgctttcccgagatccaaacgggtatttccttttcgtggaaggcggtcgaatcgatcacgcccatcatgagaccaaggccaagaaggccttggatgaaaccgttcagttttcggacgcagtgagaaaggcacgacaactcaccaatccctgggacaccttaattgtggtgagtgcggatcacggacacacggtcacgatcagcggctatccggatgttaacaacagcatagtaggactcaattccgagctaagtaatgtggaccagctgccctacacgtccatctcatatgccaacggcccggcctacgagagattctacaaatcgacggacggagtggtggagcgcgttgatctccgtaacctggacttttccaaaccggatgccatctatccacatggagtgcccatgaccgaggagacacacggcggtggcgatgtggccgtctatgctcatggtgagttcatgtttttttggtttttaagtttttttttttagatgggttttgaatgatatatataatcttaaatccaagcatttaatcaaaactcttgaaatgtataaagttgtggaatatcttcttcaaggtccatggtctcatcttttcactggagtttacgaacaaagcaccttgcctcatttgatgggcttcgcctcttgcttaggacctggaattacatattgcgatctgcagccaaaagcaagatactctccctagaaaatcccctaggaataaatatgtttagaaattgaataaaatgatctattcttaaaacaaattgcggagattctagaatcgccatatttaatcttaactttttagcttatatagttcctgaataaagagaataagcaaagaagcaacagcacttcccaaaattattaattaaaaaacagacaaattacattacaaaatcatctccctgatgtcaattgatagacccccaaataatgaaaacttaaccgatatagagctgcggttaaaataatagcactactgcaggtggaaagttgatttcctaaaaaaaaattattaaatgttttttttttaagtcagattgcatgaataataagtaccatatgtggtctctctgagcaataaatttttactctctcaacgtaacggttctttttgtttttgggcacttgctgcaaaagtgcgcgaaattaggcggtaacaaacatagcactgaccacgtatttgctgaataatattaatagaagtgattgctttgggtttttttttccacacattttataaaaaggaattgaattgaaggttttaattgaattttttccaaacgaaggcccaaaattctcaagtcatgggtcgcataaagcattgtaccgtcgaaaaaagaaatttgattaaaaacatgatctctgaaggtaaaacctacgctgaaattggacgcattgtcggttgttcaaacaagaaagaaagccctcaatgtccaacgttgagatcaagcccttggttcgacaaagccttttaagccggcgacggaactgaagaaggagcttaatcacaagtaataagactggactggacgtataggacacaccattttaattgaaaatttgaatagagaaaatttaatagagagtttgaattttggttatttccataatttcgatattatcgcataagttaaaaagccgttgagcccattagtatcgattgttctatcgttttaccgtatatttgggcggtctgtcagcggtcacacttaaaaatatccccggcaaaaaaaaacacaaattgtgtttttaatacttttgatattctagcgtaaataattgttacgcgctctgatgtccaccacaattaacgccataacgttagtcctggtctagaggttgaaaagaatcctgaaaccaaagaacctgaagatcagttagtaaccgaaggaattgcaatgggttccaacggcgaagaattattgaatttcgcaatgaactcagacagcgtaaataccataaattcaacagcggacgtcgcagaaattgtcttagacactaatttagagttcaacaagacgattccttttcatctgcctcaggagtcggacgtggaaatggtctctgtcagatcagctgccgaacctgatcctaac

SEQ ID NO: 41045 - DNA, 2025 bp, DROSOPHILA
agacttcgtaacgccccgaccagtcgaaagttagttcatcaaaattccgtgcgatgcgtgctctccggttctttgcggctcttgccctccaactcacggcctgtagcagccagtacaaatatgggccagagcaatcctgggacctcgactctatttccgagttgaagagcaaggagttctggtttcacgacgcccagcgcacgctctacaataagctatccactccaccaaaccaatatcgtgccaagaatgtcatatttttcctgggcgacggtatgtccgttcccacggtaaccgcaggcaggatcttcgatggacagctgcgtggagtggtgggcgaacggaatcgtctggagttcgagaaattcaactatgtcggtctgtccaagacttattgcgtcaataagcaagtggctgactccgcctgcacagcatcggcctatctgtcggggatcaaggcgaactatctgaccatcggagtgacagccgatgtggagttgaacgactgcaggggatcgcgcttgccgcagaataggctctcctcgattgccgcctgggcgcttaaaggtagcaaatccgctggattggtgaccaccactcgggttacccacgccagtccggccggagtttatgcgcacacttcgaatcgcgatttcgagagcgactacgacgtgaccaaattgggtcaaaatccaggaaactgtccggatatcgcccagcaattgatagacggagatgtgggcaagcgactgcgtgtggtcatgggcggtggaaccattaaattcttgcccaataccacgaacgatgtgttcggaaacaagggccagcggttggataataggaacctcattgaggaatggcaacaaacaaagccgggtaatgctagggtggtgtttagtcgtacggatctcctgaacaatgatgcgcagaacactgacttcctgctggggctcttcaatgcctctcacttggcgtaccacatggacgacagcatagacacacccacgctacccgagatgacggcagcggccataaatgtgctttcccgagatccaaacgggtatttccttttcgtggaaggcggtcgaatcgatcacgcccatcatgagaccaaggccaagaaggccttggatgaaaccgttcagttttcggacgcagtgagaaaggcacgacaactcaccaatccctgggacaccttaattgtggtgagtgcggatcacggacacacggtcacgatcagcggctatccggatgttaacaacagcatagtaggactcaattccgagctaagtaatgtggaccagctgccctacacgtccatctcatatgccaacggcccggcctacgagagattctacaaatcgacggacggagtggtggagcgcgttgatctccgtaacctggacttttccaaaccggatgccatctatccacatggagtgcccatgaccgaggagacacacggcggtggcgatgtggccgtctatgctcatgggtccatggtctcatcttttcactggagtttacgaacaaagcaccttgcctcatttgatgggcttcgcctcttgcttaggacctggaattacatattgcgatctgcagccaaaagcaagatactctccctagaaaatcccctaggaataaatatgtttagaaattgaataaaatgatctattcttaaaacaaattgcggagattctagaatcgccatatttaatcttaactttttagcttatatagttcctgaataaagagaataagcaaagaagcaacagcacttcccaaaattattaattaaaaaacagacaaattacattacaaaatcatctccctgatgtcaattgatagacccccaaataatgaaaacttaaccgatatagagctgcggttaaaataatagcactactgcaggtggaaagttgatttcctaaaaaaaaattattaaatgttttttttttaagtcagattgcatgaataataagtaccatatgtggtctctctgagcaataaatttttactctctca

SEQ ID NO: 41046 - protein, 535 aa, DROSOPHILA
MRALRFFAALALQLTACSSQYKYGPEQSWDLDSISELKSKEFWFHDAQRTLYNKLSTPPNQYRAKNVIFFLGDGMSVPTVTAGRIFDGQLRGVVGERNRLEFEKFNYVGLSKTYCVNKQVADSACTASAYLSGIKANYLTIGVTADVELNDCRGSRLPQNRLSSIAAWALKGSKSAGLVTTTRVTHASPAGVYAHTSNRDFESDYDVTKLGQNPGNCPDIAQQLIDGDVGKRLRVVMGGGTIKFLPNTTNDVFGNKGQRLDNRNLIEEWQQTKPGNARVVFSRTDLLNNDAQNTDFLLGLFNASHLAYHMDDSIDTPTLPEMTAAAINVLSRDPNGYFLFVEGGRIDHAHHETKAKKALDETVQFSDAVRKARQLTNPWDTLIVVSADHGHTVTISGYPDVNNSIVGLNSELSNVDQLPYTSISYANGPAYERFYKSTDGVVERVDLRNLDFSKPDAIYPHGVPMTEETHGGGDVAVYAHGSMVSSFHWSLRTKHLASFDGLRLLLRTWNYILRSAAKSKILSLENPLGINMFRN

SEQ ID NO: 41047 - DNA, 3167 bp, DROSOPHILA
cccgaaggtggtgccacagccatcggtgccgaacgacgccgatgaaccctactcgcctggtggctccgacgacgaactggtgccaagtgctccgcaaaggccgaacgatctggaacggcaggtgaacgaaatcaacaaacaaatagctgcgcaacaaatggaaattgccggcctgcttaaagtggagcccacagtaagtgctgacctcaggcgacgcaaaatgtttccaatccattgcattcatatccctgctcgttttttcccagggatccgcgtcctcatccaatgtgctagccgccatatcaatacccgcaaatctttcaaagatcctggccagcatcaaggacaagactaatctgccttccagtgctgatgatggagacgaggaatacaatcccgaggacgacatcaccgcaaccagttcatttggtacgtcagctgtgcttactcaaatatcaattggcattagtatcaacgattcctttcctgtagcatcgaagaagccgaggagcaaaggccgtttggcgcatctaagtgaagctgagcttcttagcatggtgccggacaatctggcaggcgtgattcccagatcgtctaggacccgccaccagcttgctcagtcgccgctcacaccaacaccactaccaccaccgccgccgccgccgggtgtttaggttacccccatccggacggacgctggctaacccgcgcgccaatccgtttttcattcttgatttgaattgccgcccgcccgcccgcctcattgtgtacattgtcattaagcaaattcaacgccatctctgtattatatctggccaatcggaattttttagttttcaaagctaaagccacaaccccatcatcccgccacaacccaacccgccccgagctccaaatggatcatccttcgcattgcaatgcaaatttagattcggtttttacattacgctctaacaaatcgtgtacatttcctccgaaaataaaaagtgctacgtaacatttgttttagggatacgataatcgtaacgctgcactttatttccaaacgcacttagttgatctcgcagggatcgtccttgccgctgaagtgggcgcatgtgatcttgggtccgttgtgtaccctgggtatggcgatccggaagagcgttccatgcggcatgcacacgcaaatcttgtactgcacactgcccgtgcggagacccagctcggagctgacgatgggaatgcggtccatgtccagaaagatacccgtgcctgcctccaggatggtggcgccctgcgtggagttgatgagaatgtggtgctcggcctgcatgtcaacgctggctccgtcgaagtagacgccctcggatcccctgatggccatgcgtccgtcgctctccagcaccagggactcgtcgatgggactgacgatgccgctggcactaaccactttggcctgcagcgcctccactccgcccggaatgttatactgcggacgatgggtggtgaaaatcggctgcttgtcgacggggtccttgacctcgaacaagttcgtggcctgcacgaggataccctccctgttcaggacgatcctatcgcgttcgctggctgctccattgccattgcggaagacgcgcacatggacgccgccctcgccgtcaccagcatcactgctgatggtcaccgggacatccgagaagccgtgtatctggccaatcgagttcgtctgcacgcgctccaagtccgtggtaccgtagaacttcaccaaatccacctcgggtatcacctccatgccctggacacctttgcccaggcgaagcacacccacaatggtgagcgtcagcagaagattgccaacggtcagcaccagcagcaacaccacaatggtccagaaggcgaacgtgttgcgtccctggtgacccggatgcaggcgggagcagctgtcgctgttgtacttctcatcgaagtaatcgcccgtatccgttttcgagtcgtcgcgacaaaagtccaagtccggcacaactcctccaatgggcagcgtcacagagagcgcgttctccgagttggcgtcgtcggaatatgacggcgatggtccacggatgaaggtgttctcgaatgtgtgcatcattggattgaattgaattcctggcgagttgaactcaaaaaaccgtttgcacaattgctgtattcagtgcaaggaaattgggcatgtacatgtgagagattcaattgttggacatgcgcagtgcgttctcagccgcaagtttcgaaaaatccgatatattcgaattttgaatactttcgaaatatgaaaaagtggtttccaaattatctttacaacgagaaagtcaattttcaaaagttaatataacattttcaactgctagaactcagttaccaatatatattttttaatggagagcagaacaaaaaaaaaacaatcaattaaatgtaaaacactggttttcataatccatttaaactttcaaaaattgaattttaaaagtgtaaccataaaaagtcaattggaaccgaaccagttccgtatgattgcagcacgcagccctggcttcaagggggcttgactttggcatttttcgaagttgcgcccacagccacaccgcacatctccattttgcaaagatgtcctttaaggtgagcttttgtccaaaaactgattgccattggctaaacaagagtctcccgcaatgacacagcccattgacccgaagcgcgacgagatccggcgctatctagagcgcggcagcgtcctggactcgctgaccaagctcttcatacgcgtgatcaaggagcggcccgagaatcccatggactacatccgtaaccacatcggcgtggtgcgccaccagcacgacaagtacgagcgcctgcagcaggatctgcagctggccaacgaggagatccagcgtctgcgcgccatcatcaacggcatcaatcccgacgtgctccagggtcatcagccagtggcttcaagtgaagtagtggtcgcaacggaggcgccacagaccgtggccgagtccactgaggcggcggagcagcagcagcagcagcagcagcaggagaacggcgagactgagctggagaaacctaacgaaagttcggcggacgttgcggagataactgccgctgtggaggcctgccagattgaggggaactcggtggtg

SEQ ID NO: 41048 - DNA, 1167 bp, DROSOPHILA
cagcaattgtgcaaacggttttttgagttcaactcgccaggaattcaattcaatccaatgatgcacacattcgagaacaccttcatccgtggaccatcgccgtcatattccgacgacgccaactcggagaacgcgctctctgtgacgctgcccattggaggagttgtgccggacttggacttttgtcgcgacgactcgaaaacggatacgggcgattacttcgatgagaagtacaacagcgacagctgctcccgcctgcatccgggtcaccagggacgcaacacgttcgccttctggaccattgtggtgttgctgctggtgctgaccgttggcaatcttctgctgacgctcaccattgtgggtgtgcttcgcctgggcaaaggtgtccagggcatggaggtgatacccgaggtggatttggtgaagttctacggtaccacggacttggagcgcgtgcagacgaactcgattggccagatacacggcttctcggatgtcccggtgaccatcagcagtgatgctggtgacggcgagggcggcgtccatgtgcgcgtcttccgcaatggcaatggagcagccagcgaacgcgataggatcgtcctgaacagggagggtatcctcgtgcaggccacgaacttgttcgaggtcaaggaccccgtcgacaagcagccgattttcaccacccatcgtccgcagtataacattccgggcggagtggaggcgctgcaggccaaagtggttagtgccagcggcatcgtcagtcccatcgacgagtccctggtgctggagagcgacggacgcatggccatcaggggatccgagggcgtctacttcgacggagccagcgttgacatgcaggccgagcaccacattctcatcaactccacgcagggcgccaccatcctggaggcaggcacgggtatctttctggacatggaccgcattcccatcgtcagctccgagctgggtctccgcacgggcagtgtgcagtacaagatttgcgtgtgcatgccgcatggaacgctcttccggatcgccatacccagggtacacaacggacccaagatcacatgcgcccacttcagcggcaaggacgatccctgcgagatcaactaagtgcgtttggaaataaagtgcagcgttacgattatcgtatccctaaaacaa

SEQ ID NO: 41049 - protein, 352 aa, DROSOPHILA
MMHTFENTFIRGPSPSYSDDANSENALSVTLPIGGVVPDLDFCRDDSKTDTGDYFDEKYNSDSCSRLHPGHQGRNTFAFWTIVVLLLVLTVGNLLLTLTIVGVLRLGKGVQGMEVIPEVDLVKFYGTTDLERVQTNSIGQIHGFSDVPVTISSDAGDGEGGVHVRVFRNGNGAASERDRIVLNREGILVQATNLFEVKDPVDKQPIFTTHRPQYNIPGGVEALQAKVVSASGIVSPIDESLVLESDGRMAIRGSEGVYFDGASVDMQAEHHILINSTQGATILEAGTGIFLDMDRIPIVSSELGLRTGSVQYKICVCMPHGTLFRIAIPRVHNGPKITCAHFSGKDDPCEIN

SEQ ID NO: 41050 - DNA, 4706 bp, DROSOPHILA
attcttaaaacaaattgcggagattctagaatcgccatatttaatcttaactttttagcttatatagttcctgaataaagagaataagcaaagaagcaacagcacttcccaaaattattaattaaaaaacagacaaattacattacaaaatcatctccctgatgtcaattgatagacccccaaataatgaaaacttaaccgatatagagctgcggttaaaataatagcactactgcaggtggaaagttgatttcctaaaaaaaaattattaaatgttttttttttaagtcagattgcatgaataataagtaccatatgtggtctctctgagcaataaatttttactctctcaacgtaacggttctttttgtttttgggcacttgctgcaaaagtgcgcgaaattaggcggtaacaaacatagcactgaccacgtatttgctgaataatattaatagaagtgattgctttgggtttttttttccacacattttataaaaaggaattgaattgaaggttttaattgaattttttccaaacgaaggcccaaaattctcaagtcatgggtcgcataaagcattgtaccgtcgaaaaaagaaatttgattaaaaacatgatctctgaaggtaaaacctacgctgaaattggacgcattgtcggttgttcaaacaagaaagaaagccctcaatgtccaacgttgagatcaagcccttggttcgacaaagccttttaagccggcgacggaactgaagaaggagcttaatcacaagtaataagactggactggacgtataggacacaccattttaattgaaaatttgaatagagaaaatttaatagagagtttgaattttggttatttccataatttcgatattatcgcataagttaaaaagccgttgagcccattagtatcgattgttctatcgttttaccgtatatttgggcggtctgtcagcggtcacacttaaaaatatccccggcaaaaaaaaacacaaattgtgtttttaatacttttgatattctagcgtaaataattgttacgcgctctgatgtccaccacaattaacgccataacgttagtcctggtctagaggttgaaaagaatcctgaaaccaaagaacctgaagatcagttagtaaccgaaggaattgcaatgggttccaacggcgaagaattattgaatttcgcaatgaactcagacagcgtaaataccataaattcaacagcggacgtcgcagaaattgtcttagacactaatttagagttcaacaagacgattccttttcatctgcctcaggagtcggacgtggaaatggtctctgtcagatcagctgccgaacctgatcctaacaaatcagattccaaagcaagtaataaatcagattccaaattagatggtaaatcgatattagagtcaggaaccaaacctcaggcggccccgggggaggttttcgctaggaaggcatgcctcaagaggaccaacgaatatcctgctccgctgaatcatactctcaagaaactgaactggaagtttaacctgcgtatattgatctcaaatctgtacatgaagagcgaggatcgtcttccgggagcttgtgtttccaggtgtctttacaatactagtctgtgcacgcaaagacatcggtgctccgcgcttccggatggcccaaactttgcggccgttcaggcgctacgaaccacgttgcacggccagcactacgatacattcctggacattctggagatgatggtgttgcagggtgtctacccaggcgaaggagtctttgacagactaatagatatggccatggttgattgcttatttctctggtgtcacattgtaataatatcatgaattccttatgcagatcctaattgccaaagagataagcgtaaaggagcttggcgacatctacaacaaacttatacgcaccttttttcttttggtcgacgcctttcccccgtgctggacagccctgcgtccttactacttgagttttctgggcgtctcgcatccccccttgcgagaaacacgttcaaccaattctacccagaagttgcagttttacatcgatctttttgaggaaaatctaacgcattgcagcgatgaagagatacgtgaaaacaccaaattctatgaaaagtttgtgtttaacttctcggaagaggaggatgcgaatatgtcccaggaaacggtctttctgcgacatgtacagcagtatgactggcagagtgggaagctttgtctggacgacttcaagagaatgtcgcccgcagtccgcttggcacggctctgcgatgtcctgaacatgctcacatgtgtactggaaatagagttcctctcctggctggatcataacaggttgaggcagtcggagtcggagctgtttcaggaaaactccaggtcatttgcctcgatcgtatttgaaatgtcagcaggaacgcgtctcagcgacatcgttaaacaaattatgagtctgtatggacaggtagtggccaagtccatgtacccagaacgccagaggattctccaggtaggtttgtaatgtttttgggttgtatgctttatgtaactctttcagtactattagcgccttgtttccctaattgtcgaagtaagcaacacggcagagctaaagtacgaggataatgctgtgatatatcctagtatgggaccccaaacccatctgctcatcgaagacttcttcaagatttttaaatcgcacaatcgcaaaaaggttcgcacctacctaatggctattcggcagttggaccccccatatctccgcttcgagttcacagaccactttttgaagctctttttctttcccaaaaaaactcattttggaccggaaaaggtggtcggagaatttagagcgcgtcaatgggtaaagtacaatcttaaaagtgagattgaggatgacgatgacgagcagttgtcgcgtgaggattacctagcattactccttagcgccttaaaagactatgacaagtggttaaatcttggaggcttttggaagtacctaatgagtaaggagctcgtgcagccgttgactgcgaggatcagtcctgtgggaagagttgtgcgcgaggcgccgaaggtgttcaggctcgatgcgttggaggaggaggtacacacctggaaggagcgcatgagcaccaaagtaattacaggtcgggaaaaggtgaacctgccggtggccagtatcaatatggccaagatgtgtgtgcgctatggcgaggatgtgagacaaatgagagttttgcgacaactccttcaaaacgaagtttacaaggaggtcgatgtgtcggactggttaacctatctgaacaactttctgagctatgaagagtccatgtctccagtagactctgcgtcttcctccttattgggaggcatatgagggcccaaatacgaaaatatatctaaggctccattaaatttaaggaatttcataccgaaagttcaaacttaattattttaagcccgttaattagtatttatctaaatggtttcaaataagaatgcatttgattcgttaccgtttgtcataaattccgtttctgtatttctccattgcaaatatatatttatgctgtaactaaatacacaattacgtacacatttacatataaatacagctactgcgcatgtacatacatacattaataaatatatatgtgtataattacataatattatcgcgatttgtttttaagccttttgcttgttggtttttttgcagttcctcatccttctgccatctcgatttgcctaacgtgtcttgtctttgttcattgtatgtctaaattctttgcagtttacattttacacactcaactatcattaaagtaggcgcttaaatgctaatctcactacgtcatttttatattaagtatatgcatacgctggggagggttagaaaagctgggtgcagagctcagatgttacaaagagcagaatccgatctgcatcaaatattaagcattcattttagagcgacctttcaaattctctagggatcttagatcctggcgaggatctgcattcagggccttgaaaaacatagcacggattcaagcgttgctcttatcattgctctactaggttgggatttcggttttttgtttctgctgtcttgtctttaatttgtttaacactacacatttatcaacatttatttaatattcattccatataggctaggtttctttgaatgtgtctccacttcccggcttgcaattgattcgtatacatttggggacatccgtgtttgttgcgctttgaattctataggaacttgatacaggagtcttttcggtttgacccttgctgcagtttttaaaggtatttaaaggcgaccggcgtttgaaacaaaggacagtcgggatgtgaggaaaccaagggtaacatacataaattaaagggctaacataaaaagtcacatgttgtatttttagaaaatattattttctcttttaaaaaggttttcgtttacaatttagttaaactctttcgctttcgctttatacatacaaattggagttgggctttgtacagaacttgttgctttactatctcataatcgtaattagttatgaattaattagcgttactttgtgtttacttcattaactaatatttaaacgaaggctagcgtgacagcttttgtgtttccaaattatgccaatgctgaaattaaaa

SEQ ID NO: 41051 - DNA, 2540 bp, DROSOPHILA
tgtttttaatacttttgatattctagcgtaaataattgttacgcgctctgatgtccaccacaattaacgccataacgttagtcctggtctagaggttgaaaagaatcctgaaaccaaagaacctgaagatcagttagtaaccgaaggaattgcaatgggttccaacggcgaagaattattgaatttcgcaatgaactcagacagcgtaaataccataaattcaacagcggacgtcgcagaaattgtcttagacactaatttagagttcaacaagacgattccttttcatctgcctcaggagtcggacgtggaaatggtctctgtcagatcagctgccgaacctgatcctaacaaatcagattccaaagcaagtaataaatcagattccaaattagatggtaaatcgatattagagtcaggaaccaaacctcaggcggccccgggggaggttttcgctaggaaggcatgcctcaagaggaccaacgaatatcctgctccgctgaatcatactctcaagaaactgaactggaagtttaacctgcgtatattgatctcaaatctgtacatgaagagcgaggatcgtcttccgggagcttgtgtttccaggtgtctttacaatactagtctgtgcacgcaaagacatcggtgctccgcgcttccggatggcccaaactttgcggccgttcaggcgctacgaaccacgttgcacggccagcactacgatacattcctggacattctggagatgatggtgttgcagggtgtctacccaggcgaaggagtctttgacagactaatagatatggccatgatcctaattgccaaagagataagcgtaaaggagcttggcgacatctacaacaaacttatacgcaccttttttcttttggtcgacgcctttcccccgtgctggacagccctgcgtccttactacttgagttttctgggcgtctcgcatccccccttgcgagaaacacgttcaaccaattctacccagaagttgcagttttacatcgatctttttgaggaaaatctaacgcattgcagcgatgaagagatacgtgaaaacaccaaattctatgaaaagtttgtgtttaacttctcggaagaggaggatgcgaatatgtcccaggaaacggtctttctgcgacatgtacagcagtatgactggcagagtgggaagctttgtctggacgacttcaagagaatgtcgcccgcagtccgcttggcacggctctgcgatgtcctgaacatgctcacatgtgtactggaaatagagttcctctcctggctggatcataacaggttgaggcagtcggagtcggagctgtttcaggaaaactccaggtcatttgcctcgatcgtatttgaaatgtcagcaggaacgcgtctcagcgacatcgttaaacaaattatgagtctgtatggacaggtagtggccaagtccatgtacccagaacgccagaggattctccagcgccttgtttccctaattgtcgaagtaagcaacacggcagagctaaagtacgaggataatgctgtgatatatcctagtatgggaccccaaacccatctgctcatcgaagacttcttcaagatttttaaatcgcacaatcgcaaaaaggttcgcacctacctaatggctattcggcagttggaccccccatatctccgcttcgagttcacagaccactttttgaagctctttttctttcccaaaaaaactcattttggaccggaaaaggtggtcggagaatttagagcgcgtcaatgggtaaagtacaatcttaaaagtgagattgaggatgacgatgacgagcagttgtcgtggttaaatcttggaggcttttggaagtacctaatgagtaaggagctcgtgcagccgttgactgcgaggatcagtcctgtgggaagagttgtgcgcgaggcgccgaaggtgttcaggctcgatgcgttggaggaggaggtacacacctggaaggagcgcatgagcaccaaagtaattacaggtcgggaaaaggtgaacctgccggtggccagtatcaatatggccaagatgtgtgtgcgctatggcgaggatgtgagacaaatgagagttttgcgacaactccttcaaaacgaagtttacaaggaggtcgatgtgtcggactggttaacctatctgaacaactttctgagctatgaagagtccatgtctccagtagactctgcgtcttcctccttattgggaggcatatgagggcccaaatacgaaaatatatctaaggctccattaaatttaaggaatttcataccgaaagttcaaacttaattattttaagcccgttaattagtatttatctaaatggtttcaaataagaatgcatttgattcgttaccgtttgtcataaattccgtttctgtatttctccattgcaaatatatatttatgctgtaactaaatacacaattacgtacacatttacatataaatacagctactgcgcatgtacatacatacattaataaatatatatgtgtataattacataatattatcg

SEQ ID NO: 41052 - protein, 557 aa, DROSOPHILA
MKSEDRLPGACVSRCLYNTSLCTQRHRCSALPDGPNFAAVQALRTTLHGQHYDTFLDILEMMVLQGVYPGEGVFDRLIDMAMILIAKEISVKELGDIYNKLIRTFFLLVDAFPPCWTALRPYYLSFLGVSHPPLRETRSTNSTQKLQFYIDLFEENLTHCSDEEIRENTKFYEKFVFNFSEEEDANMSQETVFLRHVQQYDWQSGKLCLDDFKRMSPAVRLARLCDVLNMLTCVLEIEFLSWLDHNRLRQSESELFQENSRSFASIVFEMSAGTRLSDIVKQIMSLYGQVVAKSMYPERQRILQRLVSLIVEVSNTAELKYEDNAVIYPSMGPQTHLLIEDFFKIFKSHNRKKVRTYLMAIRQLDPPYLRFEFTDHFLKLFFFPKKTHFGPEKVVGEFRARQWVKYNLKSEIEDDDDEQLSWLNLGGFWKYLMSKELVQPLTARISPVGRVVREAPKVFRLDALEEEVHTWKERMSTKVITGREKVNLPVASINMAKMCVRYGEDVRQMRVLRQLLQNEVYKEVDVSDWLTYLNNFLSYEESMSPVDSASSSLLGGI

SEQ ID NO: 41053 - DNA, 3605 bp, DROSOPHILA
gcatcgagtggccagtggtggagggttgtgatcagtatacattgacggtgagtattgcagattgtatttagagagcgcagattaacatgtatttcctgcagcgcgagcaactggcgcagaaggaggagaaacgagctcgaacccgcaccttcaaatgcacaaggccagtgactggccgttggctgccgatcttttcgcagggttggcgtgtttgtgtggccgctccctgctccgatgagccacgcatcagcctgcgacccaacgacatgattaaggtcactcgcttccgcaaccactggctgttcggcgagcgagtgctttccgagcaagagctagctggcgtcaagaagcgccaacgcaagggtcccattcgtggctggttcccacgacgcagcgccgttgaggtcattgaggcggtccatgaaggcagcggcgatggcaacagcgagacaccagcacctgcggcccagaatggcaacgcccacagccacttgaagcagcagcagcgaaacggacatgccaaaaagtacatgtagcccggatcgggcagagatcaatcgatggcattctgtgccacattcggcttgtatatagaattagattccgcttggagactcgactgtttaacgcttagccaggccgtcatcccgtttactctgttaacaatgtcgaccaataaataacgcgaaagtttggtatcagttgctgatgtgaatcgaaattaatccagttgtgtatcagcagataacgcttatctttttcagatagtaaatgcagcgtaaatctcatggcgacaaagtaaaatatatataaatatgtataattaaagtattgttttaaagtttcccatagaaacttgacaaacctttagatgtcaactgatgagaccttatttatttattgggtattccataatttgattatgatacagattatattacatatgtttacgcgtggaatatagtttaaaagctctaaaccggcgaatcatatttacaggtcatggttgcctcgatgtcctccaccgttcgcggcacaatcgcaaagttctccacgccagtcttcgtgatgagcacatcgtcctcgatgcgcacacctccgaaattccggaagcgattgaacatctctgcgttaatgaatttagcaatgttcggatcggccagagcgcggtccatcagccagttgatgaagtagcagccgggttcgattgtgacatacatgccggccttaaggatgcgggcaaagcgcagcttgctcagccacggttcactggggcgcttgggctccttgggcagatagccgcccacgtcgtgcacatccagaccgatcaagtggcccaggccatgtggctggaacacgcccgaaacacctgcctcgagcatctcctccacatcgcccttgagcatgccgccctccttcaggcgctgcagcaacaccctgcccgccagcttgtgcatgtccacccaggagactccgtcacgggctgactctgtgaccgcattgcgggcatccagcacggcattgtagatgaacttctggtcgtcggtgaactttccattggccgggaatgtgcaggttatgtcggccgcatagccacaatagttggctcccatatcgaacaggcagagatcaccatcctggacgggcttgctgttgggtgcgcccgcgtgtccatagtgcaagatcgacgagttcgttccgctgccgcatatgcaggtgtaggaggcatgccggcagccgcccacggagtaggcgtggtgcaggaacagggattcgccctcaaattccattctaccgggacgcataaaccgcatcaccttgatgtgcgcgtccgaggataccttggccacgtagcgcagcacctcgatctcttcgggtgacttgatcactcggcactcagagagaattggatacagcagattgcagtcagtcacatacttctccttgccagcaaagtcgggcggctgaagggtgagcccgctatcgctgttggtgccactcaatgtgagtatcagcttgggcgacgccccctccagataaacactcatttcgtcaacataaaacacctcgtccacctcgtacatggccttgaactcctgcagcccaagcagttcgcccatccaggtgccgtactcatcgggaaagcgaggaacaaagagaacacttttctgtgcaccagttttcacatcaatggttaggatgccgtagcagcccggctccttgacaccgaacaagtactggaaataggactcctgccggaaaacgtagtccacgtcggtgttgtacaggctctggtccttgccgccctcgaggagcaccagcaggttgccgtcgttgaacttgaggcccggcagcagctccttaaggatggccttgccagcacgatccctgttgttccggaagagggtcatgggcactgcgtaacccgatcccatctgaaaggcggccatggtgttgcgacggaggacaaagtttaactggcgctctggacaacaatgagtgctcgagcaagtgagattagctgataatagccaataaccgggctaacaaaggcagtaaattatgtgggttttatcagtgttttttgttttctgttttcgcaaaagtatgaccgagaactgaacgcgaaaaaaaacaagcttaaattacaattcatcgatcgggaattttatttttttaaatatattctttaatatttttaattagctcaattcatttatttatcatacggttttcctttttggcagccgaccttgaaaataaaggatttccctaaataaacacagattaacattttgttcaaatgagctagcaattgaaactagttccgcagagcgaggcacagaaactatcgataacctacagcatcggcatcattcccaagtctggtcacactggaagtggctttttttgcaaattttattttcataattgagaaaaatttgcattttaaagcgaaacagcaacggattaagctctcgaatctcaacaatataacagccagcttgtgggcgcagccagcagagcatcaccagtattaagtatagggcgaacgcagcccagtgaccgttttccacctactatccaatttcaatgtcggcgtcacaacgcggcggatgcaacaacaaatgagtcgttgttctgttccaagctaattaagtacacgctgtgtgggccgccgactccaatgcgccgctagcggggatcacgagcagttggcgtcatgtccagttcggtgtttacggaggcgcccagcgcccggccggcggcagccgaagccgactccaatctggttgtggtctacagcaagagcggaatctccttcgacgagcgtgcgattgggaacatcatgggtaagtgggtccaataggcctgacacacgctcattgctccccacactgacatgggcttgttgcagaggaaaaatcgatttccaccattagcgtggtgcggattacatcgcccacgccgagcatggtggaccaagaggaagacgaacggctggaggagctggcgaactttatggaaactgccaccgactcggagctggacagtgacaatggcagccaaagtggtggcgataatgccagtgagatggatgaaca

SEQ ID NO: 41054 - DNA, 1605 bp, DROSOPHILA
ttttgcgaaaacagaaaacaaaaaacactgataaaacccacataatttactgcctttgttagcccggttattggctattatcagctaatctcacttgctcgagcactcattgttgtccagagcgccagttaaactttgtcctccgtcgcaacaccatggccgcctttcagatgggatcgggttacgcagtgcccatgaccctcttccggaacaacagggatcgtgctggcaaggccatccttaaggagctgctgccgggcctcaagttcaacgacggcaacctgctggtgctcctcgagggcggcaaggaccagagcctgtacaacaccgacgtggactacgttttccggcaggagtcctatttccagtacttgttcggtgtcaaggagccgggctgctacggcatcctaaccattgatgtgaaaactggtgcacagaaaagtgttctctttgttcctcgctttcccgatgagtacggcacctggatgggcgaactgcttgggctgcaggagttcaaggccatgtacgaggtggacgaggtgttttatgttgacgaaatgagtgtttatctggagggggcgtcgcccaagctgatactcacattgagtggcaccaacagcgatagcgggctcacccttcagccgcccgactttgctggcaaggagaagtatgtgactgactgcaatctgctgtatccaattctctctgagtgccgagtgatcaagtcacccgaagagatcgaggtgctgcgctacgtggccaaggtatcctcggacgcgcacatcaaggtgatgcggtttatgcgtcccggtagaatggaatttgagggcgaatccctgttcctgcaccacgcctactccgtgggcggctgccggcatgcctcctacacctgcatatgcggcagcggaacgaactcgtcgatcttgcactatggacacgcgggcgcacccaacagcaagcccgtccaggatggtgatctctgcctgttcgatatgggagccaactattgtggctatgcggccgacataacctgcacattcccggccaatggaaagttcaccgacgaccagaagttcatctacaatgccgtgctggatgcccgcaatgcggtcacagagtcagcccgtgacggagtctcctgggtggacatgcacaagctggcgggcagggtgttgctgcagcgcctgaaggagggcggcatgctcaagggcgatgtggaggagatgctcgaggcaggtgtttcgggcgtgttccagccacatggcctgggccacttgatcggtctggatgtgcacgacgtgggcggctatctgcccaaggagcccaagcgccccagtgaaccgtggctgagcaagctgcgctttgcccgcatccttaaggccggcatgtatgtcacaatcgaacccggctgctacttcatcaactggctgatggaccgcgctctggccgatccgaacattgctaaattcattaacgcagagatgttcaatcgcttccggaatttcggaggtgtgcgcatcgaggacgatgtgctcatcacgaagactggcgtggagaactttgcgattgtgccgcgaacggtggaggacatcgaggcaaccatga

SEQ ID NO: 41055 - protein, 483 aa, DROSOPHILA
MAAFQMGSGYAVPMTLFRNNRDRAGKAILKELLPGLKFNDGNLLVLLEGGKDQSLYNTDVDYVFRQESYFQYLFGVKEPGCYGILTIDVKTGAQKSVLFVPRFPDEYGTWMGELLGLQEFKAMYEVDEVFYVDEMSVYLEGASPKLILTLSGTNSDSGLTLQPPDFAGKEKYVTDCNLLYPILSECRVIKSPEEIEVLRYVAKVSSDAHIKVMRFMRPGRMEFEGESLFLHHAYSVGGCRHASYTCICGSGTNSSILHYGHAGAPNSKPVQDGDLCLFDMGANYCGYAADITCTFPANGKFTDDQKFIYNAVLDARNAVTESARDGVSWVDMHKLAGRVLLQRLKEGGMLKGDVEEMLEAGVSGVFQPHGLGHLIGLDVHDVGGYLPKEPKRPSEPWLSKLRFARILKAGMYVTIEPGCYFINWLMDRALADPNIAKFINAEMFNRFRNFGGVRIEDDVLITKTGVENFAIVPRTVEDIEATM

SEQ ID NO: 41056 - DNA, 2985 bp, DROSOPHILA
ttggagactggggaaaagctaaaagtggatcaagtaagatggaaacccaattttaatctataacggatatttacccaggtgtttttatttttttttgttttccaggctcatttggagacggtaatccccgctttggacaagcctgtcatggtggttaatggcgcttatcggggatccgaggctctgctaaggaaactggacgagcgcagatattcagtcagcgtggaaatattgcacggtcctctcaaaggcagaattgtagacaacgtgcaatacgaagatatatctaaactacatggcgcctagctgcgcttttctaagttaaattctatagttgtacctttttatgcctaatttgatatatatgtaagtaaaaaatcttaaccatttcggagaaaggctgaaatcgaactagacaaaaatctgcacataatacgttcgttacttaaatttggactgctcagcatttgggttaataaaacatgactttttaatgaaaataactagaacactctcatttactcagtgtacgaatatttcagtgggtatgcaaacaatattttcgagttcagtttgggaacaataaaaccagcgaacaatggccgctttactagcgataatttctatacttgcaaaacttaaactagttccagcatcggtgtgctaaagaagggatatgaggattctgtgtggcattgttatcctattacgcctcggagcattgggagatatagctgttgacgaagagggaaggttgacgcgaagctggtgggatgcagtgcctagacttttaactgacatcgccaccattaaggcgaacatactcacagctgctccacttgaattggcttccaacataattgatgctgtgtgtaaggataacgtcctgtgtttatcaacatataaaaagttatttgattttattgtgatctaaatgccaggttcttccaccctctttatggacagaatccctgcgcaaatcactccggacataaggaagatgcattttcagtacatgacgccgtgccagaactacagtgtgcccctgctggaggcctcgaagctgtggaagcactctcgattcagcaagggacgtaaggtggtaattctggccaccggatggaccaacaccgtaaacgaatcctcggccatttcgatgatctctaaggcattcatgtgtcgtggcgatgtgaattttgtggttcgtctcgtgaatcaattctgaaagttcatatctaaggcttccatctcagattgtagatgcggctgactatgtggacaccttctacgcgtggtcggcgctgaacacggatttaattggagagcatattggagttggtctgacccaccttatagagctgaccccacttcgaaatattcacttgattggtgggttcataaaggaatcctttgtgtccataaattctggttctgatttctttgtaggacattcactaggagctcacattatgggcactgctggtcggacttttaagaagcttaccggaaaacttatacccaggataactggcttggatccggccaagccatgtttcaggcgggaaaagattctgccaggattgacgcgtggcgatgccaagctagtggacataatccacaccaacattggtattttggccaagcgtggacccctcggtgatgtggacttctatcccggcggagcacatcccatccagccaggctgcctaaccatcggatgctctcatacccgagccgttgagtatttcgccgagagtgcatatccacaccaagagaagaactttatgggcaagaagtgcgcttcttgggatgagctaagaaaacgggattgttctgctggcatagtttccccgatgggctatcgaatgaatccccaagccaggggcatctactacgtagatgtcaatggctggcccccttacggccgaaactcggagaacactgttgatcctaggcttaaaacgtgctacttgtgccggaggtgaagtccgaaccatggaataatataacttttcttatttacgatgcttaaatatatatgtaccttagttaatttatgttgtacaacgtttagtaatcgatttgcgtaagatctagatcatcattgaaggcctcggatatgtccttttggctctgcatgatacgctcctgggtttccgcgattcgccacaactcatcgtcatcgtcacccatcagcatggaccgatccccatggcccttgatatctggacggattctggccttgggcggagcagaaccattggcgcgcttctgccggttgcccatcgctatctggctctcctcgaagtagttgttggggtgattgatgctcggctcgacgggtgaattgtgggtaagttggaagtacttgccgcatccaatttgatagtgaccgcgggacacaaagaacatcacctcgtcgatggcactggctgacaggccataggaggacagcttggttttcaacgagccctgatccatgttcttatacggacagccgtggcaatcgcccggccccgccacatccttgataatcttggcgcacgagtagggtgtgtagttgaccatggaacccttctttccgtagttatggtaaatattgtactcgtagctgcgtgtaaacttatccgcgtccattttcttggtaaactcttcgcgccagaagcgcagcgaatcctccagtgccacgccaattcctttgagaaacaggccgtattgcattcggccgctatgttttatgtgatggttggcacgaatgtgctcgtggcacatgcgcatacacaacggcatggaggtcttggagagctgatcgagcgactcgatgggcacagctgcatcccgacaaacggtgtaatccctaccggtatacgagttatgtagagctttaagtgtgcgggagatgcgctcgtcggcttctacatcctccaccatagtcttagcagcctgcaggccttgctcgatctcgtcctgctgcttggtgcccac

SEQ ID NO: 41057 - DNA, 876 bp, DROSOPHILA
atgcattttcagtacatgacgccgtgccagaactacagtgtgcccctgctggaggcctcgaagctgtggaagcactctcgattcagcaagggacgtaaggtggtaattctggccaccggatggaccaacaccgtaaacgaatcctcggccatttcgatgatctctaaggcattcatgtgtcgtggcgatgtgaattttgtgattgtagatgcggctgactatgtggacaccttctacgcgtggtcggcgctgaacacggatttaattggagagcatattggagttggtctgacccaccttatagagctgaccccacttcgaaatattcacttgattggacattcactaggagctcacattatgggcactgctggtcggacttttaagaagcttaccggaaaacttatacccaggataactggcttggatccggccaagccatgtttcaggcgggaaaagattctgccaggattgacgcgtggcgatgccaagctagtggacataatccacaccaacattggtattttggccaagcgtggacccctcggtgatgtggacttctatcccggcggagcacatcccatccagccaggctgcctaaccatcggatgctctcatacccgagccgttgagtatttcgccgagagtgcatatccacaccaagagaagaactttatgggcaagaagtgcgcttcttgggatgagctaagaaaacgggattgttctgctggcatagtttccccgatgggctatcgaatgaatccccaagccaggggcatctactacgtagatgtcaatggctggcccccttacggccgaaactcggagaacactgttgatcctaggcttaaaacgtgctacttgtgccggaggtga

SEQ ID NO: 41058 - protein, 291 aa, DROSOPHILA
MHFQYMTPCQNYSVPLLEASKLWKHSRFSKGRKVVILATGWTNTVNESSAISMISKAFMCRGDVNFVIVDAADYVDTFYAWSALNTDLIGEHIGVGLTHLIELTPLRNIHLIGHSLGAHIMGTAGRTFKKLTGKLIPRITGLDPAKPCFRREKILPGLTRGDAKLVDIIHTNIGILAKRGPLGDVDFYPGGAHPIQPGCLTIGCSHTRAVEYFAESAYPHQEKNFMGKKCASWDELRKRDCSAGIVSPMGYRMNPQARGIYYVDVNGWPPYGRNSENTVDPRLKTCYLCRR

SEQ ID NO: 41059 - DNA, 5243 bp, DROSOPHILA
cagaaataataggtagctgcggtacacatgtgcggctaattctgccatgatacggcttatcaattttggcaatatcttcccttgaatggcccgggactatcagcgtatcgctttttcggtggcactgggcgtcccgcttcacgcccacgccatgttccttatcggataattatctggacgtcggagtacggctattaggcccgtacttcaatgggatcggtgctccggatcaaccgatatagccacggctcgcttttggccagcacatagtgagttcagtgagacacaattttctatactactcgattgtttgcagatagaaaagttttgatttacggcgtccagtccggagaccgatatgaaaaaaatcacttggaaaatcttagattatcagaccatcggcgatacgaaaaggtggccactaaaacacccgggtccacaaatgcccaattaattatatcaattcccttcatatcatgcatacacagtttattggccgtaaaataatttattgggagataggacttcagcggtagtctcctatgacaaatgatcatcggatacccattgaggaagcaacattttactaatcttccgctgattaacacaatccttatgatagcacaccaattttgctttaagttccaccaaatcttcaatgcgactttgtgcagagtcagcatatcgcagacggagctctatttttataaggattttccatgattattatttataacttaatatcacgctgaaatcaactggttagcagtccaatcgttaaatgcgaacacttataaaaagaaaagaaattggttattgtattatggtaactatacttgtcttaacccacggtgggttttgagtttccccagcttgaaagagaaccagatcacaaagggagtggatcgtttcccgctggaatttgagtggagtggtattgagctggtcggagccagagctcaattagaaactggttttgagtgctgagatcggatctcggctttcagtcgacattcagagctgagctgaggcggtatcaaccggcggcagatagttgagtgtgtacctggaatagtaggccactaataactatccgcccagttaactatccccggtaaactatgcgcaaatcgccggccagcctgccgtcggaggccttctccagttcgaactcctcgctgagcaactcgtacagcgatggcagcgacctggccaactgggaggagtacgtgtccacagacggcagtctcttctacatggagtatgtgcgatgtgagaagactggcgtctcggcagagcggcgggtggagttcatgcgtcgatcgctgcgcctgggaaagaagtcgtcgcgtcgccagccgcacagcaataatcagaatcagagtcagaaccaaaaccagtcccacggcccgagcaggttggatagccagacggagccgcaagagttccgcttctcacagttcaagacggctgcccccgatcccaagaaactggatctggtgatcacagccgctgatcgcttccgtttcggacgacgatccacggcggtggagtccatactgggcttccgggtcctgccctttccggaccaaccagaatgcctgatggtcgatgggttcgttcacgatgtgagtgcgctgcagcacggcatcaagcggggagattggtttagatccctgaatggcatagaggtgtacgccagcaatgtggatgagttgctcaagcagttcgtggagcccactcaggtgtgcctaggcttccagtcgtgcggtgcggccagtgcagtttcgcccaccgatccggggtataatcgaaatgtccgcgaggagcaggtgtgcaaggtggagaactttcccatgttcacggagaagtttgagcagatgttgataacggaggggaacttcggtattcccggtagttccgtggacataagaatgccctttgctatgctgctactcccaccggagtgctatcagcatgaacagcaacaggattccctctactactttccggaaatccccgacaacttcctattcaaggcccgtgggagtttcctcaccctgcacgccgtactcagtgaactgcacacccagccgctgagttcaaggctgctggtggatcaggtgcaataccacgtcaactaccgccaactgaatgggttcctagtcctcttcgcctacgccggaggactctgctgtgcggcggagtgcagcctgcgatcggatgagctaatcggatacatacgcttctctctgccgggcttggtcctggagagctttaatcaggagagagagccggggaatagttcgagactgaagctgttccttcgacacttttgcgaaatccagagaacccggctcgtagccagatgccatggtcatattcgtttcgaggagctcctgggccaatcccgcagcctgccactgccaaaggaagcgcagctgcgcatctttgatgctctgagtgaaatggaggccatggactatcgcaactggaacgacgagccactcaccacccatcgcgagttcttcatctacggcagtgcgctgtactacgatggcttcctggtggccagcctgctgccaccggaagtgagggtgagtgtagaaggattcctgcgctgccgcggaatcttcgagttgctcggagctgctccgggaatcaaagttcgcgagatgtacgtgtgggaggagatagtgttgcccagtgccacagggcgatatttccttaccatctgcaccaagaaccacttgagtctggccgtgatcttgaagatcttcgatgctccagacatggcgccggatgcggtggtgggtccatcgctcttttacatcgaggagattcaagagacgctggaccacctagtacagtgcggcattgaatccctggccatgttctggtccgtttccaataagagacccgaggtgctggacgccactgccagcgagagtagagatcaggagaaggagccgaacaaccgactggagtccttcctcaagcagaagctaaccgtgctgagtccttcggtggaggaggaagcccaactgtgctcgtccctgggtgggtcttccatacatagtctgactcccagtgaggacgagtcctgtcgcaggcgattgacccccatccatggtactgccgaggactcagacagcggttccgactgggagaacttcgccgtacagcatccacttcactatggactgaatctcggggccgagagccacagtcagagccaaatgacagagtccatgtggaaggagatcaacaacgtggtgccggtcaagatatccgctggctggaagaattccgttctgcactacgtctacattgacatagccaatgggtccttgtttgcgccatttaccgacagctccgagaactccaactacctctccgagattcgtcaggcgtgtcacataatccacgccgtgctgcagaaatccaagcactatcgcaggcatctatcggaatcctcgagagcacagacgaactcgaacgggcacagtagccacacagtgtcgctggtcaaggagcacggcatgatcctggaggtcagcacgcaacccaagtcggacgggcaatcccaatcctcgacgagcagtcgcttcgtggtggttggtcgtctctttcagtcgccagccaaggaagtgtacgtgtgtcaccggtccgatgttccccagaacatagtcgaaatggccttccggttgtccttcttctcaatgggatgacatcttggaaggatactaccaacttagatactggctatgcgtagaattcttgctataatataaacacaaatatttaaaatgtggttttaactaaacaaattacttttatataggcattcaaacaattttttaaaattatatttaagaatgcataattaatcattttcagcaattctattacgaaagcatttgatttaggggaagtgcaattttgtattttcaaaattcgaaaagcgcaagcttgccaaaactctaagaaattgaaaaatatgtacatttcctctgaaacgcagcgaataaatatgtatgtatgaaggtatttcaagaggaacacaaacatcgtgcgaatgtgtttcattcattcatagttcgtactagagaagccatcaaaagtgtacactatttttagagtttggtgggagggtcccattctaaaagtagttccacgcaccagaagtcaaaagacacgccgaccaataaatccacgtgaacgagtggctcaaggtggtgctccccaaattgccaatttcccaagattcgtcgacagttgtgtttgggtgtttcaacagaagaggattcttggtggatggatatgatgacagctacgtggatgctgtgtcttgttctctgctccacggcgatggcgacggaggaggaatcgggcagtggactgttcaacgtcaccgggaatcccttggatacagaagctgctccaaaactgcccagcgaagtgcagaaagctgtttgcactgtgactgcgggggaggtgaaggcatctgccgaggctgtcaccacaaaaacccttaagggagtgtgtggatcaggtgggtggtcagtggtctcttgcccgtttgatcttgaaactatttatgctttgtgtgcagatgaaatgaacatggccttccgaagtctggagaacaagctctacgaagagcttcgtgtaatgaaactgattttggtgcacttagccaaggcgaatggacttaagctcaatacagccttttccccatctgtgaccactccacctccgactatgaggccaatcactagcgctgcggtgccgccaatcttcaagccaattgatcctcccaagaagctttccaattccaccaattcgaaagccgaagagaacgaagttgctccagacttcggacttaagaagactcctactctgaaaaacttggattcgaacgcaaatcttggagctcgtgaaaatgaagtcgataagttcaataatactgtactggccgatcaggatgtaaagttgttcacttactattggaagttggagaacgttacggaacttatcaaagcacctaaattggccactgtcagtagtccgatattcagctttaaaggtacatcagtatttggtgtggatctaccgcgtattagttatatctgatttcttggtaatccaattacaggcaagtccctgcaactaaagtgcactttccatcacatgaatcgcgaactgctgaacctgcaactgggatacggcgtctttaaccc

SEQ ID NO: 41060 - DNA, 3103 bp, DROSOPHILA
ctttcagtcgacattcagagctgagctgaggcggtatcaaccggcggcagatagttgagtgtgtacctggaatagtaggccactaataactatccgcccagttaactatccccggtaaactatgcgcaaatcgccggccagcctgccgtcggaggccttctccagttcgaactcctcgctgagcaactcgtacagcgatggcagcgacctggccaactgggaggagtacgtgtccacagacggcagtctcttctacatggagtatgtgcgatgtgagaagactggcgtctcggcagagcggcgggtggagttcatgcgtcgatcgctgcgcctgggaaagaagtcgtcgcgtcgccagccgcacagcaataatcagaatcagagtcagaaccaaaaccagtcccacggcccgagcaggttggatagccagacggagccgcaagagttccgcttctcacagttcaagacggctgcccccgatcccaagaaactggatctggtgatcacagccgctgatcgcttccgtttcggacgacgatccacggcggtggagtccatactgggcttccgggtcctgccctttccggaccaaccagaatgcctgatggtcgatgggttcgttcacgatgtgagtgcgctgcagcacggcatcaagcggggagattggtttagatccctgaatggcatagaggtgtacgccagcaatgtggatgagttgctcaagcagttcgtggagcccactcaggtgtgcctaggcttccagtcgtgcggtgcggccagtgcagtttcgcccaccgatccggggtataatcgaaatgtccgcgaggagcaggtgtgcaaggtggagaactttcccatgttcacggagaagtttgagcagatgttgataacggaggggaacttcggtattcccggtagttccgtggacataagaatgccctttgctatgctgctactcccaccggagtgctatcagcatgaacagcaacaggattccctctactactttccggaaatccccgacaacttcctattcaaggcccgtgggagtttcctcaccctgcacgccgtactcagtgaactgcacacccagccgctgagttcaaggctgctggtggatcaggtgcaataccacgtcaactaccgccaactgaatgggttcctagtcctcttcgcctacgccggaggactctgctgtgcggcggagtgcagcctgcgatcggatgagctaatcggatacatacgcttctctctgccgggcttggtcctggagagctttaatcaggagagagagccggggaatagttcgagactgaagctgttccttcgacacttttgcgaaatccagagaacccggctcgtagccagatgccatggtcatattcgtttcgaggagctcctgggccaatcccgcagcctgccactgccaaaggaagcgcagctgcgcatctttgatgctctgagtgaaatggaggccatggactatcgcaactggaacgacgagccactcaccacccatcgcgagttcttcatctacggcagtgcgctgtactacgatggcttcctggtggccagcctgctgccaccggaagtgagggtgagtgtagaaggattcctgcgctgccgcggaatcttcgagttgctcggagctgctccgggaatcaaagttcgcgagatgtacgtgtgggaggagatagtgttgcccagtgccacagggcgatatttccttaccatctgcaccaagaaccacttgagtctggccgtgatcttgaagatcttcgatgctccagacatggcgccggatgcggtggtgggtccatcgctcttttacatcgaggagattcaagagacgctggaccacctagtacagtgcggcattgaatccctggccatgttctggtccgtttccaataagagacccgaggtgctggacgccactgccagcgagagtagagatcaggagaaggagccgaacaaccgactggagtccttcctcaagcagaagctaaccgtgctgagtccttcggtggaggaggaagcccaactgtgctcgtccctgggtgggtcttccatacatagtctgactcccagtgaggacgagtcctgtcgcaggcgattgacccccatccatggtactgccgaggactcagacagcggttccgactgggagaacttcgccgtacagcatccacttcactatggactgaatctcggggccgagagccacagtcagagccaaatgacagagtccatgtggaaggagatcaacaacgtggtgccggtcaagatatccgctggctggaagaattccgttctgcactacgtctacattgacatagccaatgggtccttgtttgcgccatttaccgacagctccgagaactccaactacctctccgagattcgtcaggcgtgtcacataatccacgccgtgctgcagaaatccaagcactatcgcaggcatctatcggaatcctcgagagcacagacgaactcgaacgggcacagtagccacacagtgtcgctggtcaaggagcacggcatgatcctggaggtcagcacgcaacccaagtcggacgggcaatcccaatcctcgacgagcagtcgcttcgtggtggttggtcgtctctttcagtcgccagccaaggaagtgtacgtgtgtcaccggtccgatgttccccagaacatagtcgaaatggccttccggttgtccttcttctcaatgggatgacatcttggaaggatactaccaacttagatactggctatgcgtagaattcttgctataatataaacacaaatatttaaaatgtggttttaactaaacaaattacttttatataggcattcaaacaattttttaaaattatatttaagaatgcataattaatcattttcagcaattctattacgaaagcatttgatttaggggaagtgcaattttgtattttcaaaattcgaaaagcgcaagcttgccaaaactctaagaaattgaaaaatatgtacatttcctctgaaacgcagcgaataaatatgtatgtatgaaggtatttcaagaggaacaccaataaatccacgtgaacgagtggctcaaggtggtgct

SEQ ID NO: 41061 - protein, 869 aa, DROSOPHILA
MRKSPASLPSEAFSSSNSSLSNSYSDGSDLANWEEYVSTDGSLFYMEYVRCEKTGVSAERRVEFMRRSLRLGKKSSRRQPHSNNQNQSQNQNQSHGPSRLDSQTEPQEFRFSQFKTAAPDPKKLDLVITAADRFRFGRRSTAVESILGFRVLPFPDQPECLMVDGFVHDVSALQHGIKRGDWFRSLNGIEVYASNVDELLKQFVEPTQVCLGFQSCGAASAVSPTDPGYNRNVREEQVCKVENFPMFTEKFEQMLITEGNFGIPGSSVDIRMPFAMLLLPPECYQHEQQQDSLYYFPEIPDNFLFKARGSFLTLHAVLSELHTQPLSSRLLVDQVQYHVNYRQLNGFLVLFAYAGGLCCAAECSLRSDELIGYIRFSLPGLVLESFNQEREPGNSSRLKLFLRHFCEIQRTRLVARCHGHIRFEELLGQSRSLPLPKEAQLRIFDALSEMEAMDYRNWNDEPLTTHREFFIYGSALYYDGFLVASLLPPEVRVSVEGFLRCRGIFELLGAAPGIKVREMYVWEEIVLPSATGRYFLTICTKNHLSLAVILKIFDAPDMAPDAVVGPSLFYIEEIQETLDHLVQCGIESLAMFWSVSNKRPEVLDATASESRDQEKEPNNRLESFLKQKLTVLSPSVEEEAQLCSSLGGSSIHSLTPSEDESCRRRLTPIHGTAEDSDSGSDWENFAVQHPLHYGLNLGAESHSQSQMTESMWKEINNVVPVKISAGWKNSVLHYVYIDIANGSLFAPFTDSSENSNYLSEIRQACHIIHAVLQKSKHYRRHLSESSRAQTNSNGHSSHTVSLVKEHGMILEVSTQPKSDGQSQSSTSSRFVVVGRLFQSPAKEVYVCHRSDVPQNIVEMAFRLSFFSMG

SEQ ID NO: 41062 - DNA, 6731 bp, DROSOPHILA
catgagcaccaaagtaattacaggtcgggaaaaggtgaacctgccggtggccagtatcaatatggccaagatgtgtgtgcgctatggcgaggatgtgagacaaatgagagttttgcgacaactccttcaaaacgaagtttacaaggaggtcgatgtgtcggactggttaacctatctgaacaactttctgagctatgaagagtccatgtctccagtagactctgcgtcttcctccttattgggaggcatatgagggcccaaatacgaaaatatatctaaggctccattaaatttaaggaatttcataccgaaagttcaaacttaattattttaagcccgttaattagtatttatctaaatggtttcaaataagaatgcatttgattcgttaccgtttgtcataaattccgtttctgtatttctccattgcaaatatatatttatgctgtaactaaatacacaattacgtacacatttacatataaatacagctactgcgcatgtacatacatacattaataaatatatatgtgtataattacataatattatcgcgatttgtttttaagccttttgcttgttggtttttttgcagttcctcatccttctgccatctcgatttgcctaacgtgtcttgtctttgttcattgtatgtctaaattctttgcagtttacattttacacactcaactatcattaaagtaggcgcttaaatgctaatctcactacgtcatttttatattaagtatatgcatacgctggggagggttagaaaagctgggtgcagagctcagatgttacaaagagcagaatccgatctgcatcaaatattaagcattcattttagagcgacctttcaaattctctagggatcttagatcctggcgaggatctgcattcagggccttgaaaaacatagcacggattcaagcgttgctcttatcattgctctactaggttgggatttcggttttttgtttctgctgtcttgtctttaatttgtttaacactacacatttatcaacatttatttaatattcattccatataggctaggtttctttgaatgtgtctccacttcccggcttgcaattgattcgtatacatttggggacatccgtgtttgttgcgctttgaattctataggaacttgatacaggagtcttttcggtttgacccttgctgcagtttttaaaggtatttaaaggcgaccggcgtttgaaacaaaggacagtcgggatgtgaggaaaccaagggtaacatacataaattaaagggctaacataaaaagtcacatgttgtatttttagaaaatattattttctcttttaaaaaggttttcgtttacaatttagttaaactctttcgctttcgctttatacatacaaattggagttgggctttgtacagaacttgttgctttactatctcataatcgtaattagttatgaattaattagcgttactttgtgtttacttcattaactaatatttaaacgaaggctagcgtgacagcttttgtgtttccaaattatgccaatgctgaaattaaaactactaagactaatcaattaaaattaacaaaacgctgatttaaaaactatggctctctagggactaagagctaattagatagtttcgaccacttaacactattagaatatttttctttgccgttttctgttcaggatatttttttaagttttgctgacaagtttacgaagttaaataattaagctattgattttataaacaaattgtatttgtgttagcccagactaaaacacgcccttgcaagatggcgaaaaacgtcaccaactttgagttgtacaacaatttttcttaagctttaaatgctaaattaaacaacttaaaagtgagtcgggtcaacaatttacaatctgaaacgggttgcactttgggaaatattttaattaagttcttcgtacacgtaatgctttttgccttttgggtttagtttgctcttgctattagcaaactattttcactctagttagggttaggttattttataagtgagtagagaggggtttaatctatttccggggctgagagggttgtgaatgtgagatggggtgcgctgctatagagacaactctctgcaaaggtctttcatctggtttttagtttagctttactattattttagtatttttgtttctgtttttgtttacggtttgtgttatttttttgggagctctgggtgctggtgtcggcgcctttcgtttacctacttttgaagcgtttgctatacaatcatcttggtaagttcttagtcacacatttaaaccttaacaacaacaacaatgttcgctacaattaaacaactaacaacaacgtaagcgtacacaccaaacatggctcacttctggctcgatcgctgctcctctttctgctcctgaatttccactacatccgcatccacttccgactcatgctcctgttcatcctcttcatccgcattctcctccttgagcatgtactcgaggagcagctcatcgactcatccctcgcgttgcgtttccgccgtcgctgacgtcgtggctgtgccaccattcgatggtgactccaccttgatcactccaagctgctgcagttcctctcgtgtgtgctggatgcgacccaccacaacaccgcccatggtcacaaagctcccgtccgccgtcacagcgcccaattgcatagcgctggataagtcccctagagcggccacattaaaatgatggtgcggcgagccatcctgaatgtgctgatgctgctggtgatgttgggccactgtcgtggcggagggcaacgtggttatggtgactccacgctgatcgatatgctgctgctgctgctgggacggaggcggcgggtggtgctgatgctgctgctgttgatggtggtgctggtgttgctgctgctgatggtggtgcgccgccaacggcattcgtcctagtcacccctcatcctcctctgttttgatcttaacaggaacgtagactttgtccatgacgtgtatttttatgtggttgttgagcgtgctggactgtcggaactgcttcttgcagatgacacactcaaaaggcttttcacctaaagaataagacacaaatcagtttcggtcaaaattgtatggtagcacacttcatcactcacccgtgtggatcttcacatggttggccagcgtgctcagttgtcgaaaatgcttgggacaaaagttgcagttataaggcttctcgcccgtatggatcttcagatggttcgtcagcgtcgacgattgacggaaggtcttatcacaaacgttgcatttgtagggcttctcgccagtatggatctttacatggttggtcagtgtgcttagctgtcgaaagcgacgatcgcagacggtgcagtggaaaggtttctccggctcgcggacagctccccctacgccaacggcagcgttgccctctccgggatgctcgctatgtccattggccaggtaatgctcactgtggatcgttgtcggactatgcgtggtcaggtgcgtcagatgtgaagttggtggcggcggttgctgttgttccgccgcagcagcttgggctgctgcagcttgggcagctgccatagccgctgcttgggcggcactatgcgcctccgccgagatcccgcttaagtgcatctggaagggcaaggggagttccgtgggtggcggcggcacagagggtggtccgctcgactgctgttgctgctgctgatgatgttgctgctgctgttgctgttgttgttgctgctgctgttgaaccgccgccatgtgagccggatgcgtggcctgggtgaccgtctcattgttattattgtttgctatggtggtttggggctgggcggccactatgacaatgtcgcagttactgctcatcgccgtagcagcggcatgggcatggggcaggcttttgatatgcatcatggactgctcttgctgggattaggtagtctggattcgggattcgaagctggatttgaatctggtggaatagtggagggagactgcggtacctcggtgacttgaacagaaagctggctaacaaactaagatcgatgcttcaaaaatgccacgacatgctcatcttgggcgcttctctgatgttgttgctgctagtgcctgtgtttggagaagggagattgggattagttgagtcggcggcttggctttttggtatgcaaaaatatgtgaggaattcccaaaacatacgaaatacctaactgcgaaattataaatctaaattattcaatagctgacacactttgatagctgggctcccggctccagctccacttcctccccttgaagccccctttccatatggttcctatggttctttgtgtgcccttattagtgaaacgcattgaagcccattttgtgtcctaactagcatattactccttcgtctcctttaggcaagcctctctacataaataagtatttggaactacacggcttacatatccatacatgtttgtaaggaggtaactggcttactttacggtgtgaaactatgttttaaatcattcaggtataatgattaacgtattaagcgttcaaagcaatattcttgcgagagtaaatattttcgggctttataacatttattaaagagccatactaatattaaactcacaaacaaactgtgatgagtaatttttaaataagatccataacggatgaccgaatccttaaaagatttttatgacttcgatggtatgaaaacttcgaatatacgtcaaagagcataaattattaaacatacgattgattatgcattttgaaacaaaataaaacgcgcgctgcttgcatgcatgtaacttttaatatattttttgaacgctggtttttacgttcgccggacaagttacctgacccgccccctgctcacccaccagacaagatagacactgaggccaacacaacacgcacacacatggagcactcaggtatctctctttttgtgttgaattgacagcgtgttactttctcgccaaattacatgtgtttttctggcaacttaagaacttagtgataactttaccaattggataacaatctcaacggaggcgagatcgacaggattccgaactgaccttttttgggcgggctttttgggggatattttccccttttttcaaaagcagtttttccactaacacgttgcctctagatcgcccctcgcgctcccttcttcagctaaaagtcacaaccactttcagtcgcacacacgtatggacatcactagcgcacacacgtacacgtactgtgtaaaagctcttttgaggttaggatacttttaattttggagctctccgctcgaaaatgtccattgtttttcacacgtctataaacgctatttttgccaaatgattccagacggaattgggtatactgagtgacacacttgaactcttttcgggcgcccacacattgacctacctttccattttgtggctgtgctgtgtggggcctttcaggtttagatttcccccgttttacatcatttttcgcactcgattcggttttttgggggatatgggcctttcggagggtgttcgcgtattgctctcgcctatcagaatcgggtcctcacagcattatctgtggctggttcttcatttataaaaagcgtataaacgttagaaaaatagtacaaatatttcttttcttttttttactgtttcgcgtacaaaatagacgcgaatgaactagtgccaattggggatgggcgatagctatgggggacctgttactgatcacgagtgtgaaggaatcacgatgactgccccgaactcaatgggaaagttggtataagagatcaaatttgggaaaattctcagatttatttaggccagcacatctttataattattttttttcccaccatattaatataaaatcattttctaatgtgacttctcgtgaatatcgaattgccatctctatgctaaatgagctagttccactgaagtcattcacataggaatatgtaagttttctttcgtttttgagaggttttcctcccgccacagtacggtcacactgcccggtgcagaacttttgtataggaatttcgtttgcattattttttattaaattgtacttaaagaccaaatgcaattgctcagaaaagtgcaggtgcaagttttataaaatcgtgcagacccgcgaagcctgcgactgatcaccatgtgcctgcccattggttaaactcagctcgctgttaactttgtttgtgtttttgttgtgacttccagccggcggacgcagttcatctatttggaaggtaagcagaatttaggtaagtatatactgaaggactatactgaaaggtaccttcgatcctgaccgctttttcgttacggcacgagagcctgtccatcacctgcttcacgaatcccttagcatcttcctccttctgctgggccacagcttgaatatgggaatttgccctcagttgcatggcccgaatgtcatcctgcatcgccttcttactgcgctccaccactgcatctagagggtcttcaaaggtagtgcttggctcgaagatgttgccattaccattgccatgtcctgcagaattgtggtttgagtttacagaggccgttgttcgttcatcctcctcgttggaacccaacgttgtggtggtctttggtgccccctctttgaaggacaagtcatcctcgccgcgaggtgtgga

SEQ ID NO: 41063 - DNA, 3345 bp, DROSOPHILA
cgtctattttgtacgcgaaacagtaaaaaaaagaaaagaaatatttgtactatttttctaacgtttatacgctttttataaatgaagaaccagccacagataatgctgtgaggacccgattctgataggcgagagcaatacgcgaacaccctccgaaaggcccatatcccccaaaaaaccgaatcgagtgcgaaaaatgatgtaaaacgggggaaatctaaacctgaaaggccccacacagcacagccacaaaatggaaaggcactagcagcaacaacatcagagaagcgcccaagatgagcatgtcgtggcatttttgaagcatcgatcttagtttgttagccagctttctgttcaagtcaccgaggtaccgcagtctccctccactattccaccagattcaaatccagcttcgaatcccgaatccagactacctaatcccagcaagagcagtccatgatgcatatcaaaagcctgccccatgcccatgccgctgctacggcgatgagcagtaactgcgacattgtcatagtggccgcccagccccaaaccaccatagcaaacaataataacaatgagacggtcacccaggccacgcatccggctcacatggcggcggttcaacagcagcagcaacaacaacagcaacagcagcagcaacatcatcagcagcagcaacagcagtcgagcggaccaccctctgtgccgccgccacccacggaactccccttgcccttccagatgcacttaagcgggatctcggcggaggcgcatagtgccgcccaagcagcggctatggcagctgcccaagctgcagcagcccaagctgctgcggcggaacaacagcaaccgccgccaccaacttcacatctgacgcacctgaccacgcatagtccgacaacgatccacagtgagcattacctggccaatggacatagcgagcatcccggagagggcaacgctgccgttggcgtagggggagctgtccgcgagccggagaaacctttccactgcaccgtctgcgatcgtcgctttcgacagctaagcacactgaccaaccatgtaaagatccatactggcgagaagccctacaaatgcaacgtttgtgataagaccttccgtcaatcgtcgacgctgacgaaccatctgaagatccatacgggcgagaagccttataactgcaacttttgtcccaagcattttcgacaactgagcacgctggccaaccatgtgaagatccacacgggtgaaaagccttttgagtgtgtcatctgcaagaagcagttccgacagtccagcacgctcaacaaccacataaaaatacacgtcatggacaaagtctacgttcctgttaagatcaaaacagaggaggatgaggggtgactaggacgaatgccgttggcggcgcaccaccatcagcagcagcaacaccagcaccaccatcaacagcagcagcatcagcaccacccgccgcctccgtcccagcagcagcagcagcatatcgatcagcgtggagtcaccataaccacgttgccctccgccacgacagtggcccaacatcaccagcagcatcagcacattcaggatggctcgccgcaccatcattttaatgtggccgctctaggggacttatccagcgctatgcaattgggcgctgtgacggcggacgggagctttgtgaccatgggcggtgttgtggtgggtcgcatccagcacacacgagaggaactgcagcagcttggagtgatcaaggtggagtcaccatcgaatggtggcacagccacgacgtcagcgacggcggaaacgcaacgcgagggatgagtcgatgagctgctcctcgagtacatgctcaaggaggagaatgcggatgaagaggatgaacaggagcatgagtcggaagtggatgcggatgtagtggaaattcaggagcagaaagaggagcagcgatcgagccagaagtgagccatgtttggtgtgtacgcttacgttgttgttagttgtttaattgtagcgaacattgttgttgttgttaaggtttaaatgtgtgactaagaacttaccaagatgattgtatagcaaacgcttcaaaagtaggtaaacgaaaggcgccgacaccagcacccagagctcccaaaaaaataacacaaaccgtaaacaaaaacagaaacaaaaatactaaaataatagtaaagctaaactaaaaaccagatgaaagacctttgcagagagttgtctctatagcagcgcaccccatctcacattcacaaccctctcagccccggaaatagattaaacccctctctactcacttataaaataacctaaccctaactagagtgaaaatagtttgctaatagcaagagcaaactaaacccaaaaggcaaaaagcattacgtgtacgaagaacttaattaaaatatttcccaaagtgcaacccgtttcagattgtaaattgttgacccgactcacttttaagttgtttaatttagcatttaaagcttaagaaaaattgttgtacaactcaaagttggtgacgtttttcgccatcttgcaagggcgtgttttagtctgggctaacacaaatacaatttgtttataaaatcaatagcttaattatttaacttcgtaaacttgtcagcaaaacttaaaaaaatatcctgaacagaaaacggcaaagaaaaatattctaatagtgttaagtggtcgaaactatctaattagctcttagtccctagagagccatagtttttaaatcagcgttttgttaattttaattgattagtcttagtagttttaatttcagcattggcataatttggaaacacaaaagctgtcacgctagccttcgtttaaatattagttaatgaagtaaacacaaagtaacgctaattaattcataactaattacgattatgagatagtaaagcaacaagttctgtacaaagcccaactccaatttgtatgtataaagcgaaagcgaaagagtttaactaaattgtaaacgaaaacctttttaaaagagaaaataatattttctaaaaatacaacatgtgactttttatgttagccctttaatttatgtatgttacccttggtttcctcacatcccgactgtcctttgtttcaaacgccggtcgcctttaaatacctttaaaaactgcagcaagggtcaaaccgaaaagactcctgtatcaagttcctatagaattcaaagcgcaacaaacacggatgtccccaaatgtatacgaatcaattgcaagccgggaagtggagacacattcaaagaaacctagcctatatggaatgaatattaaataaatgttgataaatgtgtagtgttaaaca

SEQ ID NO: 41064 - protein, 308 aa, DROSOPHILA; identical to SEQ ID NO: 26256

SEQ ID NO: 41065 - DNA, 8530 bp, DROSOPHILA
catctgtgttgggatcgctgatgagcaggacctttagtccattttctagttgcaatccgcggtagtcgcgtgtgtcctgcagcgacttttcaatgttgttcagcctataaacgacgaaccattgcctttcgacgacctctaagatgcgtaacgtgcacttacctcaatatgggctccatgctgtctggcttcctagttgcggacttttgcgagctttcggctattgtcatcttgggttttataagcgtgccaatcgttcgatgtgttactgaaatgctggccctcaacgcacttgacctgtgcgaaataaatgcgatttagtggtgcccgttagcggaaatttgtttaattgctgccaaccgtcgaccaaaaaccgctgttaaggcaaaaatcgattttctgcacgtaagatacattgagtttgtgaaatactcttgacgacgctactccggctttacgtagcgcgcacaagaaatcttagagtgggaggagtagatttccaagccggtcggttacacgttcaatcaattttaatcgctttttggaccgaaaaataaattctaactagtttcgcaacaactaaaatagcaaacaatcatctgttcgcagagctgccaactcaccgcgcacgcagaactagtttaatatgttgccagatcgtttattttgtgagtggttccagatttgaaattcccaattggagaaattttacaaagtggtaggccatattttcaaatacgaaagacttaataagtttaaagtgatgatttttaatagttctaatgtaactttggactaaagtaagctgcatattcaccttacctaggatagatggcgatttcaaaatgtatttcaaatgcttgaaatttttccaacgaccatacaataaatattgggcaaccctgataacagtcattataaaaataaatattccgtgaattcccgttctccgtcaatctggcagtgctccgcgcccaaccgccgccgttttccaacactggccggttgccgtcaaagcgcgtagaagaattgcgggctgtaactgcaatttattattttttaatttcatttatagtgcacctggtcagcgagcactggctcatccgcagccatccgtcggcaaccagctcgcagcgatgttaaacttgtgccagccgtaaagatttcgcgtgtttgcgaaccacaaactgcgtcgccatcggtgtgtgggtgcagaaataaatgcaaattgttgtaaaatgccgtgctttggtgtgcgtgttgataagtgcaatacgcaaaagtaagaacattgaggcaaatccgtgcaattcgtgcaatccgtgggatcaggcgttttcagaggtgagtgctgcagtgctacgtccgcggagatttatgagttcgggaattctgtgctctccccttcggccagcagtcgaagaattaggttctaatcaggttttaattgtttacccaccaacatgcgttttcctcgagaaaaagtgcaagtgttcaacgatttttctcccctaaatgggtcaagtttgccggaatgtcgagtccgaacttcaagatcccctcctaaaagtcccttctgtgcctccttgtgtgcgagtctgaatgtgtgtgtggtttggtaacggtatttgtggccgttttgcaatggcacgagaaaatcaataagctggcaaaattgaagaaaggagacttcccagacatggcaaaacagcgcagagtttgttaataatgctaatatgctggcgtgttctgcgaattctcgcgaatcaaaatgtctaattaaaccacaggttcacacctcgcatgagaaataaattggaaccagtccctaaataaactttgtttttatttcccaagattatggttggtgcaaatattttacaatgaaaactaagaacataccttttaaaaactaaaaaatacgatctttccattttcaaaatacctgatatcttcaaaaactaacagttgtttaccttcacaacgtcttctttctttgtttctttgtttttgcttcactttgcttaagactgggcacttaaataatatattttaaaaatatttctacaaggaaataataaaaataaaaacggtattttatagtagttatatcagacattaatttttcaatatttgaagaatattcttccctctttaaccttcataaagtcaattcaaatggctctaaatagattgaacacataaattatagaaaatcaaagcaaaagtggaaccgattgccatgtattccagaggtcaacgatccacaatattgacagtaacttaaagtcttcgcacgaacaaaagactttcctgtggagaacaacgatcgcttctggcgaccacttgaagtactttcaattgcatggttattgttttgggtttaaagcgcgtcccaaaatagacagactgcagctcgtcgagaagatcggacaatggattgccatgaagcgtgggccacgcaggaagaagtgtgctcattgcgaccggaggattgaaggcagatatatttttagtgcagcccaattaagttcaattagaggttcaaagagagagagcgagcttatcgctccgtatccgaggtacttactccaacttcctccgcgacaagtggatcaagtgggggtcaatgaattggctggttttatagcctccgtttgcgggatccaatagatttctaagtaaatgatacgaagctggtatctgatttcactatagttattttcacagtgcgcagcgagtaaacaaacaaaattgcctattggcgtagatcagttattctggctttacgtataactgaacgtagaagtgaattttcccagtgcgtagattatttcaaactatgtatttctattttgggaagcacttaggtatctagattaaaatcaaattaatcacgtgatgaaaccattttgccttcacacaaaacgttaatgcagacgacactttgtgtaacttagtaattagcaggtcgattgttagtcgagaatttagcatctgcttatcagaactgaaaaacattaaggcagctattctacgtagttcacttatttatattagaaggggtgtcagcagtttattttattttcaatattttcatttatgtatgttttcctcaggagagaccacattttattaaatcacacaaaaatccaatactattttcatttcagattccataagctggttctgctatttgtgcatgcccaaaatggacaacgagcagccgcatcaagagctagtgaagtgcgtcctggtgggggacacggccgtgggcaagacgcgactgatctgcgcgagggcctgcaacaaacacgtctcgctatctcagctcctctctacgcacgtgccgaccgtgtgggccattgaccagtatcgcatatataaggatgtgggttaccattctctcaagagtcatagttattgcatttaaccgaatccatatacattaaaggtactcgagcgatcatgggaggtggtcgatggagtgaatgtctcacttcgcctatgggacacatttggtgaccacgacaaggatcggcgcttcgcatacggcaggtgtgtagagctcatgtagcagcattttcgccatacgaatcaataagatgccttcttgacctacagatccgatgtggtgctgctgtgcttttccattgccagtccgatttccctgcgcaactgcaagatgatgtggtatccggaaattcgccgcttttgtccggatgttcccgtcattctagttggctgcaagaacgacctgcgctacatgtatcgcgacgagaactatctctcgtatttcggcgagaagggaacctttgttcggtatgcatagctagcaggtttcagccggttttgagtggctttcactttttaatgttgttctttaatcaaatcaattcaattattcaccataatttaattatatttagaacacacgaaagatataattcaatgtttagcccactatagcaaattaatctgtttatatgttcagagatattctatttaattggattaaattaaaggcaatcattactataatctttttttaaagagccgcgttgaagagtgacctggttatgccggatgaggcgcgtgccgtcgccaaagagctaggagtggcgtactacgagaccagtgttttcacatactttggggtgaacgaggtgtttgaaaacgccatccgatccgcgttgattgcacgccgacagcagcgcttctggatgacaaacctgaagaaggtgcagaagcccctgctgcaggcgccgttccggccaccgaagccaccaccaccggaggtcaccgtcatggtcggcaactatcggcaggacatctacaacatgttcctgtcgcaggcctacaccgacctcgtcctggtcggggcgggtggcaccaagttcgccgtgcacaggttcatgctagccgccgcgtccagcatcttccagcgcctgcttagcactgagctgactgatatgggcgggcggagcagcagcgaatctagcatggtcagctcaacattcggggaggccaccattgcggactttaacgatgacacggaggccctgatccgctacgaatcacgcacacaacggtgggtgctgcctcccgattgcattgagcccatttgactttgaatacattttgcacccacagaatgtgggaacacttgaagcgccgctccagctaccaggcgttgcctctcatggagtctaagcggtccaacgatttgtacagggagctgcatcatccggtcctgcagagcattcgcctggtgcacgtggaaaaccatcggggtgtaaatggtctgcagacgattgtcacccttagcaaacttatctctccgcaagctctgcaccagtgcctgagatttatttataccggtaccattgacaaggattgcgataatatcgaggtaggaaatgtttcaatgtattctgtgttaagtttgacctactaatatattgttaattctcacaggaaattcgagaagctgccgatctattagaactgccgcaactgactcagctactttccaggcctcaaaccgttatggagaactccagcgatgagccaaatccgcacatttgcctggtgagcgcattgatgtcatgatatctattttatgatcctaaccattttctgttacatacattagcgcatcaaagaaagcatggaacggcattgcattggtgacgggtgcttcagtgatgtcacctttgaattggacgatggcttaatgaaggtacatacatatgtctgttgaattactatatgaagcacaatcgtttacacttacctttgctgcattgcaggcacaccgcgctgtgttggttggtcgttgtgatgtcatgcgcgcaatgttgttaggcgactttcgcgaggctcattccaatgtggtaggaacgggcacaataccccttaactaaggacagttgtcataaatttcctttaccttagatcgtattccctggcgttaccatttacacattccacaagctgctgtgctatttgtacacagaccagattccgccaatctcggccgtcaagtgcctcaatctgctggagctggccaatagactctgcctgccgcggctgctcaacctggttgaatgccgcgttattgaagatctcactctgatttctcagaacgaaaccaatgaaacggtggatcactgtctaaagctgctcgagccagtgaaggtacacatagagagatcagttaaaaatgatataccgaaattcaatacttttctttttttttcagctgcacaacgcacatcaattggccgagtggtgcatgtcatacctgtgcgtcaattacaaccttatttgtaagttttcactcaagggcctaaaggcgctacaccaggataatcaggagtacttgcgcgagcaccgatggcctccagtctggtatctgaaagactatgattactatcagcgatgcctgaacgagctgaacaaggagcttaagctaaagacttcgaggcgggaatcgcctagcgatgacgagggctgtctgtgctttacgggcggtaagtgttgctacatttacggaactatctgctccacatcccaccacacttaacatcccagtccaatactccagtcggaggatcagctcaggttttagtttcagctagctttagaggacaatgtatgtatcatgacggcggtttgtattcgtagctaggtgtctcgttattgttttcctttcctgttgatttccttgctcatttacaacgacaacgccatcatcataatattaatgtccgaaatttggtcaaagtattctcttgctggctgttaggtaaatcgaagcgaagcgctgatgtgagtggaaccacggataacagcaacgcagataatcagatcttcaacagcgccggcaactcgctcaaccacattgatctggaggcggacatggacctgaatctctgacacccagccctagggcaaggaaggtgtgttgatattaatgtcaaagtaaggattcttcgatatttatgatttacttcgatactttgattccagatcactgcgcttcattgtgatcctgccggtcctgatctgttttatctgtacgattttaagtattttgatacttttccaaatccatacataacaaacctcaagggcacgatttagagtggtcggggagataagggttggaaatggagggggcgtggcgcgtctgcttttgacattacgcaatatatagagcgcaaatttgccttagtgattaacgattaataagtccaacgtagctcgacccagaacaagggagcatactgcagagtgcttcggatttcttatatttatacgcctatataaaacgcaaagcatagacgagtatgtatgcacatgcacctcggcgctgcgaagcatttcgctgtattgccttacgatatatcggtgtacactcaacttgttctgcacgatccctcccatggaatgtggacagccgaaggacgcagacatgtgtatatccatatatttgtacctttacctaagacatgtatgtatgtatatttttgaattcctacttacggaaacatttgtctagccatagctctaagcaattctctacgataaggacgcattttgtacagaatgatagaataaaaaagcaattacgaacaaatctcacgtttcttccttgtaataaaaacgcattttacaatgtaataaatttagaattataacagttcacatgccatttaaaaaaacacaacatttatatcgcagttttcacggattttacactggattgcgatacagtaccatcctccacctcaagatcctgcagcatggcaatcatctcctcgtccgtaatcacaacctccgcccttaggttgttattaatatgtggactaaacgtagccggcgcagattctccagccagttcacgcaattcctgctcaagttgatcatcttcctggctcgcgttctccacaacgctattggacattatgtcctgaacttcccgatgctggtcgagcgtgtcccgcacatcggccaatacttcgtcgacattgtcgtacttcaatccagaattcgagagaaccttcttcaaggtatttgatccgatcttgtaggcatccagaacaacgccactgttctgggcctcatccacactggacagaagagattcgatgttgtgcagggcaagactgcgacgttctaattagagaattttcaaagaacattattcacaaaagccagataaggggtgtctacaataaagattaccatgattcttttccaggagatgcctttttcgtagataggtttttgccatttgccgtttgttctccttcatgtactggcgcactttgtcatcgttcaccttgatctcctcctctaggtcctccaactgcttgagtaactgagcttgggtattctgaagattgtggacggcctggtcttcttggcttatattaagatcgtcgccaggtttttctataacaaaaattatagtttaataatacatactaactacttgagaaccttttaaacttgcttggtattttgatcaagtgaatttggcgtatgcctttttctactttaaattctaggcccaagatttgacgaacatttaaggccaacaggcaagcgcatagatctttgtctgagtaagtgggaactccgtgagtcttacaaagcgttttcaaagcattaaagtgcagtagttttccagtgttttccgacaggactttttcggcgatgagatcgcaagtgttctggaaagttaattatgtaggattcctataatcattggatgatatcacatacgtttaaggcatctaggtgaatccattcaattaaagcggaggcttccaggtcctccgtcaccacgctgtgcttgattttcgaccagctccatgaaagggggcgctttaccaggctgttgacgagccaaccaccccaggaattggccggatcgtactcaaattcactgcgagagcggatctgcttcctctgctgcatctcggatatcacggtgtccaggcaggcgggcagttggtca

SEQ ID NO: 41066 - DNA, 2973 bp, DROSOPHILA
gccggttgccgtcaaagcgcgtagaagaattgcgggctgtaactgcaatttattattttttaatttcatttatagtgcacctggtcagcgagcactggctcatccgcagccatccgtcggcaaccagctcgcagcgatgttaaacttgtgccagccgtaaagatttcgcgtgtttgcgaaccacaaactgcgtcgccatcggtgtgtgggtgcagaaataaatgcaaattgttgtaaaatgccgtgctttggtgtgcgtgttgataagtgcaatacgcaaaagtaagaacattgaggcaaatccgtgcaattcgtgcaatccgtgggatcaggcgttttcagagattccataagctggttctgctatttgtgcatgcccaaaatggacaacgagcagccgcatcaagagctagtgaagtgcgtcctggtgggggacacggccgtgggcaagacgcgactgatctgcgcgagggcctgcaacaaacacgtctcgctatctcagctcctctctacgcacgtgccgaccgtgtgggccattgaccagtatcgcatatataaggatgtactcgagcgatcatgggaggtggtcgatggagtgaatgtctcacttcgcctatgggacacatttggtgaccacgacaaggatcggcgcttcgcatacggcagatccgatgtggtgctgctgtgcttttccattgccagtccgatttccctgcgcaactgcaagatgatgtggtatccggaaattcgccgcttttgtccggatgttcccgtcattctagttggctgcaagaacgacctgcgctacatgtatcgcgacgagaactatctctcgtatttcggcgagaagggaacctttgttcgagccgcgttgaagagtgacctggttatgccggatgaggcgcgtgccgtcgccaaagagctaggagtggcgtactacgagaccagtgttttcacatactttggggtgaacgaggtgtttgaaaacgccatccgatccgcgttgattgcacgccgacagcagcgcttctggatgacaaacctgaagaaggtgcagaagcccctgctgcaggcgccgttccggccaccgaagccaccaccaccggaggtcaccgtcatggtcggcaactatcggcaggacatctacaacatgttcctgtcgcaggcctacaccgacctcgtcctggtcggggcgggtggcaccaagttcgccgtgcacaggttcatgctagccgccgcgtccagcatcttccagcgcctgcttagcactgagctgactgatatgggcgggcggagcagcagcgaatctagcatggtcagctcaacattcggggaggccaccattgcggactttaacgatgacacggaggccctgatccgctacgaatcacgcacacaacgaatgtgggaacacttgaagcgccgctccagctaccaggcgttgcctctcatggagtctaagcggtccaacgatttgtacagggagctgcatcatccggtcctgcagagcattcgcctggtgcacgtggaaaaccatcggggtgtaaatggtctgcagacgattgtcacccttagcaaacttatctctccgcaagctctgcaccagtgcctgagatttatttataccggtaccattgacaaggattgcgataatatcgaggaaattcgagaagctgccgatctattagaactgccgcaactgactcagctactttccaggcctcaaaccgttatggagaactccagcgatgagccaaatccgcacatttgcctgcgcatcaaagaaagcatggaacggcattgcattggtgacgggtgcttcagtgatgtcacctttgaattggacgatggcttaatgaaggcacaccgcgctgtgttggttggtcgttgtgatgtcatgcgcgcaatgttgttaggcgactttcgcgaggctcattccaatgtgatcgtattccctggcgttaccatttacacattccacaagctgctgtgctatttgtacacagaccagattccgccaatctcggccgtcaagtgcctcaatctgctggagctggccaatagactctgcctgccgcggctgctcaacctggttgaatgccgcgttattgaagatctcactctgatttctcagaacgaaaccaatgaaacggtggatcactgtctaaagctgctcgagccagtgaagctgcacaacgcacatcaattggccgagtggtgcatgtcatacctgtgcgtcaattacaaccttatttgtaagttttcactcaagggcctaaaggcgctacaccaggataatcaggagtacttgcgcgagcaccgatggcctccagtctggtatctgaaagactatgattactatcagcgatgcctgaacgagctgaacaaggagcttaagctaaagacttcgaggcgggaatcgcctagcgatgacgagggctgtctgtgctttacgggcggtaaatcgaagcgaagcgctgatgtgagtggaaccacggataacagcaacgcagataatcagatcttcaacagcgccggcaactcgctcaaccacattgatctggaggcggacatggacctgaatctctgacacgtttcttccttgtaataaaaacgcattttacaatgtaataaatttagaattataacagttcacatgccatttaaaaaaacacaacatttatatcgcagttttcacggattttacactggattgcgatacagtaccatcctccacctcaagatcctgcagcatggcaatcatctcctcgtccgtaatcacaacctccgcccttaggttgttattaatatgtggactaaacgtagccggcgcagattctccagccagttcacgcaattcctgctcaagttgatcatcttcctggctcgcgttctccacaacgctattggacattatgtcctgaacttcccgatgctggtcgagcgtgtcccgcacatcggccaatacttcgt

SEQ ID NO: 41067 - protein, 735 aa, DROSOPHILA
MDNEQPHQELVKCVLVGDTAVGKTRLICARACNKHVSLSQLLSTHVPTVWAIDQYRIYKDVLERSWEVVDGVNVSLRLWDTFGDHDKDRRFAYGRSDVVLLCFSIASPISLRNCKMMWYPEIRRFCPDVPVILVGCKNDLRYMYRDENYLSYFGEKGTFVRAALKSDLVMPDEARAVAKELGVAYYETSVFTYFGVNEVFENAIRSALIARRQQRFWMTNLKKVQKPLLQAPFRPPKPPPPEVTVMVGNYRQDIYNMFLSQAYTDLVLVGAGGTKFAVHRFMLAAASSIFQRLLSTELTDMGGRSSSESSMVSSTFGEATIADFNDDTEALIRYESRTQRMWEHLKRRSSYQALPLMESKRSNDLYRELHHPVLQSIRLVHVENHRGVNGLQTIVTLSKLISPQALHQCLRFIYTGTIDKDCDNIEEIREAADLLELPQLTQLLSRPQTVMENSSDEPNPHICLRIKESMERHCIGDGCFSDVTFELDDGLMKAHRAVLVGRCDVMRAMLLGDFREAHSNVIVFPGVTIYTFHKLLCYLYTDQIPPISAVKCLNLLELANRLCLPRLLNLVECRVIEDLTLISQNETNETVDHCLKLLEPVKLHNAHQLAEWCMSYLCVNYNLICKFSLKGLKALHQDNQEYLREHRWPPVWYLKDYDYYQRCLNELNKELKLKTSRRESPSDDEGCLCFTGGKSKRSADVSGTTDNSNADNQIFNSAGNSLNHIDLEADMDLNL

SEQ ID NO: 41068 - DNA, 8999 bp, DROSOPHILA
gttttccagtgttttccgacaggactttttcggcgatgagatcgcaagtgttctggaaagttaattatgtaggattcctataatcattggatgatatcacatacgtttaaggcatctaggtgaatccattcaattaaagcggaggcttccaggtcctccgtcaccacgctgtgcttgattttcgaccagctccatgaaagggggcgctttaccaggctgttgacgagccaaccaccccaggaattggccggatcgtactcaaattcactgcgagagcggatctgcttcctctgctgcatctcggatatcacggtgtccaggcaggcgggcagttggtcacccctcatgaacagcagttgcagatcccgcaggctgaagattggtcgtccgctgaactttagatattttgcaattaaatccatccagaaattcatttttgcgtcgtagccctccgcatccagatgcctcgatcgaaacatggcgaactgcacctgcattctaccgttgtcctgccagcttgcgggaaagctgaagtggtcggtttcatttaccctgtcaccgcttccaaggcccatatttaaaacaagaatttaatccggatcataaaaattgcgcgtcttttgtgattgtgtgtttatgtcgaatcagctagtttctggtgttgcaaaatgattgaatgtatacaaagcttgtaaacaaattttaaaaggggccgttaatttaatggaatgctaatcaaatgagatacttttttttaagatttttacttaaagctaataggtgcacataaaatgtgtgggaatactcaatttaaaatgtaaatttcgaatcaaatttttaaaaataaattaaagatccaattgctaaattaaaaatttgtaatttaatttagatactgcttgtattgtatacaatttaagacaaattctaccgcttaccaacactgcgcttttcgataagctggatatcgattaactttctccacatcgcaaatcagctgttccatccaggctactagattaaaaacttctgacgaaaattttgttttgaagcttttgttgagtgtgcgtggaactcgccttggcactggagcgtacagcaccattccagaggactccgggaatgcacggaacacgtagctaacttggccgccccaggattccgcagcatcaatgagcagagcagcacatcccagcccctgagacacgttcttggccacgaattcccgcctagatctcctcgctgcccctgaaaggcccccgattgcaacatctgtcggatcatcttgaagtgcgtgcgattctccggatagtccattgttctgcggtgaactgactccgttcaattgagtcttgcaattcatcatgacggaggacgaacagattaacctgcgcaatcagttggcgaggggtaagtggtgctttcgcaagattatggaagcttgcatctgcgtctggcaaataccaaaagcaatacagaaggagttttaattcactataagttgttaggaacatatagatttgagaaggaattggggagttcatataagttcaaaaagagataaggtatttaaacacgaactaagttctcagaagactatctctgatttatacaaaaatatatctaacaattcaattgttcgacttgataaatatggttgattgtttataaactttctaaacctatttttagtgggcagctttgcggttgcgagataaacacaaacagtgattagaaagtaatcacatgatgactgagagcataaactcgaatttagatttagcgatgttaatttagcgggataaatttctaataactgttggcctaatttaggtttttcattttaaaattatttctgttatatagtaaacaaatattccaagcaatgtgtgcttttaaattctttcatacgtttattattgcgagcaaggttgagggtttattgacttggtttaattctgtagcttgaccacttttttagtggcgcgaactgcctgctaagcaaaagcatgcatatgtgataatattttctggtctgtcacagatatgactaacgtcacaatgactgccagctatttacacaaaaccagtgcatcgaaataccctactcgtatcgctgccagatttcatgctctgtgggtacacaacaccatgaatgataagattaacttataactcgcgaaacacatttgtccatttaagctataatcgaaatcagtgtctgcacttgcggaatggctagtagttttccccaaaggctagtgtatgaatgattgccatctcggctctcttcggaccacagctttttcgggcgggttctccgcttggaatttgaaccatttgggaccgcgttatcagggctcttcacactcttatcacgcctgctgcgcctgcagagagagtgttgtgccacaaggcacaggttcggtcatgaatggccagatgattgactatgcattggctgggaattttaccaagttacccacgggccagtcgccgaggcaaatgcaaaagcggacggacgtaatggcgatccacagacgtcgtagggttcacagtgggtcgacgctgctctggcagtgttttaaatgtgttttcgtaatgattaagttcggttcggctcgctcattaatgcggtgaggctatatatgtatgggtgtctccccctccacggtcatatacccactacacatggcgctcagttcgtttggagctgcttatacatatgcgaaagccgcagcgcgtccgccgctgctgctgttgctgtcgcggcttcgggcagtaaaatttcattcaaacgcgtttcacgtctgttttcgaacggtcaacaacggatgggatcggatcgcatcgcatcgcgcgatcaccagttgtcgccatcgccatttagaaacctatgaattgagcaaacaaacatctttcgcggctttcgtggccaatggtccaaatccaacaagcttcaatccactccacactccacaatccaacttgcctgtgataagtgcccgcctctgaacttgtaaatccgttgtgtgtcagcgaaacgctaagctgtaaaataatcaagcaaataaaatgaaagtccccacgcgcaactcgaaatactcattcaatttgaaaatattcaagttgcataacgataagaaaccgaccagccccagtccgccaacctcacctgtgatctcagcgaaacgaaactcatggcgcgcttcgtggcgctcagctctgggttccaagagcaagtccatcgccatggcctcggatagcagctcagatcccatcgatttggaggcggaaccagtgtttttcgagcacagcaggtgcaacagctactgctcctcgtcctccgccttcaccgaactaccgcatcccgccatccaaattccccaaggcgatgagcttatgtgtaagttggcggataatatgtgttcaggttttgggatatctgattggccaaatccagtctccttcgtaaaaatcgtgctaaatcgtgcttaaatacgcttttaattcgcctgatttgaggaataagatggattgaaatgcgtcgcatgatataagtaaattcactaaaaccctaaaaaacccttaatatgattttatttaatatgattttaaggccacaattaatcccatagtcagtggccatcggtatcgtccaatgaacccacagctagttatttagtatttagtattgtagggaataatattttaacatttgcctaaaaatgaagtacttggcgagaagataaaaaccgccggcctcttgactccatccagtttatagttaagattgttaaattctgagtaatgcattctgaaatagacctacacgttaaacaactgattagataaacgtcctgggggatctcgcgatttgcggatcgacaagtgaagatcggacaaattcggttgaagtgtacacctgtattataaaaaaaattgcttgagcccgccaaacggtcaattccctggtcaattcgagcaataccagcgcccgataagctgcgtgccgtgcccggagggcagataagaaaggtgtgtttacccgagcgcggcgcacatgcgttcagttcgagtcgattgctcatttcgctagtgttcagctgtttacggctaatatattatccggcagccagtcagtcagtcagttggagccatcgacgtgtcgcacttgcctgtggcgcccgagtgaaatgtttccggtttaggcaaaccaacgtagtatacaggcgcactgtgctcgtaatgaacccatagccatatactgcccgaaacgaaacccaacgcaacgaatcgaattgaaagcgccgtagttccgtggaatatatacacctcgacatacgcgctgcccgggtctctgggctgggctggtctgactgactggagagtcaaataaaataaaacgcgtttaccagtgattacacgtcggtgttatgtgcagccgattctatagtcgagcggaataaaccagcagcgccacagctccaagggttacacaatgccggaggcgctacactttacatcgatctttgatctcatcatcaagagcggtgcgtgcacttccaaagtccaattcggtgcgaagacattgccaatgcggggaagcctttggtttattacaatataaaagcattctgcttagacgatatccactgtatccgataagtatactctgtgaagtaccctcgcctcgataaagcaaccgttagcaggcagcagtgtgacacagtttggcgtcaatttgatcttgacaccatgagcatgaaccgctttcaagcatttagtttattcatttagctagcctttggcgttcgatttctttatgctcttgtaatgttttgaaacttgttgatttgccattgaatccgattcacaagcttcccgaacatgtttgtcgcagttgtttctcagacaggtttgattacaagtcagtcagatacatatgtgattaagtgttgcaatgccacacatgtggaaaataaggaactaagcaaaatttgacagttgaaatattaacaacacaaccacacaaaatatacaataatatgtttgtgccacaagtgggccaccaaaaaagacccttcgcttattgctgctattactttaatagatgtgggtgggtcatgcttatatgcttatatttaggcaacttacgaactagctagaacaatatatcctgcaaaaatataccttatgatcaatactctgccattgcagcgatgccatggtttggcatggacatcggcggaaccctcaccaagctggtctacttcgagcccaaggacataacgccggatgagcaggatcgcgaggctggcattttgcggaatatccgacgctacttgaccaaaaactcggcgtacggcaaaaccggacatcgtgatacgcacctacaggtgagatgagcgaccaatggaaatgtgggtgtgcgattttgtaacaaagcaaagcaaaaccattagcatcggtattatcacccaaaatattatcaatcgcagcgcgccgagccgcgatatttgcccgcgatccagtcaacaagtcatcttgtgcgggtcggaacgggtcgtctggtgatttcaaatgagttcgggtgctagggttttcgagtgtgagtgcctctgctgtgaccttcactctcgcgcacacacgcctacacggaaagcaaaatcgtgctggtagattagttcattgatgtacttaatctgagtcgtaaccaagttgattagacgtttagcgattcaatcttgataccatcgggaaagcttgcattcccaattggtggtctgtatttgttttcggtgtaccacacacttatctcgcactaatgagattcctttgtttaccttcgaaagcaagtgattcactgtcaagatggtttgcatgtcttattttcatttcaataaacgtttgagccgccatagtaaatcttaagagaccatattgcaaaataaattgttcgacaggctaaaaattaaattaaacaaaatatttttggtgtaaatgtcctacaattaattgcttatttaaaacatcggggtaaatgccccgcgccgaaatagtttgttattcaaagagtgaggccaaaagttgaacactttctaaagaactatgtcaatttacagacgctccctgttgcaagtttaattttcaattttgtacaaattaccctttcacttagactttggatagctaaaattaatggcgatcgtataatcacaccgctttataacctagtaacagtttggacagcactttcgcgaagtgaacattgacttttgcacttttcatttcaattttgtaataggttcagaagtctaatttgcatatttacgtagctcatttctcactcttccgcctggaatacgattgaaagtttttttaaagatgaaaagaatcttattattcttagaataggtaatatttattcgccctaagcggtttttgtaatccctatcgtttttcagatggacaatgtcgagatacgcaaaagacgcggctccttgcatttcattcgcttccagaccacggacatgggcaacttcctatcgcttgccaagcagaagggcatggccgagctggtgaccacggtttgtgccaccggcggtggcgcattcaagttcgagcaggatttccgcgaccaagtcaacatgaagctggctaaattcgacgagctggacacgctcatcaaaggcattctcttcgccgatctgcataatcgcacggagtgctactactacgaaaacgcacgtgacattctgtaagtggaccaagcgctggcgtcaaggagtctgtagatcctaaccatacaatttgtagaaaaagcgaaaagcagcagttcaatttctctcaaccgtttccgtttattctggtgaacgtcggatccggagtctccatcctggcggtctacggtcccgacaactacaagcggatttcgggcacgaggtaagactgctcttcatgaaattacacattattgcaacgatgctaaatgaaatgtattgttcagcttgggcggcggtacattcctcggcctgtgttgtctactcaccggctgcacatccttcgaagaggccatccaactggccaccaagggtgacaataggaaggtggacaagttagttaaggacatttatggtggcgattacaaccgctttggtctccccggcgatttggtggcgtcaaggtagcaaagccagaaatgaagggccatgtaccagttacgaattttccatttctagctttggccagatgcatctcaacgacaaacgggtttccgtatcacgcgaagatctggccaacgccactctggtcaccataacgaataatatcggctccatagcaaggatgtgcgcgctgaatgagaagatcgatagggtaagtatcaattttcgttacatacatatcctcgtagactgagcaacaaacccatttcaggtcgtctttgtgggcaactttctgcgagttaaccccatttccatgaagctgctggcgtacgcaatggagttctggtccaatggcacaatgaagggtcttttcctggagcacgagggatactttggggctctgggttgcctgctgcagttcaacggcgagctggcagccgcccttaacgacggagtggagcattcaatccacactgaatccgattcagcaagcgaagcagcacagacatcttctacggcggacgagccaccagaaaaggcgcccacaagcaaacactccactagatagtcgctataaccacatgttcctcccaagggcacccaacgtgcgccagccgattgaagtgcatgtacagtagacctaagatcaataaggcaatgacaatggcaatggcaatgactttggtccttcgcagttcatctcggtatttatcgtaattctttctcggctttagttgtaacttgatgacgcacaaattgtaaatgcatgaaattacgtatgtatggataaagtgcctgctagaaagcaacgaattttggcccgatcaaatggcgaaccacaatttatgtcttaatttttcgccgcgtaacattttaccatatgttactaccacgctatcttcgacagattcggtagtttttagtttcgattctaaagtgatagatgttagctctcagaaaagtattacaaatacttgacaatagaaacgcaattaaaagtctagcgcgcaacaaaatgacgaaagagcaggtatagcatccacctaatgattcttttaagttattatcttaacgtttttatacatgctttaagtggatgttttaaagttttctttttaggatccaattcgtggacaggtcaataaaacttgttctacacaaactgatggtatgatgatacagtttaaaaacaagacggtaatagccttctctctacctttgcctacttatacaattattgttaaggtttgtgttattctaaaaaaattccgtaataaactagacacgagttgttctgataagaacaaatagtacgctttacgggaaatcagcagacatcttgaatgtatatttgtacggcgcatttggtttcttcaaaacaatgaatgtataagatttggcacatttttaatatgggttatccaatgtgattaagtttcacttcgtttgtatacaatattgctgtagtctctccgaattccacagcttgccttaaagtcaaagacacgcatattgtgatcggtggccacgaacatatattggctatcacaggcgaggctgtacactggcgacaagccattatgacttcgcgtccttcccggaaagtacaattgtacgtatttcttcattcttatatcgtaaaggttgacccgtgcatgtctgttggtgccaaccagcaccgcgtgcagaccatcatactccaaggagtagaaggaggagtcgaacggatcatcccaaatggctacatcgcgatccacgcgtctgtcaaacatacgaaacgtgctatcgaagttggccgtgaaaatgacctggtcatctttcaatttcaggtcg

SEQ ID NO: 41069 - DNA, 1883 bp, DROSOPHILA
ttccatccaggctactagattaaaaacttctgacgaaaattttgttttgaagcttttgttgagtgtgcgtggaactcgccttggcactggagcgtacagcaccattccagaggactccgggaatgcacggaacacgtagctaacttggccgccccaggattccgcagcatcaatgagcagagcagcacatcccagcccctgagacacgttcttggccacgaattcccgcctagatctcctcgctgcccctgaaaggcccccgattgcaacatctgtcggatcatcttgaagtgcgtgcgattctccggatagtccattgttctgcggtgaactgactccgttcaattgagtcttgcaattcatcatgacggaggacgaacagattaacctgcgcaatcagttggcgagggcgatgccatggtttggcatggacatcggcggaaccctcaccaagctggtctacttcgagcccaaggacataacgccggatgagcaggatcgcgaggctggcattttgcggaatatccgacgctacttgaccaaaaactcggcgtacggcaaaaccggacatcgtgatacgcacctacagatggacaatgtcgagatacgcaaaagacgcggctccttgcatttcattcgcttccagaccacggacatgggcaacttcctatcgcttgccaagcagaagggcatggccgagctggtgaccacggtttgtgccaccggcggtggcgcattcaagttcgagcaggatttccgcgaccaagtcaacatgaagctggctaaattcgacgagctggacacgctcatcaaaggcattctcttcgccgatctgcataatcgcacggagtgctactactacgaaaacgcacgtgacattctaaaaagcgaaaagcagcagttcaatttctctcaaccgtttccgtttattctggtgaacgtcggatccggagtctccatcctggcggtctacggtcccgacaactacaagcggatttcgggcacgagcttgggcggcggtacattcctcggcctgtgttgtctactcaccggctgcacatccttcgaagaggccatccaactggccaccaagggtgacaataggaaggtggacaagttagttaaggacatttatggtggcgattacaaccgctttggtctccccggcgatttggtggcgtcaagctttggccagatgcatctcaacgacaaacgggtttccgtatcacgcgaagatctggccaacgccactctggtcaccataacgaataatatcggctccatagcaaggatgtgcgcgctgaatgagaagatcgatagggtcgtctttgtgggcaactttctgcgagttaaccccatttccatgaagctgctggcgtacgcaatggagttctggtccaatggcacaatgaagggtcttttcctggagcacgagggatactttggggctctgggttgcctgctgcagttcaacggcgagctggcagccgcccttaacgacggagtggagcattcaatccacactgaatccgattcagcaagcgaagcagcacagacatcttctacggcggacgagccaccagaaaaggcgcccacaagcaaacactccactagatagtcgctataaccacatgttcctcccaagggcacccaacgtgcgccagccgattgaagtgcatgtacagtagacctaagatcaataaggcaatgacaatggcaatggcaatgactttggtccttcgcagttcatctcggtatttatcgtaattctttctcggctttagttgtaacttgatgacgcacaaattgtaaatgcatgaaattacgtatgtatggataaagtgcctgctagaaagcaacgaattttggcccgatcaaatggc

SEQ ID NO: 41070 - protein, 417 aa, DROSOPHILA
MTEDEQINLRNQLARAMPWFGMDIGGTLTKLVYFEPKDITPDEQDREAGILRNIRRYLTKNSAYGKTGHRDTHLQMDNVEIRKRRGSLHFIRFQTTDMGNFLSLAKQKGMAELVTTVCATGGGAFKFEQDFRDQVNMKLAKFDELDTLIKGILFADLHNRTECYYYENARDILKSEKQQFNFSQPFPFILVNVGSGVSILAVYGPDNYKRISGTSLGGGTFLGLCCLLTGCTSFEEAIQLATKGDNRKVDKLVKDIYGGDYNRFGLPGDLVASSFGQMHLNDKRVSVSREDLANATLVTITNNIGSIARMCALNEKIDRVVFVGNFLRVNPISMKLLAYAMEFWSNGTMKGLFLEHEGYFGALGCLLQFNGELAAALNDGVEHSIHTESDSASEAAQTSSTADEPPEKAPTSKHSTR

SEQ ID NO: 41071 - DNA, 3659 bp, DROSOPHILA
aacgcattttgaacttaaattaaaatcccactttaaatttggaaactggagggaagataagccagttttcggaggaaagatattaatcaaggaatttcgagggaagtggaagaaaaacaatcctacatgttaccacctgagaagcgactcttatgcggttgtttttgctttcgtttcatttgcctgaaactacatggcagccaccccgagattccggcggatagcggagccgtttacgtgttttcatttaatttaaaacattttctttgcccaaattgcaaagtgcatctagtgctgagctcagacatgaagggcttctaaatacccaccttcagctacattgcatgtgccttatagttatttgcttaaatctcatatatttcggataaagtatataattcttattatttgttatggttgaattgaataacattaagaataaaacgtttaaaacaaaagttttcttcaaaaagcattactcgcatggatgggaagtgataagcaattaaacagaaaatattcatcaatcatatgtccttgcggagaagggacataatacgacaaataggaatataaacctaatccaaatgccaagtacattatagtattcatatgtgcaagattaatgtcatttggcatacattcacattaattggggtgcgtaatcccaacttgattattattagaccagaccgttatcacttggaacccaaacattaatatgataaggcggaactccttgtgttttaactgacaccgattagcaaactttttgtcgtgataagagatccactatcgatccgcgtacatttcaaacatatagaaatagatgatatggttgtgaaatgtgttctacgacaacctatcacaacaatgcgaaaagtacgaaccacttatcggtaaactaaatggtcatccgaagtcagcggaaatacgagtacaaatataaggtagaaccagacggtcttctctatcagtttacggcaaaagtctcaccaaaatggttcacaagtcaggaatatatctgctcctggccaccgccatctgtgttctaggtggctgtcatggtgccaatattttgggtgtcttcaccagcctaagtccctcgcatttaatcatccaaatgagcacggccaaagttctggccgagagaggacacaatgtgacggtgatcacggtgctaaagccagtggtcaaccacaagaacattacagtgatcatggtgccactgaccaaggaggagtcccagcaaatgagtgataccattggcgcgatgtcaaagactgacaacagcaacatgatcctatccatgctccgcatgatgggtcagatggaatttatgttcgataagatggcgggtgccctcaaggacgatcgtgttcgtgacctgtatctcaacagggacaacaagttcgacctggttctctctggatactttatgaacgtttaccagcttggattcgccaagaaagtgaaggcacctgtcatcgtcgttgccacaatgccacccaatcaactgttgaatccattgatcgggaaccccctggagatcgcctatgtgccctcaataagcgattccgtcgagaaaggtaaaggaatgtccttccgacagcgcttggctggttacagctcaagcttcttcttcggaattttcgattttgtaacgcagaggcgtagtaagagattgtacaagtaagtgggaaagcttgatgggttagcattctaaggaagtaagcttacataacttttgatttctagggaattgttcggtgatgatcccaacatgcctgagtactccgaactggtaaaaaacacgtcgttgattttcttcgcctcccacgcacccagtgagggtcccatccgaccaaatgttcctgctgccattgagatcggaggcatccaagtaaaggacacgccggatcccttgcctcagaatatggccgaatttctgggtaatgccacggatggcgctattcttttgtccttgggttccaatgtgaaaggaagccacataaatccggacacggttgtgaagatgttcaatgtattgtcgaagctcaagcaaagggtgatctggaagtgggaggatctggagaagactcctggaaagtcagataacatcttctattcgaagtggcttccgcaggacgatatcctagcccacccgaacataaagctatttattaatcacgccggaaagggtggcataaccgaagctcaatatcacggaaagcctatgctatccttgcctgtatttggggatcagccaggaaatgctgacgtcatggtcaaacaaggatttggccttacccagagtctgctctctctagaggagcagccgttcaaagaggctatcctagagatcttgtcgaatccgcagtattttgacaaggtggcttcgttctcctctctgtacagggatcgcccgatgagcgctagggaatcggtgatctactggacggagtacgtcatccggcaccatggagctgcccatcttcagagtcctctggtgcacatgagcttcatagccgccaataatatcgatatatatgctctaattgcagtcgttctagtaattctagtactgcttctcaaattgctgctgcaatttatctataggaaaattttcgcaaaaccaaagaaggagaagaagcactaaaagttttgttagatttctatacatgtactcgtagtaaaaattctcttccagtcgcatataagtttattgaaaataaagaaattatttttataagcctaaaagcttattattttcccttcatttgaaaataataaaatgctcacgatttaaatagatacaatttagttggtgttccattgtgaatggaggatctaaacagaacaaaatccattgtttcgtttcattaaacaaacaaacttcacaaccatttcaaatggtttttatacaggcaatgcattgccatggttggtggtatattatcgtaccaaatactatagcctttggattacaatggaaggcaagcataacctactatctaatcaattgtctcaatacaagtcacacaggcaaaatgattgcagtttgtttaaaccaataataatcacatttagttaattatcgatttttttaatgtaatcaacaaaagccaaagaaaaattattaaagactagtttttctcagccatcttcagatttatttctggttttctgtaatacgactaaaactaaactaaaactaaaaattaactattcacatatattaaatatatttctttcactttattactacaaacaaatcatatgttaagtttggttttattttttatttatatatatttgagcttaaagcttttattttcaataattaattagtttttatgaaaaattttaatgggttttctccttctttggcttcgagatgaatcttctataaataaactgaaccagaaatttaataagtaccaaaactgaaactagtatgacaaatattaggaaacaaatatcgatattattggcggctatgaagctcatgtgcaccagaggactctgaagatgggcagctccatggtgccggatgacgtactccgtccagtagaggaatgattccctagcggtcatcgggcgatcgcggtagagagttgaaaaggacttcaccctttctgcatactgcggattagaca

SEQ ID NO: 41072 - DNA, 1593 bp, DROSOPHILA
atggttcacaagtcaggaatatatctgctcctggccaccgccatctgtgttctaggtggctgtcatggtgccaatattttgggtgtcttcaccagcctaagtccctcgcatttaatcatccaaatgagcacggccaaagttctggccgagagaggacacaatgtgacggtgatcacggtgctaaagccagtggtcaaccacaagaacattacagtgatcatggtgccactgaccaaggaggagtcccagcaaatgagtgataccattggcgcgatgtcaaagactgacaacagcaacatgatcctatccatgctccgcatgatgggtcagatggaatttatgttcgataagatggcgggtgccctcaaggacgatcgtgttcgtgacctgtatctcaacagggacaacaagttcgacctggttctctctggatactttatgaacgtttaccagcttggattcgccaagaaagtgaaggcacctgtcatcgtcgttgccacaatgccacccaatcaactgttgaatccattgatcgggaaccccctggagatcgcctatgtgccctcaataagcgattccgtcgagaaaggtaaaggaatgtccttccgacagcgcttggctggttacagctcaagcttcttcttcggaattttcgattttgtaacgcagaggcgtagtaagagattgtacaaggaattgttcggtgatgatcccaacatgcctgagtactccgaactggtaaaaaacacgtcgttgattttcttcgcctcccacgcacccagtgagggtcccatccgaccaaatgttcctgctgccattgagatcggaggcatccaagtaaaggacacgccggatcccttgcctcagaatatggccgaatttctgggtaatgccacggatggcgctattcttttgtccttgggttccaatgtgaaaggaagccacataaatccggacacggttgtgaagatgttcaatgtattgtcgaagctcaagcaaagggtgatctggaagtgggaggatctggagaagactcctggaaagtcagataacatcttctattcgaagtggcttccgcaggacgatatcctagcccacccgaacataaagctatttattaatcacgccggaaagggtggcataaccgaagctcaatatcacggaaagcctatgctatccttgcctgtatttggggatcagccaggaaatgctgacgtcatggtcaaacaaggatttggccttacccagagtctgctctctctagaggagcagccgttcaaagaggctatcctagagatcttgtcgaatccgcagtattttgacaaggtggcttcgttctcctctctgtacagggatcgcccgatgagcgctagggaatcggtgatctactggacggagtacgtcatccggcaccatggagctgcccatcttcagagtcctctggtgcacatgagcttcatagccgccaataatatcgatatatatgctctaattgcagtcgttctagtaattctagtactgcttctcaaattgctgctgcaatttatctataggaaaattttcgcaaaaccaaagaaggagaagaagcactaa

SEQ ID NO: 41073 - protein, 530 aa, DROSOPHILA
MVHKSGIYLLLATAICVLGGCHGANILGVFTSLSPSHLIIQMSTAKVLAERGHNVTVITVLKPVVNHKNITVIMVPLTKEESQQMSDTIGAMSKTDNSNMILSMLRMMGQMEFMFDKMAGALKDDRVRDLYLNRDNKFDLVLSGYFMNVYQLGFAKKVKAPVIVVATMPPNQLLNPLIGNPLEIAYVPSISDSVEKGKGMSFRQRLAGYSSSFFFGIFDFVTQRRSKRLYKELFGDDPNMPEYSELVKNTSLIFFASHAPSEGPIRPNVPAAIEIGGIQVKDTPDPLPQNMAEFLGNATDGAILLSLGSNVKGSHINPDTVVKMFNVLSKLKQRVIWKWEDLEKTPGKSDNIFYSKWLPQDDILAHPNIKLFINHAGKGGITEAQYHGKPMLSLPVFGDQPGNADVMVKQGFGLTQSLLSLEEQPFKEAILEILSNPQYFDKVASFSSLYRDRPMSARESVIYWTEYVIRHHGAAHLQSPLVHMSFIAANNIDIYALIAVVLVILVLLLKLLLQFIYRKIFAKPKKEKKH

SEQ ID NO: 41074 - DNA, 2718 bp, DROSOPHILA
gcatacgcacacccgatcacacagcctcacaattcccaaaaaaaaaaaaaaaacacagccgtacacagatgtcgcatagagaccaactcctaggatgcactatgttcgattcttttgacttttagccacacagtgcaggcgactgcccttttatatgtactatactcgttgtgaacgcgccattaatgcgctgggtattaaaacacacaccgtatcaccgtatgaccgaccgtatgagatatcaatcataaattcgtagaatttacacaagcatatagcatatttttggataatcgattgtaaagcaggatgtagagtagcagcctagtggaataagacaaggagtgtgtgttaagcgcctaattgtcattgttgacttaaggaaagtgaagtgtggataaacaattgttcaatgccaatgaaaaaagcatgagttaaactgtatacaatatctaggttaatgtcgatgtgcagcttgaagggccattaatttgcaatcgtaccacttttgatacacaataaatgtatttttgttatactacaaatttacaatcgacggaatcgtgggttacggcatgtatttcctgtatttattttgaaatattattaattgtttgaaatgctcccgcaaggcaggccacttgaaagagaaacgtgcaatttactgcctgtgcttcgactattttgtaattagtgaattcttgaatattaaataatattaaatgtgaaactaatctgatttttaaattgtataaaagaataaaatgaaactattttggaagtgtttgtttggaatgtgaatgggggttcattgttatggtagcttatatttcaagttgatttttctttaatcaacaaagtagctatggcttgaaaaacgtttcaaaagagaatcagttacttttcagtaaactttcaaattttaaacttttcgaaactaactgatttcggtatatttttctgaactgctggtatatttaatcattcgatctgtggtcacacctcaaaccgggctaacttttgagttcaactaagttctttaagaattaccattaaaaataaatatggccacctacgaggaagtcaaggacattccaaaccacccggagaagtacctgttcgatgtgcgcaacgagtcggagctgaaggagacgggcgtcctgcccgccagcataaacattccacgtgagaagcgccaaagtccagggattaccggcttaatggacacgcctttttctaatttccagtgagcgagctggagaaggcactgaacttgccggaggaggacttcgcccagacttatggacgcgtcaagccggccgtcgatgcggtcttgatcttctcgtgcaaggcgggaggacgcgctgcccgggcggccaatctggccagcacgctgggcttcaccaagtgagtctcatgttgaagtacgttttaaaagatatgtacaattatttattaatcaattgcagcgccaaggcttatgccggatcatggacggagtggcaggccaagcagtcctaaaacattcagtctttaaacaaattgattacaaatctataaaatgatataataaactacacgctaacttccttaaattcaccccaactgcgtccgatcctcagcttcaccttgagtggcacgctgagtttcacgcagttctccatggtgaggctaaggactttggctatttttttggcctttcccgttggcacctcgaaaatgagttcgtcatgtaggtgcattaccaggtcaactgaattgtcacccaatgccagcttttcgcgataacgttcaatgttcttttccatcttcagaatagcgttcttcgcaatatccgcagccgatccttggatggtggagttaacggcctggcgctcggcctgatctgtgagaaagggagaaaggagggatgttcaaatggagatcacaatcggttttggaagacacatactttttagatgctccacatcactgttgatattttccaaataccgtcgccgtccagtaatggtctcaacaaatcccttgctgcgtgcgaaattgaccaccctcgtggtgtaatcgcgaatacccttgtacgcctggtgaaactgatcggatatcatccgcgcctcctgctcactgcagtttaacgactcggccagggaccgcatgcccatgccgtagacgattccgtagcacacctgcttggtgctgttgcggaggtcctgcgtcacttcggactcttcgattttgttccaatgcgctgcaattgcgatgaacaggtcctgtgacgatttcatcacctccaacagagccttatcctgagacatgtgggcaaggatccgcatctccagctgacagaagtcagccgacaaaagacatcggctctcatccgtgggcatgaatggtgacctacaggatatgtggaccacatcagagcccacttgtatgctgaattctttggcgacattttgcaggttcggctccgtcatggaaatacgacccgttgccgtatatgtaatgctctggccatgaattctgtctgcctggcagcactccattagcggctgaatgcttttggccaagagcccagacagctttcgatagcctagtatcaaatgcgaaatgggcgagttcaacttctccagcacctggcgtgaggtggtaactcgtccttttgctttccggtggagtcccagcaccttggcaacagcttgtgacgagcccagattgaaa

SEQ ID NO: 41075 - DNA, 600 bp, DROSOPHILA
acctcaaaccgggctaacttttgagttcaactaagttctttaagaattaccattaaaaataaatatggccacctacgaggaagtcaaggacattccaaaccacccggagaagtacctgttcgatgtgcgcaacgagtcggagctgaaggagacgggcgtcctgcccgccagcataaacattccacttccagtgagcgagctggagaaggcactgaacttgccggaggaggacttcgcccagacttatggacgcgtcaagccggccgtcgatgcggtcttgatcttctcgtgcaaggcgggaggacgcgctgcccgggcggccaatctggccagcacgctgggcttcaccaacgccaaggcttatgccggatcatggacggagtggcaggccaagcagtcctaaaacattcagtctttaaacaaattgattacaaatctataaaatgatataataaactacacgctaacttccttaaattcaccccaactgcgtccgatcctcagcttcaccttgagtggcacgctgagtttcacgcagttctccatggtgaggctaaggactttggctatttttttggcctttcccgttggcacctcgaa

SEQ ID NO: 41076 - protein, 112 aa, DROSOPHILA
MATYEEVKDIPNHPEKYLFDVRNESELKETGVLPASINIPLPVSELEKALNLPEEDFAQTYGRVKPAVDAVLIFSCKAGGRAARAANLASTLGFTNAKAYAGSWTEWQAKQS

SEQ ID NO: 41077 - DNA, 3043 bp, DROSOPHILA
aaagatatgcgtaagtgaaaataattactatataactgaatgctcacctgaactttgaacttgcggtagcatccatatgaactattgactagagtttcaattgctcacagtgaagaagtgtggatttcttcgtcgttggccacgatttcctgtcagccgttcgtggctcgtggcatggccccaaaaaaagatttcgtattcggcgcacgttgtgcggttacgtcgctgcctgcgcctctaccgcttctgctgcaactgcaacggattgaacctgctgcaaaagtcaataaatattgcctttaactgggggcccttcatttatttataagcccatttggccttggctggcactacctctgcctacgcctcgtccttgagcgatgggtggccttttgtgcgcgcccactcgacgttgttgctgcctccgctgctgaactgataacattaacggaccgacgaccgatttgggtgggcggccaacggacaggtgacaagggggtgggcgtgggcgagtgcgttggctccgcttaacgcgcgcttgcaaatggtcgatggcggattatttaaaagtagtgatttcattgaagattgctggtccgcttatcagtgggcttgagtttgcatatttttgttcttactggtgaataaaattcgcgtcttgtggaaagtgaccagagtcacgaactgggaaaacggtagaacggtaaactagttccattctacgatgattatgatgcgatacatcgaactgctttgttacatatcgcttaaaatcgtgtcaatagaaaataaacggtggatggcatttaaaaaatcggatttgaagcaaaaaaatttaatgatttcattcgtttatatcatcaaatgcagaaaatagatgaccttacaaattaatctaatagcaataccgatatatcgtgaccaccctcacacgtgacagctgtgaacatctgttgcacgaatcacccactgctttcattcgtcgtcatgcgtcattcagtcgaaccgtgctgtgacaaattacgcaatgtctaacaactgatgtaaaacaagcaatttaccaaacagttggccaaattccgtgtgtacacacactccgatcgacccagcgaggcactttaaccagctcctgaccacttcgagatgctgcgcaaaacggcaacgatgggaatcatggcggcggttgccgttaaagcggctcccgagccccagaaaccagcctccagtgcggcggactgcagcctggtgtgccggcccagcgagctgcccatctacggcagcttgcgcaagacagagtgagtgccccaatgcaagaaaaaggtcccagccttaacgatactcctttaatgctaccgcagacccaagccagaacggcatccaccacaagactctgtgctgcacaagaacctggaggccggagtccgctatgtgcgcgaggaggtgcagtctggatataaggcagtggccgatcaagccggcattgtcggccattacgtggaaaccgctaaggcacacacccagtccaccatcgacatgctgaacgagccccagaactccctgcaccgcagcggagccattgtggtgggcggtctggctggtttcatcttcgccgcccgtggaggcttcataaagaaggtgttgtattcgggcatcggagcaggtgcagtcgcctccatgtgctacccccgccaggcggaagaaaactgccgcgtggtactctacgagggccgtaagatcttcgccgtggcctacaacttcatcaagggcgtaaagccaggagaggatgttcccgtagtgcccttccctacctcgctggaggaccttaagtacatggccagtgacctgtacgatgaggcaaaggatctaatcttccccaaaaagaagtaggaagtgccctcccgctaaaggaaactcctagtccacctccatccgggcgaaaagtgtgcatcgatttaagttgtatgaagcttgaattctatccgaaagtagttatctcttttcttgttgccagaaataaattggcctcgcgtcccaaaagtgaaacggcggtttaacttggcaaatgtgtgtgggccgtggccagaacccgctctcacatgaatcttcgagtgattaattgaggtgttggtgtcaagtcaaatgtcacgccagtgagctgttgaaaagtgaaatccggaggaaagtgtcggctgcggatgtctcccatcctccatctccccacgtgcaaaaccgattgtgccaatcatcatcgtcaatgaccatggcccgcagccgaacatggcgatgactacaaattgtgtgaatggtcttggccatccatttgcggtgccctcgggggctgctattgctgaggaggaaatcggctcttatagcgatgggtatctcgagcggaccaattctccgattgcggcattatttattagacaatattttcattaatcttttattgctctcgagctttcgcatcgctatagatagacttgttctttgggcaagatacaaacaacgttcggatgtctgcatgcatttgtttacaataaatatagatttagttaattgttaaatattactacactaaaataccaacaacttgtggacatgcaaatgactcccaatcccccctacccctcccaagccccctatcccttcggctatgtacaaatagataatcccattcgaaatccgaccgatttccttgttagacaacttacggtgctaacatttcgctagactaaattagtgggcgttgactgtgtgtgtgtgtgtgtaggtgaatgggtgagtgcggataggggcgtggcagtggcccacaaggccatgatgttaaaattgttaaattgaagctaactacgcttaacattcctttaagataaatcacacaaaacttatagatacaactgataaattaaaacaaataacaaaagtagatctgccgtcgtcagtatcttctgatcatcatctgacatgctccagtatccacggcgtaaacttggagattctcgtacagactccgggcaaattggcctcggcacagccaatgccc

SEQ ID NO: 41078 - DNA, 980 bp, DROSOPHILA
tcgaaccgtgctgtgacaaattacgcaatgtctaacaactgatgtaaaacaagcaatttaccaaacagttggccaaattccgtgtgtacacacactccgatcgacccagcgaggcactttaaccagctcctgaccacttcgagatgctgcgcaaaacggcaacgatgggaatcatggcggcggttgccgttaaagcggctcccgagccccagaaaccagcctccagtgcggcggactgcagcctggtgtgccggcccagcgagctgcccatctacggcagcttgcgcaagacagaacccaagccagaacggcatccaccacaagactctgtgctgcacaagaacctggaggccggagtccgctatgtgcgcgaggaggtgcagtctggatataaggcagtggccgatcaagccggcattgtcggccattacgtggaaaccgctaaggcacacacccagtccaccatcgacatgctgaacgagccccagaactccctgcaccgcagcggagccattgtggtgggcggtctggctggtttcatcttcgccgcccgtggaggcttcataaagaaggtgttgtattcgggcatcggagcaggtgcagtcgcctccatgtgctacccccgccaggcggaagaaaactgccgcgtggtactctacgagggccgtaagatcttcgccgtggcctacaacttcatcaagggcgtaaagccaggagaggatgttcccgtagtgcccttccctacctcgctggaggaccttaagtacatggccagtgacctgtacgatgaggcaaaggatctaatcttccccaaaaagaagtaggaagtgccctcccgctaaaggaaactcctagtccacctccatccgggcgaaaagtgtgcatcgatttaagttgtatgaagcttgaattctatccgaaagtagttatctcttttcttgttgccagaaataaattggcctcgcgtcccaaaagtgaaa

SEQ ID NO: 41079 - protein, 226 aa, DROSOPHILA
MLRKTATMGIMAAVAVKAAPEPQKPASSAADCSLVCRPSELPIYGSLRKTEPKPERHPPQDSVLHKNLEAGVRYVREEVQSGYKAVADQAGIVGHYVETAKAHTQSTIDMLNEPQNSLHRSGAIVVGGLAGFIFAARGGFIKKVLYSGIGAGAVASMCYPRQAEENCRVVLYEGRKIFAVAYNFIKGVKPGEDVPVVPFPTSLEDLKYMASDLYDEAKDLIFPKKK

SEQ ID NO: 41080 - DNA, 1074 bp, DROSOPHILA
aaaagagccaataacgaataacggccagagaaatttctcgagttttctttctgccaaacaaatgacctaccacaataaccagtttgttttgggattctagaatattcgctttattttggaaatttctttataaatacggctgcttaaataacttatgataaagataatcgaagcgctttgttatgcgtatgccgccaaaacattgctgcgtttctaaagattaaagattattttgtacttttagttaacgaaatcaacgattaacggactttcttctgttttaatagacgataaaattaatttaagactgagaagtgtattagaatttagttgcgacttattttacatatttacatacatatgaggaaaggaaaggctattatttctatagttgtttttgttgttgaactccgtaaccattctggcaaagattacatttcccaattgggatgacggatctcctgcgaggccagcttacgtttctcgtacaccttgtcgcccagcgccttggtgcaggactcacttagcggggcgaacggcggttccattttgtaatccgtaatctaatcaaaataacaatatttgtaggcgggtttttcgtttgcactgcatatcttcacgaacagctgtttaatagggatgccaactcgtgcttttaagcgcgtaaagttttcgattcggcgccaactctccatcgcatttaaataaataatttctcgaggacagatctaaacgagtttttaagcaaactcactccctgacaataaaaacgcaattatctttaaataaatatattctatttattaaccaagtagctaatatagctaaaatcaatttgttgctaacttaaaactaacataattatgtattagttatttacattcttttggttggttacaaccaaataaataatatcacttttaaaaacttaagccaggaactgaataattttctatttggctttagtcgacctcctcgactgtgggtccagagtagccgccaaatcctccggcctgttggccacagttggctcccggacccccagctgctcccgctccctgctgatgcatcttg

SEQ ID NO: 41081 - DNA, 235 bp, DROSOPHILA
caagatgcatcagcagggagcgggagcagctgggggtccgggagccaactgtggccaacaggccggaggatttggcggctactctggacccacagtcgaggagattacggattacaaaatggaaccgccgttcgccccgctaagtgagtcctgcaccaaggcgctgggcgacaaggtgtacgagaaacgtaagctggcctcgcaggagatccgtcatcccaattgggaaatgtaa

SEQ ID NO: 41082 - protein, 76 aa, DROSOPHILA
MHQQGAGAAGGPGANCGQQAGGFGGYSGPTVEEITDYKMEPPFAPLSESCTKALGDKVYEKRKLASQEIRHPNWEM

SEQ ID NO: 41083 - DNA, 6428 bp, DROSOPHILA
aaacaaattatttcaatttttaaagggaaaccttttttattttagggttaagaaagaataaatgcataacaaataaaagcaatgtaattgttaactccaaaaataccttatactactgcattttattgggtgtgtaactcgttctttgtgtggctatttttaatttaatggcttacctgagtgtgttaagtgtaaacaaggcttgtgaagatttatatccaataaaactcaaaatgaatcaagtcagataacatgttttggttatttttaaattgcttattcatttataatccattaaataattccagtattttgaaaaccacagagtcttaagcagctgtgaaagaggtaacttgcaggaatttaccatcaacaaaataaagacgcctaagttaaatattcatttacatttacatatagtttttattatcgattagcaacgtgggttctatgcgtattgttagtgcaaggacgtacaaaagaatctctagaacaatatcacagaaacttactaactaattggtcttgtcaactgcgctgttagaaatcggcgtgacctttagcaacgccattagagtgtaattgggaagcggaatgcttttcagcttgtcgtggaaatttatggcatacattagacgattgagcaccgtctctccaccaccatcctagctgaggctgcaatgaattgccatcgtcgtcgtctcgtctgaattgtgtggtgagtgtgcactttaaaccgaaaccaggtccaattgaagcccaccgtcgtatcggatcgaatcgaatcggaccagatttcgaaacggactacgccctaggcgtagctgccgtcgtggttggcgcatagacctgataatcgacgtcgtcgacaccagccgcttcatcctccaagtcgtgattgaccagtcgttcgcgcattccataccgctgcctgatgatggtgaaaagagatggtaaatgagttagcactctgaaaattagagcaattagccaatagaactcactccaggtgcgagcgccatatgaccaggccggcgtacaggccgatggagaccaaggccagtgccaccaccacgatgccgagcagcacgtgtccctggctaaccgcatccgcctgcacgttcagcgggctcatctcgatgttctcgttggcgaaggtttcggtgtccgtgctgaagatcacaccgcgtcccttgaaacgctcctccagatcgtccacgtcatccatgctactgtcgtcttggtcggcatcgccggattccaggatctccacatcgtacttgtagttctgtgccaaaaccaaattggtggccgagttcagttggtcctcgtcgcggtggggatatgaccgccgctgctgctcctccgattccgcctctgagtcggaatcgtcggaagtatcctgcgattaaaataaaatacaattttagttagtataacatgcatatattattcaagctttaaaattaaacgatcaacatgtttaagctgaatttaacgtatattcactaattatttgttatattttcatatttatctataaattgcctttaattgcgtcaatttgtttttccctgtgtatacaaaaaaaaggctcgtgtcatcgatgtggctttcactgtcggctgagtaattgattttcaaacggcacgtgattctatgcgagttctatgccgaatttgggcaacaaatttgaaagtgggcgttgcaaaagtgtctgaattgtgaaggcgtgtttaatattttttaaagtgccttatagcttcttgagatcatctttacttatgcaaacgaatgaagtagctttaaaaatccggctttcaaatagaaattttagtgaaaattaaaaaaagtcatatacaaattgtaattgctttacaaacatgctaatgttttggatggactcattactttcccctattattaaacaacaagttttaaaccagtccgattaaaaaactgagtgttctattaagccagatagtgttgacttggtaaccgagtctaacaattgaaactgaaatatatccatggaaatcggaagcctcgctgagtcacaactgaaaatttcgaggctttgcgtaagtcaaatgtctccgcatattaatcatcacttaaagcagagactcaccttacttatggctcaattatccaagcgaaacagctaaggaaattggctttcatctcagtttagtttcacttccagctgtctaaactagccaagttatcagtaaggtcgctcgaacttatcttgcataatatgtgtgtgtttggttacccatattatttttccataaagaatgttaatgactgccgcaaccaagttgttttgccaaatgctgactaccacagatcactctcacttactatatagtaagtatcttgtatcccaaatgccctttgtatgtatatgtagattgctgaccccgatgaccgtcgagatcgagataccaactttttgtaattgccagtaacaatacgtgactggttttactgtctctgtctcaatctcatttgcttttttagccgctccatctcgtgtaattggccgatttgttaacaactaacgatagaaaaaaaataaggtgacaagcgagcgatcgagttgggagatctggaaaatcgtaatctgattggggattacccttgtggggatacaaaggggttttctaaacttcattcattcaaacgtcacgacagccggagggattacctagaatccgattccatggtgactcacccaagtgtggttggggtattatcacccgctattataatgccccccaccgattggagtttcgtgactaaggcgttgtgtatccccccctctagaccaagttttttttttataattttatgcaaagtttctgtgcgtgagcttttttatttttgtctttataagcgtttctttcggagccccttaaaaggcgaacgctgcgcgtgtcttctgctggcttttgcatttaaatcaaagtgaaaagtaaataaacatttttaaagcgtaaatttccggttctgggtaaaaataaacccaaaatgcagtaatgcatttggcctggctcgtatttcagcttcttgggtcgttcgttacttagtgcgtcagtgcgtcagtgattccagtcggagtggttttggttttggttttggttttggttttggttttggttttgtcccgttgtaccattctgccccgttgcccggctctcttttggcctggcccagttacccatgcccagcgttttgttttggccaactcacctccacgacagctgtcttatttttggcagccaccggcactcctcgtgctgctccagctcctgcacccagatcacttggctccttcgtctgcggtttgtttaaatcctgcgagggcttggcttgggctaaaagagaaagcaattaagccgaaatgagataatgcattcgcttgaattagccggtatttggttacagcttacagcgggctacctgaataagaaaacacagatcttctcggtttcaggggaagcgcaaatatttaccctttaccccgagatttcgcaactagcacctttttagccaaattgcagatatgtttccttatcagccaactgtgattttattcaaaactaaacaccagacccagacaatacgaatttgttttgctgccaccgccgcattatcagtagacaatgaatttggggttacgctttctggcaaacaaagtaaaagcgtgttgtggctcaaaaaagcagcattaattagcacagacgaggtcaatgaaatagcaatgatggcgtcaataaaatatatgtaaatattttaatatatttatttaaattggaataagtaaatagcagcctgttttactttccgaaactcaataactaactttaaccattccattcctactttaatcactgccactgtacactttaagatttgtttgaatcgtatggttttttttttttgcaaacctgtccgtttatacatacatatatactatatagcagaactgaaacaataaacacatttctaatgccacaaacgattcgccaatgccgatcgctttgggattcgcataaaccgctcacgaatcgcgtcaaaatcgcgcgttagctggtggagcttccaaaaattccacaaacaaaagccaattaaattcgaaaaagcacatgatttagccatgatgtcttgcaatttattgcattcgacattcgtaagtcacccagttttgaattgagtacgtgacgataggccaaagccttcagccgaagaaaacttgatccacttttgacaagtgtcaaagagtccggagagttcttatcactgagttgcgggtgctaacaactttaggacaaataatataagttaagacccagctcataaagttctgacacctcataatctgcaggaaggaacggcagtcatttggccatttgttataaagtaatctcgttggttatgtaatagtagtaatagtaaggaaattttaaggattatattgtaattaaattaattggctttcaagcttaaaaatgaaaaatacaacatgaaaatccaatgctagaatgtccactatcatttcaacaaattgtacttttagaacttattgatttaaaaaagaaatctgaaacccaattatccatctgaatagttccctcttggcaggatttatacaacaacgcctattattttgaccacaactgttcgcttacaattcctgcgtagcgatcatttaccaatatagcgcaaaaggcctggcgaaatcttatctgcactgcgaagccagctggatggatggagttcccccatggaattaaagtcttgcaatttaatttcgcgacctggcgggaccttgatggacgacgattcattgcgacgggacggcgggcggtcgaaccattcaataaaaaccccatatttatgcgctgtaaaccgggcgggcttcaccataaaggcgtcccgaaccggacatggtcttcgatcttggctggcacttaaggcaaagggtgaaccgtaaactgttagctgtctagccaagtggccgctccaactcgatcccatccagctgcgctgcaaactagtttcgctgcagaagtggaaacatcgagtgtgcgtgtctatctatcttgtttcgcccgttgtcactgtagttatatctttttatctgtcgtggtacttacactccgccagcagcagaaccaacagaagcgcactgttgaagaccaaagttttccgcagtgccatcatattgcgaatttatgtagatatgcgggcaccgtcgtcacttcctttatcaattagctccttatcactcacgcacaggttacgcgccactcgatcgctggatacttttcgatgattaagcgctcgttcggcttattctgcgggccaaattgtaaatgtttgttatatttctccgccttgccagttttacgtgcgttcgcgacgagctttccgtgcggaatgacaaactcaagctgagagccagccgagttaaccccaactctgttaactctctgttaaccgatcgaggcagtaacattgacttactgttgggggtattcgaaacgaagaaattacttagcattcttaactttgctcggattttaccaccttgctcgttaaccgattgttaaaggtataaattattattattattcagtacattttattcctgatatgtgctattttgaataacgaagtgggtcatgaatgaattctgtgaattaaaaaatcaaatacttataggcttttttatgctaattattcatcaaataaaaatgtctctaatttataatcactgtttttgtcacaaacatcaaaatatttttcaagtttttgagatacatgaatcacatgcatagaaaacaatgactacttaggtatttgcaaacatttttatttgagcaacaaactattttctccctcaaaacagcaagtttatactacttattaaccaaggtaaaattaaaatgttttacaactgtcatcggaaaataaagcattccatgttttaaaaacacccaatcgaatggattatgtaaaagtattggattttttttattttgcccacttagtagcaagtggcgcttacggatgcccgatccatggggcaaccataaacttggatgtctgtgattagggtaaggaaacataacacttatttcacaagaattcgccagctgcttaaatggtacatgtaaaaatattgaagtatttttatttttctagacattctgagtggcgctcgatgtgtacgtacatacaactctttggattctgtgtgtacagtcaatttacgatgcccaagccgccctgagcgaattccatatttacaagagaagggggtggggattgggaggggggggggtgtcggaaagggttggggccttaaaatacctaaactcaactacactcaacaatttgcttatggtcactactta

SEQ ID NO: 41084 - DNA, 790 bp, DROSOPHILA
cgaacgcacgtaaaactggcaaggcggagaaatataacaaacatttacaatttggcccgcagaataagccgaacgagcgcttaatcatcgaaaagtatccagcgatcgagtggcgcgtaacctgtgcgtgagtgataaggagctaattgataaaggaagtgacgacggtgcccgcatatctacataaattcgcaatatgatggcactgcggaaaactttggtcttcaacagtgcgcttctgttggttctgctgctggcggagtcccaagccaagccctcgcaggatttaaacaaaccgcagacgaaggagccaagtgatctgggtgcaggagctggagcagcacgaggagtgccggtggctgccaaaaataagacagctgtcgtggaggatacttccgacgattccgactcagaggcggaatcggaggagcagcagcggcggtcatatccccaccgcgacgaggaccaactgaactcggccaccaatttggttttggcacagaactacaagtacgatgtggagatcctggaatccggcgatgccgaccaagacgacagtagcatggatgacgtggacgatctggaggagcgtttcaagggacgcggtgtgatcttcagcacggacaccgaaaccttcgccaacgagaacatcgagatgagcccgctgaacgtgcaggcggatgcggttagccagggacacgtgctgctcggcatcgtggtggtggcactggccttggtctccatcggcctgtacgccggcctggtcatatggcgctcgcacctggagtga

SEQ ID NO: 41085 - protein, 196 aa, DROSOPHILA
MALRKTLVFNSALLLVLLLAESQAKPSQDLNKPQTKEPSDLGAGAGAARGVPVAAKNKTAVVEDTSDDSDSEAESEEQQRRSYPHRDEDQLNSATNLVLAQNYKYDVEILESGDADQDDSSMDDVDDLEERFKGRGVIFSTDTETFANENIEMSPLNVQADAVSQGHVLLGIVVVALALVSIGLYAGLVIWRSHLE

SEQ ID NO: 41086 - DNA, 3686 bp, DROSOPHILA
cttagcctatcaactgctgaaagcacttaccacttaagcttctgatcttccccaaagattacaaagtcttccctttaggttttgatatcccaaaatagtttaaggctggacatatttctacagttactaacagttagcaatagtattttatttgaaaagcgtctcggctgcacgaaatacaagacccatctgccattgaagcccactactgtgtttaataaatagttattggtttcaaaggctcgcaggataatgcatttacaaatcaattcctcaaattatatttcaggataaatcttttgtaaatagtattgagtattgggcaaccgatctgacaaaccgacaaaccagttgcagctaacagacgttttacagttagtcaactatgtaacaactttaaaagcatttatatatataaaagtaaatacatgttttaactagacgtagacattaacatagctccctatcaaagtacacatactcgaaaataaatacttctttgatcaacaagataacttagaacacaaaatgtttgttgttgggtaaaaggagggctaaatgcgctgccgatggttaggcatgtatgtaatttgtataatatttatgtacttgctctatttggactacatgcggaagatatcaactagaaacttttggctactactcctacggcatacgtacgtaggtacatatgcgcttaaactaatctgttcaactctgttaaatttcaaatttcgctttgataactcgaccagatttcgttggctaatactcaaattgtgttgaccttggctacaatggtaatacaaatgcgcgcacataagtatgtactaaatagaaacgattacataatgcacactcacaataatgaacataaacacaatgacacggctgaactacgctcctaataattgaattttcgattgcttctccaatttgtttttggttttgttgctgttgtttgatctattggtcatagagccctttccacactggctccttaggccggattaagcacggccaccttgcgtaggctctctagctcgcttctcttcaaacgcagactgaacatggcctcaacaaagccatgacagtccgtcacaatgttgtcctggatcatggtatcccggaatagattggccagggcagcaatatcatcacagcccagaatggcgttcttgtgagtgacgaacatggttagggcggcacgaaaaacgatcttgtagccctcggcaaagacacagtcccatatacgtagcacagtctccacgggcagcacctcggcaaagatgcagatgaaccatttgctggcgatcaccggatagggcaggcctggaataaaaaatatgttagcaactggttacggacttagttctttaaactaaatcttacccaagttatccacatgccgatttacagcgggaattcgccggatgaccaattcgcggaacacggccagatccctcagcagattggccatattatgggaatggtattgcggcacgatgttttcaacgatatgcttgagcagccaaaaggacttctcctcatcgtcggtgacgatcaacaggaggccggctatgtagttaagaccttggcagtaacccacgtcccgattgtgatgggcgtaggcgatgagaatgttgtacaaccgctgcttcttcatatcgaagtgaatattgtcggggaaggtacgaggtagatcgattgatatggaatcgctgatttctttgtcgaagggctcggtgcgcagaaggttgcgaaagagatccggcgagcgacgctgggcggcggcagctccagatatcttcatccagacgtcgggacggtatggaccaggaatgcccttccgaatgtaccgcttcagcttggcgtccacctgggtgagatcggtattttgctgcagaatggcctcccatttcatgcggcgccgcgttaacgttttcaggtaaccatccatgaactttgagtagttgttatagtcgaagtggtcgccacgcttgaagccatattcgtccacatcgctaaccacgtgcggtttagatgcgtaaagatatgcgtaagtgaaaataattactatataactgaatgctcacctgaactttgaacttgcggtagcatccatatgaactattgactagagtttcaattgctcacagtgaagaagtgtggatttcttcgtcgttggccacgatttcctgtcagccgttcgtggctcgtggcatggccccaaaaaaagatttcgtattcggcgcacgttgtgcggttacgtcgctgcctgcgcctctaccgcttctgctgcaactgcaacggattgaacctgctgcaaaagtcaataaatattgcctttaactgggggcccttcatttatttataagcccatttggccttggctggcactacctctgcctacgcctcgtccttgagcgatgggtggccttttgtgcgcgcccactcgacgttgttgctgcctccgctgctgaactgataacattaacggaccgacgaccgatttgggtgggcggccaacggacaggtgacaagggggtgggcgtgggcgagtgcgttggctccgcttaacgcgcgcttgcaaatggtcgatggcggattatttaaaagtagtgatttcattgaagattgctggtccgcttatcagtgggcttgagtttgcatatttttgttcttactggtgaataaaattcgcgtcttgtggaaagtgaccagagtcacgaactgggaaaacggtagaacggtaaactagttccattctacgatgattatgatgcgatacatcgaactgctttgttacatatcgcttaaaatcgtgtcaatagaaaataaacggtggatggcatttaaaaaatcggatttgaagcaaaaaaatttaatgatttcattcgtttatatcatcaaatgcagaaaatagatgaccttacaaattaatctaatagcaataccgatatatcgtgaccaccctcacacgtgacagctgtgaacatctgttgcacgaatcacccactgctttcattcgtcgtcatgcgtcattcagtcgaaccgtgctgtgacaaattacgcaatgtctaacaactgatgtaaaacaagcaatttaccaaacagttggccaaattccgtgtgtacacacactccgatcgacccagcgaggcactttaaccagctcctgaccacttcgagatgctgcgcaaaacggcaacgatgggaatcatggcggcggttgccgttaaagcggctcccgagccccagaaaccagcctccagtgcggcggactgcagcctggtgtgccggcccagcgagctgcccatctacggcagcttgcgcaagacagagtgagtgccccaatgcaagaaaaaggtcccagccttaacgatactcctttaatgctaccgcagacccaagccagaacggcatccaccacaagactctgtgctgcacaagaacctggaggccggagtccgctatgtgcgcgaggaggtgcagtctggatataaggcagtggccgatcaagccggcattgtcggccattacgtggaaaccgctaaggcacacacccagtccaccatcgacatgctgaacgagccccagaactccctgcaccgcagcggagccattgtggtgggcggtctggctggtttcatcttcgccgcccgtggaggcttcataaagaaggt

SEQ ID NO: 41087 - DNA, 1474 bp, DROSOPHILA
taagaacaaaaatatgcaaactcaagcccactgataagcggaccagcaatcttcaatgaaatcactacttttaaataatccgccatcgaccatttgcaagcgcgcgttaagcggagccaacgcactcgcccacgcccacccccttgtcacctgtccgttggccgcccacccaaatcggtcgtcggtccgttaatgttatcagttcagcagcggaggcagcaacaacgtcgagtgggcgcgcacaaaaggccacccatcgctcaaggacgaggcgtaggcagagcaggttcaatccgttgcagttgcagcagaagcggtagaggcgcaggcagcgacgtaaccgcacaacgtgcgccgaatacgaaatctttttttggggccatgccacgagccacgaacggctgacaggaaatcgtggccaacgacgaagaaatccacacttcttcactgtgagcaattgaaactctagtcaatagttcatatggatgctaccgcaagttcaaagttcagcgatgtggacgaatatggcttcaagcgtggcgaccacttcgactataacaactactcaaagttcatggatggttacctgaaaacgttaacgcggcgccgcatgaaatgggaggccattctgcagcaaaataccgatctcacccaggtggacgccaagctgaagcggtacattcggaagggcattcctggtccataccgtcccgacgtctggatgaagatatctggagctgccgccgcccagcgtcgctcgccggatctctttcgcaaccttctgcgcaccgagcccttcgacaaagaaatcagcgattccatatcaatcgatctacctcgtaccttccccgacaatattcacttcgatatgaagaagcagcggttgtacaacattctcatcgcctacgcccatcacaatcgggacgtgggttactgccaaggtcttaactacatagccggcctcctgttgatcgtcaccgacgatgaggagaagtccttttggctgctcaagcatatcgttgaaaacatcgtgccgcaataccattcccataatatggccaatctgctgagggatctggccgtgttccgcgaattggtcatccggcgaattcccgctgtaaatcggcatgtggataacttgggcctgccctatccggtgatcgccagcaaatggttcatctgcatctttgccgaggtgctgcccgtggagactgtgctacgtatatgggactgtgtctttgccgagggctacaagatcgtttttcgtgccgccctaaccatgttcgtcactcacaagaacgccattctgggctgtgatgatattgctgccctggccaatctattccgggataccatgatccaggacaacattgtgacggactgtcatggctttgttgaggccatgttcagtctgcgtttgaagagaagcgagctagagagcctacgcaaggtggccgtgcttaatccggcctaa

SEQ ID NO: 41088 - protein, 299 aa, DROSOPHILA
MDGYLKTLTRRRMKWEAILQQNTDLTQVDAKLKRYIRKGIPGPYRPDVWMKISGAAAAQRRSPDLFRNLLRTEPFDKEISDSISIDLPRTFPDNIHFDMKKQRLYNILIAYAHHNRDVGYCQGLNYIAGLLLIVTDDEEKSFWLLKHIVENIVPQYHSHNMANLLRDLAVFRELVIRRIPAVNRHVDNLGLPYPVIASKWFICIFAEVLPVETVLRIWDCVFAEGYKIVFRAALTMFVTHKNAILGCDDIAALANLFRDTMIQDNIVTDCHGFVEAMFSLRLKRSELESLRKVAVLNPA

SEQ ID NO: 41089 - DNA, 5055 bp, DROSOPHILA
cgattattattcgatagcttcatttgggttgttgtcccaattaattagctgaaatattttgggagatatcaaagctataatattttatgtccttatggcaagcgggctcactctagcaaatcataagttgaaatccactttagttccgcataaaatttttccacgtcatcgctacgaagtcattgacacttttttctgctaggttatctgttaactgtcagttctggactgtagaataaagtgaccttaatgaaaacataaatttcaataaatgatttaaattgcttataattgaaagtgaaattttgagtattgtctggtgtgaacgctgtgtaacaaatcttgtagaatactcgtgtagttaaaaatgtagaaaatattgacacggctaagccctgacagcgaggacatgaaccacactgtttaagtcaataattttcgaattcaaaattcatttttaaaagtaataaaccgtttatttatttataaatcattgttccccaaacttaaataatgaaaaaatacatttttaaagctaggcttcatagtggactttatacatttttttaaagtattttataaatatgtaacactattaatttttttaaatgtttacctgacataaaaatgtaaaattaaattatacatgtaaaaaaacaagataacaagtaatacacgactcacctacatttcgttgatagattcatgataagcaaaccaaacccatagaagaggccaatgagacttgttgaacaggtgcaacaggtacgatgtcgtagcaacacagcgtaaacaaagcaaaggagctcaagttcagctgttgcattggcaacggacgtgcacggaaatgttttatcaatagccaccaatggacaaggacctcgccataacaaatagaaaattccaagagcagacagttcctccagcaatgtcgcggtttaaaagcgtttagaaattataaaaaaaaaacccaggggaagagtgaatttgggatcggataatggggaatacggagagcaatgttaccagcggggtgaagaagcaggccggagtctccacccaggctctatacaagttcgtgaatctcaagggcggtggactcctggtggacatgatgaaaagagcctgtcaaaccaaacagtttgctgagatcgatcatgctatcaaaaccaaagtggagccctttctgtacaacaagggcgctggacggtattttcccatctcgaagctcgtactgctgcgaaatcgggatcgcccacgcactcgccaattgcccgagatccgagccctcgagaatcctgacgacgatttcaacatccatgactactgccccgaggtttcggaggccgagtatatctccaatcctacggcctatcgattcgtctgctgggatcttaatgtgagtgtataatgtggagtgaataagcccaaatcgattgtattgatggtttcatactactgcttttttggtctatatattttagagtaaacacagttaattttaaatttattaatctttttcagatgcgtggcgctgtgggcgaaactattctccatttgtgcctgctaaatgcatcttccttgcacgcagatctcgccaaaagattgctaaaattctacccgaaactcatcctggacatttacatgagcgacgagtattatggagagagtgtcctgcacattgccatcgtcaatgaagatccggcaatggtgaagtatctgctggatgccaacgcagatgttcaagagcggtaagaaaaaaaaaaaaattcaaaaataattttaaaacatttagattacacaactttaaaaacgcatttaggtgctgtggagccttcatgtcggcggaggatactaagttttctcgcacggattcgccggatcacgagtatgtggcactttgtcccatgaccaactacgatggttatgtttactggggagaatacccattgagttttgccgcttgcctgtcgcaggaggagtgcttccgcttagttttggccagaggtgccgatcccgacttccaggacaccaacggaaacaccgttctccacatgctggtcatttacgaaaagatcgaaatgttcgatgttggctacgaggtagaataatttcttactttgaatagttgttactaattcaaaatggttatttctttaggttggaacaaacatacacataaaaaacattcagaatctcacgccccttactttggcggccaagttgggcagagttgagatgttcttccacgtgatgagcatcgaacgggagatctattggcaattgggtagcatcacatgtgccgcatatccgcttttgatgatagacactataaatgaggaaaccggcaatatcaacaaggactccgtgctgaactttgtggtatttggcgataagctggagcacttggagctgctagatggggtggtcatagatctgctaaagaccaaatgggacacgttctgcaaatcgcgattttacaagcaattttacatgttcgccctctactttctcatctcgctgttcagttttatactgcgtccaggtccggatgccaaggacgaagacgaggatggcgccaatagcactacggctaaaagtgatctgtataggcaaaatggatcggattcttaccatctgcacagcaagcgggctacaatgactaccgaatacagttaagtattgtccttatatttaatatacataatatatctaactgaactttcttttcagaaacattttggcttaattttactgagtactacgatccatcggaagttgaggtcctgcccgcctggtgggaaagttatgctcagtgtcctttgatgaatctcgaatccgatttggccaagcttcgtattatggcagaactgttgaattttgtaggagctatcctgtatctgctggttgctttgcgagaagctcgattcctgggccttaaaatgtttatcgaaaacttggcaagtaaatttaaatacaaaattatcatttctaattaaattgtgatccttagatgacggcaccttcgcgagttatgtttctgttttcgtgtgctttgatgatgactataccctggttgagggtttcctgtctcaccgaaatagatgatcacgtcaccgttgtgataatgctaaccactgctccctattttctattcttttgtcggtaagatagactttcctcgacaattttataatatttttaattacttttgtaattttcttagcggcttcaaaactgtcggtcccttcgtagtgatgatataccgcatggtcatgggagatctgctccgattcgtctccatctacttggtgttcgtcatgggtttctcccaggtattgattccatttcattttactttacttattgcatttctcattgtgactcctcttcttaccaccaggcattttacataatttttctaaccttcgacaacccatcgtcaccagaggatcaggacgcggaatccaacccaatgccctcgcccatggaatcgatagtggccatgttcctaatgtcgctaacaaatttcggtgactactatggagcgatggtgtctacgcagcacgaatacgaggcgaagatcctcttctttctgttcatggtgatcgtgagtgttctgctggtgaacatgttgatcgccatgatgggtaatacgtatcagaagatcgccgagatccgaaacgagtggcagcgccaatgggccaggatcgtcctcgtcgtggagcgaagtgttcctcccgccgagcggttgaagaactttatgcagtacagtcagtcgatgtcggatggcagaagggcactggtcctccggttgaatatgactgtgggtacagaataatttaccttataagtaagattattatatacctttttttcaggaggaggaaaaggaggagatgaaggaggtgcaggagatgaagcgcatccatcaacggttcgccaagaagcggcaaatggagcgcgaggctcgcgcccttcgacgtcaacaggagtacgagaagttcttcggcaccgcccccaaatcggaatgttccgataacaacaacttttgaagatccatttggacaaaccagagtcacttacttagttcaagttttattgggccatgttaatatgtatgtgttctttttgggcaataaatttagactacattgcgcttcacaattcaagtaaaaatatgttttttattgataagtaagaatgagaataagtatcaattattgtttccctttttttcttcatttatataacatattgtagagaaaatctaaatctaatgttggccacagccatcggcacataatcgacgacttatttaggcgagtgccgaaaaatctgtggcacaagtgtcgatgcgtgcgaatgacagttggcccaaacaaacaaatatcgaaatcaaattcactcaaaataacaatttaataaaatcaatgtgcttatgaaaagttcacaccaaaaaagaaagggaacgaagaaaatgattcgacacagggtcctaggtaaatttgcatttgcatgtgggtgggtgggttgttaccataactcaacgactaacacatttttccggctctcgtgtgcgttgacagttttaaatcaaagagcaaagctgaattgcaaacagagttaacaaaaggtcaaaccctcaacccttgacaaccctcacactcaacactccaaacggcaaaataaatggcaaagttatccttcttttgcactttgatttgcataaataatttactttaaacaaactcttgagtatcgaaaaaaaataaggtaaggaaatgttcagccaagaaaaaggcagtcaaaagtgaggggaaaaagagtcggaggaaaatcgaattttcttttgagttctagtggcagttccacctgggaatggtccataattcttatttgaatgcttgtttaaccatttctccacttccaatgccaaatcccaaaaggattcaacctgagtcggctataattctttgctttctttttttttacaatttttggtacaagaacacttgcccagcgaaacaattacgatagttagggccaaatcac

SEQ ID NO: 41090 - DNA, 2253 bp, DROSOPHILA
atggggaatacggagagcaatgttaccagcggggtgaagaagcaggccggagtctccacccaggctctatacaagttcgtgaatctcaagggcggtggactcctggtggacatgatgaaaagagcctgtcaaaccaaacagtttgctgagatcgatcatgctatcaaaaccaaagtggagccctttctgtacaacaagggcgctggacggtattttcccatctcgaagctcgtactgctgcgaaatcgggatcgcccacgcactcgccaattgcccgagatccgagccctcgagaatcctgacgacgatttcaacatccatgactactgccccgaggtttcggaggccgagtatatctccaatcctacggcctatcgattcgtctgctgggatcttaatatgcgtggcgctgtgggcgaaactattctccatttgtgcctgctaaatgcatcttccttgcacgcagatctcgccaaaagattgctaaaattctacccgaaactcatcctggacatttacatgagcgacgagtattatggagagagtgtcctgcacattgccatcgtcaatgaagatccggcaatggtgaagtatctgctggatgccaacgcagatgttcaagagcggtgctgtggagccttcatgtcggcggaggatactaagttttctcgcacggattcgccggatcacgagtatgtggcactttgtcccatgaccaactacgatggttatgtttactggggagaatacccattgagttttgccgcttgcctgtcgcaggaggagtgcttccgcttagttttggccagaggtgccgatcccgacttccaggacaccaacggaaacaccgttctccacatgctggtcatttacgaaaagatcgaaatgttcgatgttggctacgaggttggaacaaacatacacataaaaaacattcagaatctcacgccccttactttggcggccaagttgggcagagttgagatgttcttccacgtgatgagcatcgaacgggagatctattggcaattgggtagcatcacatgtgccgcatatccgcttttgatgatagacactataaatgaggaaaccggcaatatcaacaaggactccgtgctgaactttgtggtatttggcgataagctggagcacttggagctgctagatggggtggtcatagatctgctaaagaccaaatgggacacgttctgcaaatcgcgattttacaagcaattttacatgttcgccctctactttctcatctcgctgttcagttttatactgcgtccaggtccggatgccaaggacgaagacgaggatggcgccaatagcactacggctaaaaaaacattttggcttaattttactgagtactacgatccatcggaagttgaggtcctgcccgcctggtgggaaagttatgctcagtgtcctttgatgaatctcgaatccgatttggccaagcttcgtattatggcagaactgttgaattttgtaggagctatcctgtatctgctggttgctttgcgagaagctcgattcctgggccttaaaatgtttatcgaaaacttggcaatgatgatataccgcatggtcatgggagatctgctccgattcgtctccatctacttggtgttcgtcatgggtttctcccaggcattttacataatttttctaaccttcgacaacccatcgtcaccagaggatcaggacgcggaatccaacccaatgccctcgcccatggaatcgatagtggccatgttcctaatgtcgctaacaaatttcggtgactactatggagcgatggtgtctacgcagcacgaatacgaggcgaagatcctcttctttctgttcatggtgatcgtgagtgttctgctggtgaacatgttgatcgccatgatgggtaatacgtatcagaagatcgccgagatccgaaacgagtggcagcgccaatgggccaggatcgtcctcgtcgtggagcgaagtgttcctcccgccgagcggttgaagaactttatgcagtacagtcagtcgatgtcggatggcagaagggcactggtcctccggttgaatatgactgaggaggaaaaggaggagatgaaggaggtgcaggagatgaagcgcatccatcaacggttcgccaagaagcggcaaatggagcgcgaggctcgcgcccttcgacgtcaacaggagtacgagaagttcttcggcaccgcccccaaatcggaatgttccgataacaacaacttttga

SEQ ID NO: 41091 - protein, 750 aa, DROSOPHILA
MGNTESNVTSGVKKQAGVSTQALYKFVNLKGGGLLVDMMKRACQTKQFAEIDHAIKTKVEPFLYNKGAGRYFPISKLVLLRNRDRPRTRQLPEIRALENPDDDFNIHDYCPEVSEAEYISNPTAYRFVCWDLNMRGAVGETILHLCLLNASSLHADLAKRLLKFYPKLILDIYMSDEYYGESVLHIAIVNEDPAMVKYLLDANADVQERCCGAFMSAEDTKFSRTDSPDHEYVALCPMTNYDGYVYWGEYPLSFAACLSQEECFRLVLARGADPDFQDTNGNTVLHMLVIYEKIEMFDVGYEVGTNIHIKNIQNLTPLTLAAKLGRVEMFFHVMSIEREIYWQLGSITCAAYPLLMIDTINEETGNINKDSVLNFVVFGDKLEHLELLDGVVIDLLKTKWDTFCKSRFYKQFYMFALYFLISLFSFILRPGPDAKDEDEDGANSTTAKKTFWLNFTEYYDPSEVEVLPAWWESYAQCPLMNLESDLAKLRIMAELLNFVGAILYLLVALREARFLGLKMFIENLAMMIYRMVMGDLLRFVSIYLVFVMGFSQAFYIIFLTFDNPSSPEDQDAESNPMPSPMESIVAMFLMSLTNFGDYYGAMVSTQHEYEAKILFFLFMVIVSVLLVNMLIAMMGNTYQKIAEIRNEWQRQWARIVLVVERSVPPAERLKNFMQYSQSMSDGRRALVLRLNMTEEEKEEMKEVQEMKRIHQRFAKKRQMEREARALRRQQEYEKFFGTAPKSECSDNNNF

SEQ ID NO: 41092 - DNA, 8991 bp, DROSOPHILA
aaaaaaaaaaaaaaaaaaaaaaacacctaatcatccggggcccaacatcaaatgcgagatggcaaaaaacaagaggagattgcagaagccaatgccaaacaaaaggccccaaaaagacccaaatcgaagcgcctttatcaactgcggctaagcaaataggcattcgtcactagttgtttcgccgccctgctcccttcgtgcgcgagtcttgaatttatggattttgaaatccgcagcatctttcccatttgtttcttctcttttaaaggttagttgtattatttaaaaaccaaacccgttttagtggcgcgctggtgcagcaccctccattcgtcgggcaaaagaggtccgtccggctgttcgaacttcgaagctcgtgtaaacactcgacaggttgcactcaaccgtaattagcgataaagaagatcttacctcacccagcgctagagatcgcttgacaagcccgacctatgcaaatatatgtctggattttcggtgaattaatttttcgtcaccttcatgctgtttgatatatgaccccttttgatcccatcgaaagcgccctttccgcagatcttcatctagtgagtcacccgaaggtggaaggttacttacgtgattaaactaccgccgcagtatccgaatcggtcataaacttaatttacacaaactgtaaacagaaatattatcttgtttttactgtattcgttgctgagacaaagaggaaaataatttttaatttaatttttgagtcagcctttaagatataatagtccttagctatgggtcaacgataactaataaatatgttaatatttttaaatacttcagagtagaaatattgagtgaactatgtgttttttttagccaccagataggcaataaattaagctcttcgattcggaagatcataaaccgcttccagtacacaccattatcatatattaaacacactctaattgactgtttttcagaataaagctcaagacttacatttaagatggtcaacgtcggccacattttcgtgtgggccttgctcttggtacgtaaatacacaccgatcgatatccatctagaaaccattaaattgctgattattatttcgtataactgtcaaggtcaccactcggggcactgatctgagtgatgatgaggcgctcaatgacgttttaggcgaacttgagtttgacgactcctcgcccagattaacgcgcgacacttctctgtcggccaagcacatcgagaagatcgatgtgaaatgcgaccaaggtagtggcatgatggtcgaggttgagttctccgaggacttcgagggagtcatctacagccaggggtacttcagcgacccaaagtgcaagtgggtatataccattagctagctctgagtcccctctttaactgtcatttttaattttagctacgtgaagggcgatagatcgggacgcagtttcactttcacagtgccatacgatggatgcggcagcaagccctcgtgctccgtttgcgcctcaatcgagaacatcctgatcatccaggacgacagggacatacaaaatagcttcgatatagcacggaaaatatcgtgtagtcgaggcgatgaacgtgagaagactgtatatttcaaaccatttgtcgtggacatgctcgaggttatatcggtagatacaccgagtgggccggtagagtgctggatggagatcgggacgggaactcctcccaatgtcaaacccatccagggcactctaaccctgggaactgacattactttcaccatcaacgttaagcactcggaacaggcatgggatataaacatactgcaatgttatgcctccgatgacatggattttgaggccagaacgacaaagagattgcagctgtcggacaaaaggggatgctcgataaaggagaaaatatttggggagtggcgaaagtttgaggcgggctccagtctaacttccacctactataatacactcaaggcatttaggttccccgatcgatctcaggtgtatctgaagtgtgacattgaactgtgcaatggagcgtgtaagagggactacacttgcggtagtctcaggtcgttgacgtgtcctgaaggatcaactgatcctcagtgtctacaggatcatctaatttcaccaaagcctcgctgctacccaggctccaacgagccaggttgcccaaggcccacttcccctccacccacaacgatcagaataccaatagcctcaacatttacgcccagaccacgatgctatcctggatccaacgatccaagctgtaacgaaactccgcaaactacgtccctacccagttgtcctttgggctcaactgatcctcgctgtcgcgttgccccgccggcaacaaaaaagccaaggtgtttttccggatcaagggatccggaatgtcaaccagctacctatcttccaccaacaacgaggagatcttcgaccaagccgcgttgctatcccggatcaacggatcctgattgccaaccggcaacaagggcacctattaccacagtaaagccaggatgctatccaggctccgatgaccccgagtgtcagcctgcaacttatgttccacaaacaacgaggagaccttccattactacgaagagaccacgttgctacccgggatcaacagatccagagtgtcaacccagaacaaggccaacgattaccacatcacagccaagatgttctcaaggatcaactgacccggagtgtcaacctgctacttatcttccaccaacaacaagaagaactcccattccgacaaccagagttccactaacaacatcaaagccaaattgttatccaggctcaacggatactcgttgcccacaagctccaggaccacggtgctatcctggatcaccagatccttcctgtcaacccccaacgcgtataactcagaagccgcccacttctccacagccaaaatgctatcccggctcatccgatccagagtgcctcaattgctatccgggttctccggatccgagatgtcccaaagtgccaaccacaaagaaggctggatgctatgagggttcggatgaccctagatgtcaacccgctacctacttaccgccttcgactcgtcgaccaccgacaattgcaccgcgaccacggtgttatcttggatcaacggatcccagttgtccgcaacaaactcaaccaaccacccgaacacctattactactattaagcccaggtgtttcccaggctccaatgatcccgaatgtcaaccagcaacgactaggcggcccctaactacctccaagccaaattgttatcctggttcgacagacagacgctgtccccaagaacccgtgacgacatcaaggccgagatgttatcctggctcatcggaccctgaatgtcagcctgctactttggtcccaccaactacggttcgaacgacaataacaacgtcgaggcaaaggtgttacccgggttccagtgatcccagttgtcagcctccgacaacaagaaagccaataaccacgcctaagccaaactgttatccgggctccacagatagtcgctgcccgcagacaccgcgaactacgcaacagccaaggtgttaccctgggtccacagatcctgactgtcagcctgcaacttaccttccaccaacaacagcaagaacaacgattactactgccaagccaaggtgttatcctggttcaagcgatccatattgccagccaccaacaacaaaaaaaccaaattgttatcctggatccaccgacagtcggtgtccacaaaagccacctattacaccaaagccaaagtgctatcccggttcaacagatctggagtgcctgaattgttaccctggttcacccgatcctagatgccctaaggtcccaacaacgaaaaaggcaggatgctttgatggttcggatgatcccaagtgtcaacccgccacttacttgccgccatcaacaaagcggactcctacaattgctcctaaaccaaggtgctacccaggatcaaaagatccgggatgccctcagattacaacaagggcacccacttccacgtctagaccacggtgctacccaggatccactgaccccgaatgtcatccaactacttcctcgcctgcgataacaagaatacctgtaacaactaggattcctttaacaacagctaagcccaggtgttatccaggttcacaggaacctggatgccaacctgcaactaggccaccaattaccacctccaagccaagatgctatccaggatctctagatcccgagtgtcagccttcaacttaccttccgccaacaccagttagaaccaccgtgccaactattccgacgaccagaattccagtcactacatcaaagccaaattgctatccgggctcaacagaccgacgctgtccaaaggaacccgttacaacaccaaagcctagatgttaccctggctcaccaaacccagaatgtcaaaaggccacatactcacctcctacaactagaacacctgtgacaacatccaagccaaattgttatccaggctccaccgatagtcgctgtccccagaagccacctactactctaaaaccgaagtgctcccctggttcttcagatcctgagtgcctgaattgttatcctggctctcctgatccgagatgccccaaagttcctaccacaaagaaatcaggatgctttgacggctcacaagatccaaggtgtcagcctgccacgtatttgccaccatcatctcgtcgccctcccacaactgcacccaagcccagatgccacccaggatctacagatcctagttgcccacaaccaactcaaccaatcacaactcggctacctataactacacagaaagctagatgttatccgggatctactgcccccgaatgtcaaccagctactacgcctaccccaacctccacaaggcctataactactataaccacatcgaagccaaattgttatcctggctcgacagacagacgatgcccgcagataccagtgactacaacaaagcctagatgttatcctggctcaactgacccacagtgtcagcctgcaacttacttgcccccaacgacagttactacagtcaggccaagatgttatccaggatccaatgatccaggttgccagcctcctcaaacaactaaaacgccgataaccacatcaaagcctgtttgctacttaggatcaacggatagtcgttgccgccagaatccgtcaacgactcaaaaaccaaaatgttctgtgggctctacagatcctgagtgccaaccagccacgtatctccctccaacaactgtatcacccaccatcccaacaaccaagccaaggtgctatcctggatcaactgacaccagctgtcaaccaaaaacctattctccaccgacttcaagacctcttataaccacatcgaagcccagatgttatccgggctcaccagatcctgagtgtcagccggcaacctatcttccacctacaaccaggcgcacgaccattcccgttacgaagccaaggtgttatccgggatccagtgatccagaatgtcaaccggaaacctattcgccgcccacaacaagaccacctgtaactacatctaagccaaactgctatccaggctctacagatagtcgttgccctcagaagccacctactactttgcaacccaagtgctatcctggttcatcagatccggagtgcctcaattgctatcccggttcgcccgatccaagatgtccaaaaatcccaaccacaaagaaagcaggatgctttgagggttcagatgatccaagatgtcaacccgccacctatttacccccgtcgtcccgtcggccacccactattgcccccaagccgagatgttatccaggatctacagatcccagttgtccgcaaccaactcaacctaccacaacaaggacaccattaactacatctagacctaggtgctatcccggaagtactgatcgcgaatgtcaaccagccacatattccccaccgacatctagatcacaaataactaccctgaaacccagatgttatcctgggtcaaaagaccctgaatgtcagccagcaacttatgcgcctccaaccacaaggactcctgtgacaacatccaagccaaattgctatccaggctccacggataaacgttgcccgcaggaaatcgtaacaacacaaaagcccagatgttatcctggctcaccggatcccgaatgtcagcccgcaacttaccttcctcccacaacctcacgcacaacgattcctccgactagacctagatgctatccgggttccagtgatcctagctgccagccaacaacgaacttgccaccgacaactcgaacgcctgtaactacgaggaagccaaattgttatccaggatcaacagatagtcggtgcccacagacgcctcaaacgacgataaggccaaaatgttacccaggatctacagatcccgactgtcagcctaccacgaatcttccgccatccacaccaaggccaacagttcctacaacccagcctaggtgttatccaggatcaagcgatccctattgccaatcaccaacaacaagagcgcctctcacaaccccaaaaccaaattgttacccaggttccacggatagtcgttgcccacagaagccaccaactactttggcgcccaaatgcttccctggatcatcagatccggagtgtctgaattgttaccctggttcgcccgatcccagatgtcctaaagtaccaaccacaaggaaggcaggatgttcagatggttccgatgatccaagatgccagccagccacgtacttgccaccttcaactacaagagcacctaagccaaattgctacacgggatcaactgatcctaggtgtccgcagccaactcaggcgacaaccttaagaacgccagttaccacgacgaggtgttacccaggctctccagatcctgactgccaaccagcaacaagagcacctgtcacaactttgaggccaaaatgttattccggctccaatgatcccgaatgcctgccgtcaacttattctcctccgactacaagaattccagtaaccacatctagtccaaattgttatccaggctcgagggatacacgctgtccacaggcgccagtaactacacagagacccaggtgttaccccggctccaaggaccctgagtgccaacccgctacctacctcccaccgacaacggcaaggacaacgattccgacggtcaggccaagatgttatccgggctccaatgatccagattgtcaaccatctacatacacgcctccagtaactaaaacgcctatcaccacgcccaaaccccgttgctatccgggctccagtgatccatcttgccagcccgctacttatcttccaccaacaactgctagcaggtgctatcctggttccagcgatcctaaatgtcaacccgccacctatgctcctccctcgaccagagctcctttaactacttccaggcccaattgttacccgggatccacggataggcgctgtccccagacaccgccaacgacacctagaccaaggtgttatccaggctcatcggatcctgagtgcctgccaggaacaacgtccagacctccgattgccggaaccacgccggtatactgctacccaggatccatcgatccacgctgccccgactccggatacaggggcacaagccgaattccagccacatatctgccgccactgagtgatcctggctacgatagaaccattcggaatgcgaagactctgttcttcaatgaaatcaatcaattggccttcaccgacaacaacgtcttcgagctcgatgatgacgaagtcgagagctcgagggtcaagcgcgagttgaaacttgacgaggatgacctcctgtctaagaggatcataaagcgcgagtccaaccaggagcacaattccgaacaagaagtgatttccctgaccctcggagttagaactggcatcagtgtgaagtagtcgttgaaggtctagtagactgtaaggcatacaaatattataatatcatcatacaccgatatgtatttacctagaatgatattcattaaatataaactatgtacaaatgtaatctcttgaatcaattttgaaattatgcttagacagggtatcatcacttacctatttacggttattaattttgtgtacagcaaatctcttgtactttaataatttaattaaatattttagtaattatgtgagaacaatcgcttgagtctgtaaaagaagttggttctaagactcgggatatcggcaataggaattgctttcgatggactcgtgcggaatccactcctcatacaagggcaatcgattcttcagggtctcgatctcccgcagaatccgcatcacatttcccccaaccagcttcttaatagcagcattgccccacaccctatcccttgccagttcggcaagtaggagggcatagctcttcggagctcctccaagtccaatgtgatccactccggctaccttgcgcacatagttgattgcagtgatggcctcgcgaacgcccagtgtccgatcgccacaacgctccaggttgagcaagattacgcctccattttccggcaataggctgtgggatatatacaattaagagatgtcctataggactaaatgaaagctcacctgaggacgtggtctggaatggaagcaatgttgctgctattgcacatggacagcggtgtggcattcgtgagtaaaacaggagctttggcagttttcaaaacagccaacatggcagcctcgctgagcatcgaaatctccaccagcatgcccaggcggttcatctcaaagagcatggtctataaaagaaataaatgaatgaataaatactatcacaatggttgtgcccacctgtccaaattcgttgaatgaattcgtaacattttcctcaacaagataatcgggtctccggattgctgccgccgcccaaggagtggtgcactccagg

SEQ ID NO: 41093 - DNA, 6855 bp, DROSOPHILA
atggtcaacgtcggccacattttcgtgtgggccttgctcttggtcaccactcggggcactgatctgagtgatgatgaggcgctcaatgacgttttaggcgaacttgagtttgacgactcctcgcccagattaacgcgcgacacttctctgtcggccaagcacatcgagaagatcgatgtgaaatgcgaccaaggtagtggcatgatggtcgaggttgagttctccgaggacttcgagggagtcatctacagccaggggtacttcagcgacccaaagtgcaactacgtgaagggcgatagatcgggacgcagtttcactttcacagtgccatacgatggatgcggcagcaagccctcgtgctccgtttgcgcctcaatcgagaacatcctgatcatccaggacgacagggacatacaaaatagcttcgatatagcacggaaaatatcgtgtagtcgaggcgatgaacgtgagaagactgtatatttcaaaccatttgtcgtggacatgctcgaggttatatcggtagatacaccgagtgggccggtagagtgctggatggagatcgggacgggaactcctcccaatgtcaaacccatccagggcactctaaccctgggaactgacattactttcaccatcaacgttaagcactcggaacaggcatgggatataaacatactgcaatgttatgcctccgatgacatggattttgaggccagaacgacaaagagattgcagctgtcggacaaaaggggatgctcgataaaggagaaaatatttggggagtggcgaaagtttgaggcgggctccagtctaacttccacctactataatacactcaaggcatttaggttccccgatcgatctcaggtgtatctgaagtgtgacattgaactgtgcaatggagcgtgtaagagggactacacttgcggtagtctcaggtcgttgacgtgtcctgaaggatcaactgatcctcagtgtctacaggatcatctaatttcaccaaagcctcgctgctacccaggctccaacgagccaggttgcccaaggcccacttcccctccacccacaacgatcagaataccaatagcctcaacatttacgcccagaccacgatgctatcctggatccaacgatccaagctgtaacgaaactccgcaaactacgtccctacccagttgtcctttgggctcaactgatcctcgctgtcgcgttgccccgccggcaacaaaaaagccaaggtgtttttccggatcaagggatccggaatgtcaaccagctacctatcttccaccaacaacgaggagatcttcgaccaagccgcgttgctatcccggatcaacggatcctgattgccaaccggcaacaagggcacctattaccacagtaaagccaggatgctatccaggctccgatgaccccgagtgtcagcctgcaacttatgttccacaaacaacgaggagaccttccattactacgaagagaccacgttgctacccgggatcaacagatccagagtgtcaacccagaacaaggccaacgattaccacatcacagccaagatgttctcaaggatcaactgacccggagtgtcaacctgctacttatcttccaccaacaacaagaagaactcccattccgacaaccagagttccactaacaacatcaaagccaaattgttatccaggctcaacggatactcgttgcccacaagctccaggaccacggtgctatcctggatcaccagatccttcctgtcaacccccaacgcgtataactcagaagccgcccacttctccacagccaaaatgctatcccggctcatccgatccagagtgcctcaattgctatccgggttctccggatccgagatgtcccaaagtgccaaccacaaagaaggctggatgctatgagggttcggatgaccctagatgtcaacccgctacctacttaccgccttcgactcgtcgaccaccgacaattgcaccgcgaccacggtgttatcttggatcaacggatcccagttgtccgcaacaaactcaaccaaccacccgaacacctattactactattaagcccaggtgtttcccaggctccaatgatcccgaatgtcaaccagcaacgactaggcggcccctaactacctccaagccaaattgttatcctggttcgacagacagacgctgtccccaagaacccgtgacgacatcaaggccgagatgttatcctggctcatcggaccctgaatgtcagcctgctactttggtcccaccaactacggttcgaacgacaataacaacgtcgaggcaaaggtgttacccgggttccagtgatcccagttgtcagcctccgacaacaagaaagccaataaccacgcctaagccaaactgttatccgggctccacagatagtcgctgcccgcagacaccgcgaactacgcaacagccaaggtgttaccctgggtccacagatcctgactgtcagcctgcaacttaccttccaccaacaacagcaagaacaacgattactactgccaagccaaggtgttatcctggttcaagcgatccatattgccagccaccaacaacaaaaaaaccaaattgttatcctggatccaccgacagtcggtgtccacaaaagccacctattacaccaaagccaaagtgctatcccggttcaacagatctggagtgcctgaattgttaccctggttcacccgatcctagatgccctaaggtcccaacaacgaaaaaggcaggatgctttgatggttcggatgatcccaagtgtcaacccgccacttacttgccgccatcaacaaagcggactcctacaattgctcctaaaccaaggtgctacccaggatcaaaagatccgggatgccctcagattacaacaagggcacccacttccacgtctagaccacggtgctacccaggatccactgaccccgaatgtcatccaactacttcctcgcctgcgataacaagaatacctgtaacaactaggattcctttaacaacagctaagcccaggtgttatccaggttcacaggaacctggatgccaacctgcaactaggccaccaattaccacctccaagccaagatgctatccaggatctctagatcccgagtgtcagccttcaacttaccttccgccaacaccagttagaaccaccgtgccaactattccgacgaccagaattccagtcactacatcaaagccaaattgctatccgggctcaacagaccgacgctgtccaaaggaacccgttacaacaccaaagcctagatgttaccctggctcaccaaacccagaatgtcaaaaggccacatactcacctcctacaactagaacacctgtgacaacatccaagccaaattgttatccaggctccaccgatagtcgctgtccccagaagccacctactactctaaaaccgaagtgctcccctggttcttcagatcctgagtgcctgaattgttatcctggctctcctgatccgagatgccccaaagttcctaccacaaagaaatcaggatgctttgacggctcacaagatccaaggtgtcagcctgccacgtatttgccaccatcatctcgtcgccctcccacaactgcacccaagcccagatgccacccaggatctacagatcctagttgcccacaaccaactcaaccaatcacaactcggctacctataactacacagaaagctagatgttatccgggatctactgcccccgaatgtcaaccagctactacgcctaccccaacctccacaaggcctataactactataaccacatcgaagccaaattgttatcctggctcgacagacagacgatgcccgcagataccagtgactacaacaaagcctagatgttatcctggctcaactgacccacagtgtcagcctgcaacttacttgcccccaacgacagttactacagtcaggccaagatgttatccaggatccaatgatccaggttgccagcctcctcaaacaactaaaacgccgataaccacatcaaagcctgtttgctacttaggatcaacggatagtcgttgccgccagaatccgtcaacgactcaaaaaccaaaatgttctgtgggctctacagatcctgagtgccaaccagccacgtatctccctccaacaactgtatcacccaccatcccaacaaccaagccaaggtgctatcctggatcaactgacaccagctgtcaaccaaaaacctattctccaccgacttcaagacctcttataaccacatcgaagcccagatgttatccgggctcaccagatcctgagtgtcagccggcaacctatcttccacctacaaccaggcgcacgaccattcccgttacgaagccaaggtgttatccgggatccagtgatccagaatgtcaaccggaaacctattcgccgcccacaacaagaccacctgtaactacatctaagccaaactgctatccaggctctacagatagtcgttgccctcagaagccacctactactttgcaacccaagtgctatcctggttcatcagatccggagtgcctcaattgctatcccggttcgcccgatccaagatgtccaaaaatcccaaccacaaagaaagcaggatgctttgagggttcagatgatccaagatgtcaacccgccacctatttacccccgtcgtcccgtcggccacccactattgcccccaagccgagatgttatccaggatctacagatcccagttgtccgcaaccaactcaacctaccacaacaaggacaccattaactacatctagacctaggtgctatcccggaagtactgatcgcgaatgtcaaccagccacatattccccaccgacatctagatcacaaataactaccctgaaacccagatgttatcctgggtcaaaagaccctgaatgtcagccagcaacttatgcgcctccaaccacaaggactcctgtgacaacatccaagccaaattgctatccaggctccacggataaacgttgcccgcaggaaatcgtaacaacacaaaagcccagatgttatcctggctcaccggatcccgaatgtcagcccgcaacttaccttcctcccacaacctcacgcacaacgattcctccgactagacctagatgctatccgggttccagtgatcctagctgccagccaacaacgaacttgccaccgacaactcgaacgcctgtaactacgaggaagccaaattgttatccaggatcaacagatagtcggtgcccacagacgcctcaaacgacgataaggccaaaatgttacccaggatctacagatcccgactgtcagcctaccacgaatcttccgccatccacaccaaggccaacagttcctacaacccagcctaggtgttatccaggatcaagcgatccctattgccaatcaccaacaacaagagcgcctctcacaaccccaaaaccaaattgttacccaggttccacggatagtcgttgcccacagaagccaccaactactttggcgcccaaatgcttccctggatcatcagatccggagtgtctgaattgttaccctggttcgcccgatcccagatgtcctaaagtaccaaccacaaggaaggcaggatgttcagatggttccgatgatccaagatgccagccagccacgtacttgccaccttcaactacaagagcacctaagccaaattgctacacgggatcaactgatcctaggtgtccgcagccaactcaggcgacaaccttaagaacgccagttaccacgacgaggtgttacccaggctctccagatcctgactgccaaccagcaacaagagcacctgtcacaactttgaggccaaaatgttattccggctccaatgatcccgaatgcctgccgtcaacttattctcctccgactacaagaattccagtaaccacatctagtccaaattgttatccaggctcgagggatacacgctgtccacaggcgccagtaactacacagagacccaggtgttaccccggctccaaggaccctgagtgccaacccgctacctacctcccaccgacaacggcaaggacaacgattccgacggtcaggccaagatgttatccgggctccaatgatccagattgtcaaccatctacatacacgcctccagtaactaaaacgcctatcaccacgcccaaaccccgttgctatccgggctccagtgatccatcttgccagcccgctacttatcttccaccaacaactgctagcaggtgctatcctggttccagcgatcctaaatgtcaacccgccacctatgctcctccctcgaccagagctcctttaactacttccaggcccaattgttacccgggatccacggataggcgctgtccccagacaccgccaacgacacctagaccaaggtgttatccaggctcatcggatcctgagtgcctgccaggaacaacgtccagacctccgattgccggaaccacgccggtatactgctacccaggatccatcgatccacgctgccccgactccggatacaggggcacaagccgaattccagccacatatctgccgccactgagtgatcctggctacgatagaaccattcggaatgcgaagactctgttcttcaatgaaatcaatcaattggccttcaccgacaacaacgtcttcgagctcgatgatgacgaagtcgagagctcgagggtcaagcgcgagttgaaacttgacgaggatgacctcctgtctaagaggatcataaagcgcgagtccaaccaggagcacaattccgaacaagaagtgatttccctgaccctcggagttagaactggcatcagtgtgaagtag

SEQ ID NO: 41094 - protein, 2284 aa, DROSOPHILA
MVNVGHIFVWALLLVTTRGTDLSDDEALNDVLGELEFDDSSPRLTRDTSLSAKHIEKIDVKCDQGSGMMVEVEFSEDFEGVIYSQGYFSDPKCNYVKGDRSGRSFTFTVPYDGCGSKPSCSVCASIENILIIQDDRDIQNSFDIARKISCSRGDEREKTVYFKPFVVDMLEVISVDTPSGPVECWMEIGTGTPPNVKPIQGTLTLGTDITFTINVKHSEQAWDINILQCYASDDMDFEARTTKRLQLSDKRGCSIKEKIFGEWRKFEAGSSLTSTYYNTLKAFRFPDRSQVYLKCDIELCNGACKRDYTCGSLRSLTCPEGSTDPQCLQDHLISPKPRCYPGSNEPGCPRPTSPPPTTIRIPIASTFTPRPRCYPGSNDPSCNETPQTTSLPSCPLGSTDPRCRVAPPATKKPRCFSGSRDPECQPATYLPPTTRRSSTKPRCYPGSTDPDCQPATRAPITTVKPGCYPGSDDPECQPATYVPQTTRRPSITTKRPRCYPGSTDPECQPRTRPTITTSQPRCSQGSTDPECQPATYLPPTTRRTPIPTTRVPLTTSKPNCYPGSTDTRCPQAPGPRCYPGSPDPSCQPPTRITQKPPTSPQPKCYPGSSDPECLNCYPGSPDPRCPKVPTTKKAGCYEGSDDPRCQPATYLPPSTRRPPTIAPRPRCYLGSTDPSCPQQTQPTTRTPITTIKPRCFPGSNDPECQPATTRRPLTTSKPNCYPGSTDRRCPQEPVTTSRPRCYPGSSDPECQPATLVPPTTVRTTITTSRQRCYPGSSDPSCQPPTTRKPITTPKPNCYPGSTDSRCPQTPRTTQQPRCYPGSTDPDCQPATYLPPTTARTTITTAKPRCYPGSSDPYCQPPTTKKPNCYPGSTDSRCPQKPPITPKPKCYPGSTDLECLNCYPGSPDPRCPKVPTTKKAGCFDGSDDPKCQPATYLPPSTKRTPTIAPKPRCYPGSKDPGCPQITTRAPTSTSRPRCYPGSTDPECHPTTSSPAITRIPVTTRIPLTTAKPRCYPGSQEPGCQPATRPPITTSKPRCYPGSLDPECQPSTYLPPTPVRTTVPTIPTTRIPVTTSKPNCYPGSTDRRCPKEPVTTPKPRCYPGSPNPECQKATYSPPTTRTPVTTSKPNCYPGSTDSRCPQKPPTTLKPKCSPGSSDPECLNCYPGSPDPRCPKVPTTKKSGCFDGSQDPRCQPATYLPPSSRRPPTTAPKPRCHPGSTDPSCPQPTQPITTRLPITTQKARCYPGSTAPECQPATTPTPTSTRPITTITTSKPNCYPGSTDRRCPQIPVTTTKPRCYPGSTDPQCQPATYLPPTTVTTVRPRCYPGSNDPGCQPPQTTKTPITTSKPVCYLGSTDSRCRQNPSTTQKPKCSVGSTDPECQPATYLPPTTVSPTIPTTKPRCYPGSTDTSCQPKTYSPPTSRPLITTSKPRCYPGSPDPECQPATYLPPTTRRTTIPVTKPRCYPGSSDPECQPETYSPPTTRPPVTTSKPNCYPGSTDSRCPQKPPTTLQPKCYPGSSDPECLNCYPGSPDPRCPKIPTTKKAGCFEGSDDPRCQPATYLPPSSRRPPTIAPKPRCYPGSTDPSCPQPTQPTTTRTPLTTSRPRCYPGSTDRECQPATYSPPTSRSQITTLKPRCYPGSKDPECQPATYAPPTTRTPVTTSKPNCYPGSTDKRCPQEIVTTQKPRCYPGSPDPECQPATYLPPTTSRTTIPPTRPRCYPGSSDPSCQPTTNLPPTTRTPVTTRKPNCYPGSTDSRCPQTPQTTIRPKCYPGSTDPDCQPTTNLPPSTPRPTVPTTQPRCYPGSSDPYCQSPTTRAPLTTPKPNCYPGSTDSRCPQKPPTTLAPKCFPGSSDPECLNCYPGSPDPRCPKVPTTRKAGCSDGSDDPRCQPATYLPPSTTRAPKPNCYTGSTDPRCPQPTQATTLRTPVTTTRCYPGSPDPDCQPATRAPVTTLRPKCYSGSNDPECLPSTYSPPTTRIPVTTSSPNCYPGSRDTRCPQAPVTTQRPRCYPGSKDPECQPATYLPPTTARTTIPTVRPRCYPGSNDPDCQPSTYTPPVTKTPITTPKPRCYPGSSDPSCQPATYLPPTTASRCYPGSSDPKCQPATYAPPSTRAPLTTSRPNCYPGSTDRRCPQTPPTTPRPRCYPGSSDPECLPGTTSRPPIAGTTPVYCYPGSIDPRCPDSGYRGTSRIPATYLPPLSDPGYDRTIRNAKTLFFNEINQLAFTDNNVFELDDDEVESSRVKRELKLDEDDLLSKRIIKRESNQEHNSEQEVISLTLGVRTGISVK

SEQ ID NO: 41095 - DNA, 4689 bp, DROSOPHILA
agaacaatgtaatccaatccccaggaggcaattgccgtggctgtgttcacgggttcgtttacatccagcggtggtggtttgcgtgccgttttcaccgaacaaaatctacagcctctggtgcaagtgtcgcccataagctaggtaaaaaatgtattgtgaaatggtgtagttaagaagtattggttcgtcaatattcgttgtctggttgctttaaaatgaattgtagtttaagtgactttcataatttaaaatttaaaaatttaaaaagacgcctaagctgtggaaaataatgttcagactatctgagcatgttcggttatcagcaaaggtcaccatggggggtccctcaccataatcgtggctgtctgggtgccatgctcgccgccgccccagcactcgccgatgttgggacaccgggcctcctcgcagacggtggacagcttgagctcgcgcatctgggccttgattttggcgtagtttttgcccacgggaatggtggtctttaaccaaggcggcaatcgcagtcgctgctcctcgcccttttcgcggcgtagctttccatcgtactgttcccactcgtttctggtgttgtccggattctgcacaaagtcatggaaattcggaccctttgccagacgttcacgaatctcctcaagcttctccgcattcgttgatgccgcacgctgttattattcaatcaaaataagttgtttttatatgtacttttcaagcgtttgcttacggtggcaactacaatgggggcctccgcgtgagtttttaaagctcgcaacatgacatacatatgaattattttacaattattaaaatataaacgatttattttgcttgtcgaaacttatgaaatatttagtaagaccgtttgccacttgctgttttcatgggcactttttgtggagaacagctgtttctataagaagcgcgtttatggtatttagttggaaaaaatttatcgctagcagtattttaaacaaagatttagaaaggggttccttttagagtcataaaaaattgtgagttgacaaagtcgccacttttaatttgtgcatgattgcatgtagaagttattctaaatacttgtaccttaaatatattaatcccttcgcaaattaatcgaacatcgatagttcagccggacgagcgcactgccatcactagtatatgagtcgctttaaaacaaaagaaagtttttaccagctacatttctttggtttccttaactgtgagtagtccaactcctgcgagtgtcaagctcggtcctaatcggtggtgctccccaagaaatcccatcacacaactacggcttcgcagggggaggcgtccagcgctacggaggcgaacgaacgcacaccactgatggctgctgtcaatctccaggcttcgtgctcctccgggctcgcctctgaggatgacgccaatgtgggcagccagataggcgcggcggagcgtttggaacgacctccaaggcggcaacagcagcggaacaactacggctccagcaatcaggatcaaccggatgctgtgcgtataccgaagggaaactttgttgcttacacattcaactatcgaatcccctttcctgccaggccatacttgctgtgcccaatgtggtgatgcgtgaaccttgtggctcgcgcccttcaagactgaccggtggaggaggcggcagtggtggtccgcccacaaatgaaatggaggaagagcagggcctgaaatacggggcccagcatgtgatcaagttattcgtccccgtctccctttgcatgctggtagtggtggctaccatcaactccatcagcttctacaacagcacggatgtctatctgtagggtttaccagaaatctacttatctgaagtgtcggtcgtgactaaatgtctcttttgttctcagcctctacacacctttccatgaacaatcgcccgagcctagtgttaagttctggagtgccttggcgaactccctgatcctgatgagcgtggtggtggtgatgacctttttgctgattgttttgtacaagaagcgttgctatcgcatcattcacggctggctgattctctcctccttcatgttgttgttcatttttacgtacttatatttggagtaagctgaggccattttcgattaatgttcaactaatagtttgcctaatttagagagcttcttcgcgcctataacataccgatggactaccctactgcactactgattatgtggaactttggagtggtcggaatgatgtccatccattggcagggacctctgcggttgcagcaaggatatctcattttcgtggcagccttgatggccttggtgttcattaaatacctgcctgaatggactgcctgggctgtattggctgccatttctatttggggtaagtttgacacagcttgaaggccaagattgctgaaataactaagttttttttattttcatttatttatagatcttattgctgtcctttcgccaagaggacccctccgcattctggtggaaacggctcaggagcgaaatgagcaaatcttccccgctctgatttattcatgtaataatcatccatccgcataaacttttaaattaaataatatatccttttcagccactgtcgtttacgcacttgtaaacactgttacgccgcagcaatcgcaggccacagcttcctcctcgccgtcgtccagcaactccaccacaaccacgagggccacgcagaactcgctggcttcgccagaggcagcagcggctagtggccaacgcacaggtaactcccatcctcgacagaatcagcgggatgacggcagtgtactggcaactgaaggtatgccacttgtgacttttaaaagcaatttgcgcggaaacggtacatatgcattatattttttatgatttaactactattctcaaatgtgtatatggcttatttggcatttggtctattgtactctcacgtatttattgtcttgtttagttatgttgggcatatggtgtaagcgctgctagtagtccatttgagagtcatttgctagattaaacctctattgtttgtttgtttctcacttctagctgaggctgcgggtttcacgcaagagtggtcagctaacttgagcgaacgtgtggctcgtcgccagattgaagttcaaagtactcagagtggaaacgctcagcgctccaacgagtataggacagtaacagctccggatcagaatcatccggatgggcaagaagaacgtaaatatactatatacatatagaagtgtgtaaaccataagcgattcctgatgaacgattttatgtaggtggcataaagcttggcctcggcgacttcatcttctactcggtattagtgggcaaggcctccagctacggcgactggacgaccacaatcgcttgctttgtggccatcctcattggactctgcctcactcttctgcttctggccatttggcgcaaggcgctacccgccctgcccatctcaataacgttcggattgatattttgcttcgccactagtgcggtggtcaagccgttcatggaggatctatcggccaagcaggtgtttatataaacttgaaaagacaaggacacatcaagtgtcttacagtatcatagtctaacaaagctttttgtaatccaattctttatttaacaaaatgcatagtaacaacctcgactaattattgcttgcgcttaatgatcgttttgtccactatgttgatcagccagccgggttccaggccgtagaatacttgccttggatccttcgctgtggtgagcatctcgtacgcggaatcttcctcaattttgggcagctgatagccgtacttctgggccagaactaggcggtcctggctgatcgcctcgggattggccaggtagccgcgattcttgggatccgtatagtagtccactgcatcctggggcggcagcatgcggctaggaataggtactcccttttcgaaccacttcttcggattggccagcatgtgaaggctgcgtggatcgtaataggccgtacggattacaccgccgttcttctctatggccgctatgaccgcctcgctggcgtgctgcacctcaatgttgatcttagcctggaaattgtccagcccatcgtccgtcagctggaaaccgtactccatttcagcgggtttcagtttcaggaggccagagttacacagcgtgctgatgtcgatgggctggctgatgtctatgcggttcgtgtcgatgagcacttgcagttggagcagcgaaatgggcggatactggcgctttaggtggtgtcccttgtagtagggctcgtagggaaatctcaagtagaagggctgattgcccgtttcatagcccaatcgcatgaagttctgccgctgaccggatcccttgttgcccgctccgtgcttatctcctccgtgttgtgccctgccgcgcttgtcctgccgagaaaataagcaatatatttgttaatagtttattgacgactgcatgctgttattcaaccactcacattctgttttgagtttggatttggtcgcagattgccgatttgaacgcgcggtaaagtacgcaacagcttcagcgccttgtccgaggtctcccgcaggtgtgccataccgaagttaacttaatttatttaataaaattatgtttatcgggtgaaaaataaaatttacacgag

SEQ ID NO: 41096 - DNA, 2048 bp, DROSOPHILA
aaaggggttccttttagagtcataaaaaattgtgagttgacaaagtcgccacttttaatttgtgcatgattgcatgtagaagttattctaaatacttgtaccttaaatatattaatcccttcgcaaattaatcgaacatcgatagttcagccggacgagcgcactgccatcactagtatatgagtcgctttaaaacaaaagaaagtttttaccagctacatttctttggtttccttaactaaatcccatcacacaactacggcttcgcagggggaggcgtccagcgctacggaggcgaacgaacgcacaccactgatggctgctgtcaatctccaggcttcgtgctcctccgggctcgcctctgaggatgacgccaatgtgggcagccagataggcgcggcggagcgtttggaacgacctccaaggcggcaacagcagcggaacaactacggctccagcaatcaggatcaaccggatgctgccatacttgctgtgcccaatgtggtgatgcgtgaaccttgtggctcgcgcccttcaagactgaccggtggaggaggcggcagtggtggtccgcccacaaatgaaatggaggaagagcagggcctgaaatacggggcccagcatgtgatcaagttattcgtccccgtctccctttgcatgctggtagtggtggctaccatcaactccatcagcttctacaacagcacggatgtctatctcctctacacacctttccatgaacaatcgcccgagcctagtgttaagttctggagtgccttggcgaactccctgatcctgatgagcgtggtggtggtgatgacctttttgctgattgttttgtacaagaagcgttgctatcgcatcattcacggctggctgattctctcctccttcatgttgttgttcatttttacgtacttatatttggaagagcttcttcgcgcctataacataccgatggactaccctactgcactactgattatgtggaactttggagtggtcggaatgatgtccatccattggcagggacctctgcggttgcagcaaggatatctcattttcgtggcagccttgatggccttggtgttcattaaatacctgcctgaatggactgcctgggctgtattggctgccatttctatttgggatcttattgctgtcctttcgccaagaggacccctccgcattctggtggaaacggctcaggagcgaaatgagcaaatcttccccgctctgatttattcatccactgtcgtttacgcacttgtaaacactgttacgccgcagcaatcgcaggccacagcttcctcctcgccgtcgtccagcaactccaccacaaccacgagggccacgcagaactcgctggcttcgccagaggcagcagcggctagtggccaacgcacaggtaactcccatcctcgacagaatcagcgggatgacggcagtgtactggcaactgaaggtatgccacttgtgacttttaaaagcaatttgcgcggaaacgctgaggctgcgggtttcacgcaagagtggtcagctaacttgagcgaacgtgtggctcgtcgccagattgaagttcaaagtactcagagtggaaacgctcagcgctccaacgagtataggacagtaacagctccggatcagaatcatccggatgggcaagaagaacgtggcataaagcttggcctcggcgacttcatcttctactcggtattagtgggcaaggcctccagctacggcgactggacgaccacaatcgcttgctttgtggccatcctcattggactctgcctcactcttctgcttctggccatttggcgcaaggcgctacccgccctgcccatctcaataacgttcggattgatattttgcttcgccactagtgcggtggtcaagccgttcatggaggatctatcggccaagcaggtgtttatataaacttgaaaagacaaggacacatcaagtgtcttacagtatcatagtctaacaaagctttttgtaatccaattctttatttaacaaaatgcatagtaacaacctcgact

SEQ ID NO: 41097 - protein, 541 aa, DROSOPHILA
MAAVNLQASCSSGLASEDDANVGSQIGAAERLERPPRRQQQRNNYGSSNQDQPDAAILAVPNVVMREPCGSRPSRLTGGGGGSGGPPTNEMEEEQGLKYGAQHVIKLFVPVSLCMLVVVATINSISFYNSTDVYLLYTPFHEQSPEPSVKFWSALANSLILMSVVVVMTFLLIVLYKKRCYRIIHGWLILSSFMLLFIFTYLYLEELLRAYNIPMDYPTALLIMWNFGVVGMMSIHWQGPLRLQQGYLIFVAALMALVFIKYLPEWTAWAVLAAISIWDLIAVLSPRGPLRILVETAQERNEQIFPALIYSSTVVYALVNTVTPQQSQATASSSPSSSNSTTTTRATQNSLASPEAAAASGQRTGNSHPRQNQRDDGSVLATEGMPLVTFKSNLRGNAEAAGFTQEWSANLSERVARRQIEVQSTQSGNAQRSNEYRTVTAPDQNHPDGQEERGIKLGLGDFIFYSVLVGKASSYGDWTTTIACFVAILIGLCLTLLLLAIWRKALPALPISITFGLIFCFATSAVVKPFMEDLSAKQVFI

SEQ ID NO: 41098 - DNA, 3890 bp, DROSOPHILA
cagaggaccgttctacatgcatctgggtgaagatttgcctcacttccactggctcctttgtgggcttctttctatggccaaataagtaaataattgcagtaatatcctttctggagcggccaggaagaagtggcaaaaagggaacggaaaagaatggagaagaatggcgagcgaaatgaaagaatgcgagaatggagagcggggcaagagaatggaaagcgtgtttccatgtccttttcacaaactaaaaagtcctttcacacacacacatagtactgactacagagtacacatagagaacggtatatagcagaacacagacacccacaatggacaaaaattcacaccaaagacccattgtgattggcccaacaaacacgcacacacatacgcggggagagagttgtgttctctccctctctcgttctaactgcataggagatgcggaagtgcaacgccgccgtgcaaacaataacggaaattgtgtgcccactgtgcgaaaatcaatgtgctcccgcgctcgccctggctctctttctctctctcgctccgtactttgagctccccctgccccacaggattggggtcgctaaatcgaataacacgaagcacagccgaacgagagctgcctggcttttggctctattgagctcctctattgaacacacccctcaatgggcgaacaactataaccgatataaaggagccaatggaacaaagccagtggaacaatgggccgcaaaacgaaagagagaagacgctatgtgtgagtgagagcgcgacgacggcgcagctctctcccaggtaagaagcccagcctctatcccgctcgcacccacgtggcttacgtaaaggtaatggtgcgagggttgctcgcacttcgtgctcaactctcttccgagagaaacgggatttggctgcagtcgtgtaggccgcactggaacactactgaaatcagtcacaaaaaagcagtcgatccgagcagaagcaaagcaagagcaaagcagaagcaaaagcaagacagtaattgacatagagacaaagaaaaaatctgagaaatcacagttgaaccacagacatattgtgttctagaaagtgaagtgttgatcttgaaagaagcaaaagttaaacaaagtgttcaaaatagctggaatggccaccttatcgacacaccccaattacggtttccatttgggtcaggcccaaggcttggaggactacgcaccgcaaagtcagctccagctgagtcccggcatggacatggatatcaagcgtgtgctgcactactcccaaagcctggcagccatgggcggatcgcccaatggacccgccggccagggtgtgaacggatcctcgggcatgggtcaccacatgtccagtcacatgaccccgcaccacatgcaccaggcggtctccgcccaacagaccttgtcgcccaacagttccatcggatccgccggcagtctgggtagccagagcagcctgggcagcaatggcagtggtctcaactccagttcgggtcaccagtccgccggcatgcacagtttggccacatcgccgggacaagagggtcacatcaagcgtccaatgaacgcgttcatggtctggtcccgcctgcagcgtcgtcagatcgccaaggataaccccaagatgcacaactctgagatctccaagcgcctgggtgccgagtggaagttgctggccgagtcggagaaacgaccattcatcgatgaggccaagcgcttgagggccctgcacatgaaggagcacccggactacaagtaccggccacgccgcaagcccaagaacccactgaccgctggaccccagggtggactgcagatgcaggccggcggcatgggtcaacagaagttgggagctggaccgggagctggagccggaggctacaatccattccatcaactaccgccatactttgcaccctcacaccatctggatcagggttatccagtgccgtacttcggtggatttgacccactggctctatcgaaattgcatcaatcccaggcagcggcggcggcggcggtcaacaatcagggtcagcagcaaggacaagccccgccccaattgccgcccacctcgctgagcagcttctactcgggcatttattccggcatctcggcaccttcgctgtacgccgcacactccgccaatgccgccggactctacccatcctcgtccacctcctcgccgggatcttcgcccggaaccatcacgccaaatggtatggatggttccatggacagtgccctgaggcgaccggttccggtgctctattagagtcgagttttaggttagagtacagagtagagtacaattgttgacgcattcccaaagtgatccactggttttaaatcttcaaaagctctaagtaagccaatcctccaaaccactccgcttaattctagtacaatcttcgcgcacttcagatctagagagtaaggagggaacacacaaaacattcctagccaatacacaaactataaattataatttatttagcgcactcactataccgcaaagaaaattaaaaaagataaacctaattgtaaattaattttatttagttttaagcatcgagcgagcgcctccttcttgttgttttttttcgcatcagcacctacctaaaatgtagcttatagttttaattgtctaaccctctcaaattgtaaatatccctgcaactattcgttaaagtctcagtgtagccccaaatgcgaggaaagaacgtacatcaatgtattattgtattattaattgtattgtaaaagttatcatctaagcgaataatggttcatgaaggccaacacaaaacaaagacatttaaaagtgaataaaaacaaaatgatttgagaaaaccaaatttgaaaacctgtttattctatttcaaataatttacagcttggaagatgtgaaactggcaattggttttgaaatgaatgatgatgattctctaccaaatgtaatcacattaaagacataggtagagttgttgtgactggaatcagacgaagttatcatatatatatatataccgggaaaaagctgaaaaacaaaaaagataattttaagcctttaatagaatgcatttcccattttcttagccagcataccacattttacagttatgttataaatttactttaaacatatgcccaagctatatgtgacttaaatttttcagctgattatattttatactccataattggattatcatatttaaattcgaatttgtgtctgtatttttcataacctttaagattatacagggtcgtgctctgagcatgcatcaaaattatcaacgaaattaataacgaatttgaatattcataagaccattaacataatattctcaactggattgagtgagtcattcggataaagcttaaaaacaatcatttcatcatcacctaataatgggtatgaatttttctgttttgtgagtagtattcgtttaatatcaaagtcctatcccgtttctgatcaaattaaccttgtctctgggtgtctttactattatttcgctcatttctgtgtgagtttttgttggttagtttacacccgctgggaagagatgaaaaaactaaatttgatttgccattatacaactatttgccgttgtgtattaatttctattgattaatgcgctgtttattttgcgcctccaagacagaattcgatagtttgaacaaaaggtcgtctcttcgctctttggatgggggtcacattgtgtttttttttcgggatcaacggggggcctgggccctctaagacctcactattcggagtgtaactgaataccctggcgaaagaaatcaacgcgtgtttttccgttttgatttttagcttcttttcgtaataataat

SEQ ID NO: 41099 - DNA, 1890 bp, DROSOPHILA
aaagcagaagcaaaagcaagacagtaattgacatagagacaaagaaaaaatctgagaaatcacagttgaaccacagacatattgtgttctagaaagtgaagtgttgatcttgaaagaagcaaaagttaaacaaagtgttcaaaatagctggaatggccaccttatcgacacaccccaattacggtttccatttgggtcaggcccaaggcttggaggactacgcaccgcaaagtcagctccagctgagtcccggcatggacatggatatcaagcgtgtgctgcactactcccaaagcctggcagccatgggcggatcgcccaatggacccgccggccagggtgtgaacggatcctcgggcatgggtcaccacatgtccagtcacatgaccccgcaccacatgcaccaggcggtctccgcccaacagaccttgtcgcccaacagttccatcggatccgccggcagtctgggtagccagagcagcctgggcagcaatggcagtggtctcaactccagttcgggtcaccagtccgccggcatgcacagtttggccacatcgccgggacaagagggtcacatcaagcgtccaatgaacgcgttcatggtctggtcccgcctgcagcgtcgtcagatcgccaaggataaccccaagatgcacaactctgagatctccaagcgcctgggtgccgagtggaagttgctggccgagtcggagaaacgaccattcatcgatgaggccaagcgcttgagggccctgcacatgaaggagcacccggactacaagtaccggccacgccgcaagcccaagaacccactgaccgctggaccccagggtggactgcagatgcaggccggcggcatgggtcaacagaagttgggagctggaccgggagctggagccggaggctacaatccattccatcaactaccgccatactttgcaccctcacaccatctggatcagggttatccagtgccgtacttcggtggatttgacccactggctctatcgaaattgcatcaatcccaggcagcggcggcggcggcggtcaacaatcagggtcagcagcaaggacaagccccgccccaattgccgcccacctcgctgagcagcttctactcgggcatttattccggcatctcggcaccttcgctgtacgccgcacactccgccaatgccgccggactctacccatcctcgtccacctcctcgccgggatcttcgcccggaaccatcacgccaaatggtatggatggttccatggacagtgccctgaggcgaccggttccggtgctctattagagtcgagttttaggttagagtacagagtagagtacaattgttgacgcattcccaaagtgatccactggttttaaatcttcaaaagctctaagtaagccaatcctccaaaccactccgcttaattctagtacaatcttcgcgcacttcagatctagagagtaaggagggaacacacaaaacattcctagccaatacacaaactataaattataatttatttagcgcactcactataccgcaaagaaaattaaaaaagataaacctaattgtaaattaattttatttagttttaagcatcgagcgagcgcctccttcttgttgttttttttcgcatcagcacctacctaaaatgtagcttatagttttaattgtctaaccctctcaaattgtaaatatccctgcaactattcgttaaagtctcagtgtagccccaaatgcgaggaaagaacgtacatcaatgtattattgtattattaattgtattgtaaaagttatcatctaagcgaataatggttcatgaaggccaacacaaaacaaagacatttaaaagtgaataaaaacaaaatgatttgagaaaaccaaatttgaa

SEQ ID NO: 41100 - protein, 382 aa, DROSOPHILA
MATLSTHPNYGFHLGQAQGLEDYAPQSQLQLSPGMDMDIKRVLHYSQSLAAMGGSPNGPAGQGVNGSSGMGHHMSSHMTPHHMHQAVSAQQTLSPNSSIGSAGSLGSQSSLGSNGSGLNSSSGHQSAGMHSLATSPGQEGHIKRPMNAFMVWSRLQRRQIAKDNPKMHNSEISKRLGAEWKLLAESEKRPFIDEAKRLRALHMKEHPDYKYRPRRKPKNPLTAGPQGGLQMQAGGMGQQKLGAGPGAGAGGYNPFHQLPPYFAPSHHLDQGYPVPYFGGFDPLALSKLHQSQAAAAAAVNNQGQQQGQAPPQLPPTSLSSFYSGIYSGISAPSLYAAHSANAAGLYPSSSTSSPGSSPGTITPNGMDGSMDSALRRPVPVLY

SEQ ID NO: 41101 - DNA, 3606 bp, DROSOPHILA
gtacttctgggccagaactaggcggtcctggctgatcgcctcgggattggccaggtagccgcgattcttgggatccgtatagtagtccactgcatcctggggcggcagcatgcggctaggaataggtactcccttttcgaaccacttcttcggattggccagcatgtgaaggctgcgtggatcgtaataggccgtacggattacaccgccgttcttctctatggccgctatgaccgcctcgctggcgtgctgcacctcaatgttgatcttagcctggaaattgtccagcccatcgtccgtcagctggaaaccgtactccatttcagcgggtttcagtttcaggaggccagagttacacagcgtgctgatgtcgatgggctggctgatgtctatgcggttcgtgtcgatgagcacttgcagttggagcagcgaaatgggcggatactggcgctttaggtggtgtcccttgtagtagggctcgtagggaaatctcaagtagaagggctgattgcccgtttcatagcccaatcgcatgaagttctgccgctgaccggatcccttgttgcccgctccgtgcttatctcctccgtgttgtgccctgccgcgcttgtcctgccgagaaaataagcaatatatttgttaatagtttattgacgactgcatgctgttattcaaccactcacattctgttttgagtttggatttggtcgcagattgccgatttgaacgcgcggtaaagtacgcaacagcttcagcgccttgtccgaggtctcccgcaggtgtgccataccgaagttaacttaatttatttaataaaattatgtttatcgggtgaaaaataaaatttacacgagagtaagtatgtaagtaagaccgcagttggtcggctaacaaataccaaccggcttataaaatataccaacttttaggtctgtgcttcagctatgcggtattcaggttagctgcgaccacactgctctgccgacgcgcaaaagcaaaccaaaactttatcaaataaaatccatttatacatagatctcttcattaaaatagtaaaattttattaagttgtaaaaaagatgacgtgcggaaaatgtcgcggtcacaaggaaaggagcgtgaagtgccttttagccgctttggacacaatcaaagagcacgccttaagtaagccaaatatatttatatttactcatttaatttaacatgttccactttttaaagtgatgcaacgagactcagaggaaagttcgaggaccatagaacagctaaagatccacaatgaaaagctgcacaaggccttggacttgctgaaggagcggcaggcatccttggtccaggcggagaagcgcaggaagctgttgcccacgaagatcaaggatgacatatcgccgcagacacaaagccaaaactcccttaacatgaacatagccattagcaacatagatctatccgacgaggaccaggaagtggaggaagacgagagcattaccgaaacggagaccactgtcctcagcccgcgcaaactacgattgccaagtcgaaagtcggacatccgggatctggagaatgtgcagccgagcaatgtttctgcggtgggaaatagttggacccgcaagacacccaagaatcagggagtccttacaaagctatcactcacacacaagagcaacaacttgaacttgaagcaaactcgccttaaattcgaagcaaataggacgagcaccagtgaaaaggaagtcatagaggagagtcccaatttgagcaccaatctgaagagatctaggccgccgagatctttaatgcagaggtaattatccctacgaattattccaaaagtgtcacagaaatatctttcaattacattgctcgaagatcgaatttcctttcttaagattgctgtgacactttcatttgcctttctttttaatactaaatgccaaggttgcagaacagacaacacgagcgtttcaaacgcagacgactcgcttaccaccaccagcaatagcacagtcaagaccataaaaccaagttttcagttggacatggacgagtttaaattggacagctcggaagatcagataatgcccccaccgaacacgccgccaggtttaaagatcagcaacacctcggatagtgtagttttattgacgcctgcgacccaggatataatctttgtgaatgatacactcgaagatgtgagcaaactgggcaccatggatgttctggccgaaattatgaaggacgatgacgacacgtgctcgagtgctttaagacagtacgagaaggttataattgaccagcagaagcaaaacctaccaaatgccccaaaagttgagagcgtcattccaattaccaaagtcgtgaaaatggaacctatatcccagccagaaacagacttaggcaacgaatcaacaaaactgcccgaggatattgaaaagtatcttatggatatcaaagaagaggatagtaggcattcggaggaggagtttccgcgaccgattttgatcaaggaggaacctgaggcgacggtcaaagaacgttttaacattgagtgcgtcgagtgcgaaaaggtatgtacaattttctcgaccatccacaactaaataatatttatttcaaattcgatccacttagttcatcaattttatgggttcaaatctgacagacgagaagatcaaagattatttggcaaagtgccggcatgaagacgctcgcagttcaactccgccgggattctggaatccacacatggtttccttcgcagaaggcgatccacgcaacgaagtgttgatagacactcggttttgggaccagagataaaacaaatgacatttaggcaatcaatttacaaatagtttttcagtttagaccatttcatttattattgattttgttagttctcaatttgatcacatttgattcacaagtttcctcgcttggcttgttcaatttcaatggccgtgaacaaggacttaaagttgccagcgccaaatccctgaaatagtaatgatcatgatttacttgttcttagcaacagtaggttaagcaataaatcttacattgtgattgtagcgttggataacttccaggaagagggtcggtctatcctggcagttctttgtgaagatctgcagcagatatccgttctcgtcgaagtcaatcaaaatgttcaacttcttcaagacctccatgtcctccttgatcttggtgcggctgtgcgagagctgctcctgaaggatctcgtagtacgaggatgggatggtcaggaactcggttcctcgagcctttaggttgctcaccgcctcgataatgtcatccgtattaagagcaatgtgctggacaccaccgccgccgtagtactccacgtactcctggatctgtgacttctttttcccattggctggctcattgatcggcatcttcaccgtctcctcgtagtttgccatcacgatggaccgcagggcggagtattccgtgtgaatctgcgagtcatccacggaccagaagcggtggaactgcaggattctctcgtaccaggaggccacgctctccatctgcagatccggctggttgcccaccacgtgatcaatgaagttcagcttg

SEQ ID NO: 41102 - DNA, 1357 bp, DROSOPHILA
caaaactttatcaaataaaatccatttatacatagatctcttcattaaaatagtaaaattttattaagttgtaaaaaagatgacgtgcggaaaatgtcgcggtcacaaggaaaggagcgtgaagtgccttttagccgctttggacacaatcaaagagcacgccttaatgatgcaacgagactcagaggaaagttcgaggaccatagaacagctaaagatccacaatgaaaagctgcacaaggccttggacttgctgaaggagcggcaggcatccttggtccaggcggagaagcgcaggaagctgttgcccacgaagatcaaggatgacatatcgccgcagacacaaagccaaaactcccttaacatgaacatagccattagcaacatagatctatccgacgaggaccaggaagtggaggaagacgagagcattaccgaaacggagaccactgtcctcagcccgcgcaaactacgattgccaagtcgaaagtcggacatccgggatctggagaatgtgcagccgagcaatgtttctgcggtgggaaatagttggacccgcaagacacccaagaatcagggagtccttacaaagctatcactcacacacaagagcaacaacttgaacttgaagcaaactcgccttaaattcgaagcaaataggacgagcaccagtgaaaaggaagtcatagaggagagtcccaatttgagcaccaatctgaagagatctaggccgccgagatctttaatgcagagcaatagcacagtcaagaccataaaaccaagttttcagttggacatggacgagtttaaattggacagctcggaagatcagataatgcccccaccgaacacgccgccaggtttaaagatcagcaacacctcggatagtgtagttttattgacgcctgcgacccaggatataatctttgtgaatgatacactcgaagatgtgagcaaactgggcaccatggatgttctggccgaaattatgaaggacgatgacgacacgtgctcgagtgctttaagacagtacgagaaggttataattgaccagcagaagcaaaacctaccaaatgccccaaaagttgagagcgtcattccaattaccaaagtcgtgaaaatggaacctatatcccagccagaaacagacttaggcaacgaatcaacaaaactgcccgaggatattgaaaagtatcttatggatatcaaagaagaggatagtaggcattcggaggaggagtttccgcgaccgattttgatcaaggaggaacctgaggcgacggtcaaagaacgttttaacattgagtgcgtcgagtgcgaaaaggtatgtacaattttctcgaccatccacaactaa

SEQ ID NO: 41103 - protein, 425 aa, DROSOPHILA
MTCGKCRGHKERSVKCLLAALDTIKEHALMMQRDSEESSRTIEQLKIHNEKLHKALDLLKERQASLVQAEKRRKLLPTKIKDDISPQTQSQNSLNMNIAISNIDLSDEDQEVEEDESITETETTVLSPRKLRLPSRKSDIRDLENVQPSNVSAVGNSWTRKTPKNQGVLTKLSLTHKSNNLNLKQTRLKFEANRTSTSEKEVIEESPNLSTNLKRSRPPRSLMQSNSTVKTIKPSFQLDMDEFKLDSSEDQIMPPPNTPPGLKISNTSDSVVLLTPATQDIIFVNDTLEDVSKLGTMDVLAEIMKDDDDTCSSALRQYEKVIIDQQKQNLPNAPKVESVIPITKVVKMEPISQPETDLGNESTKLPEDIEKYLMDIKEEDSRHSEEEFPRPILIKEEPEATVKERFNIECVECEKVCTIFSTIHN

SEQ ID NO: 41104 - DNA, 9217 bp, DROSOPHILA
ccagatggtattgtagctattaaaccatatgactgaaaaggttcttctataacaaacccattaaattcctaggcgtattaataaagaacattctattcacattcatgcaaagtaatgcatctgaaaatacacaattggggcaactttctaatttcaaatcctcccaagccctttcacaacattgattccattatcgccctcataaactgcgaggttttctatttgtttactttacacctggcgctccttgggttccattagtcaaagaatcccgacgcactccctcggacctatcccaataaaaatcccaaccgctcagatttgccattagctgagcaaacttttgtccttggcgaaatgggaacggtacctggctgagctcgggttggcttcgggtttgatgtgggtagcctgttgctctataaggatattaagattccttttacctctctcttttctgcggctggagcggtgagtcctgcgctctttcggctagacggcattgccagcagtgaaagtttctcacgggggttgctttctaaaaggactattcccagacagaaggatgtgggtctctattgttgtcgtcagtaacttcaaaacggatgcacagaaagaaattcggagtgactcttatttcatttaatgttttaccttactttgaaagtgctcatggaactatttgcttattgagatcataaatattgtgttccttatttattacctttatttatatttatattcatatacaatttaatattaatctcactagttatgcaaatacttattttatggttaaatgcttggaataaagcggtagtaatttggctaaaatccttactaagtaaaatatttctaatctgcaactctgcacacttttttctcagtgctgtgttatggtccttgctattgtggttgttgttgttgccatagccgcaagctgtcgccggtcgacgtcacgctttccatccttcagtcgcgtttactgcgctgcccaaacaacaagccaaaaataataagagtcgcagtaaaaacagtagaaaaatcaaaagtgtgtaactgctctaaaattatctaatatgaattggtataatttcgtaggaataaaacgtcagccgcaaaaataaataaagtcaaacgtacttgaactgtcgctgaaccgaaaaacatttttcgtgattttccattccaattttcccaaactatgttttttgctggtgctgtaaaaactcatgttcaactttttttttcaaatattgacaaattggtgcgcgtctcgctgagcgattaaaatcttaatgttggaaaaaatgctaaaaaagaaaaaaacaacaacaaatggttggccccaaacaagcgaaaagcgaggcaaaaaagtttaaatgttacaacataaattataggaattgctgtgctctgaaagcattctctagttagtggttcaagaatagttcttatgtgttatttttgcgattttgttgattgattgtgcagtgtgaaaacgatcataaatttggtaaagccctaaaatcatctgcgactctaaaaccgttgccccgtccagtgttcgccaaactgtaagctgtggggaacgagtttttggttgagaatgagccctttgttcctcgcgaacgtgctcttctgcaggacaactggccctctctctctctctctctctcgctctctctctttagcttcgtcctttacccttaaaggagtgctttcccggggtgtttctttgccgataggacaggggttaagaaactccataagaacgcatgcgcgccatttcctttggggtggtgagatttcccatatgaatgttggtccctaagcagatgttttccttcggatacgaagtttcttaaggtaggtccgttgatctgaagacatatagtattcgaggacataacagtaagtggcacactgtattttaaactgatacatagttgttggacgatgaggaaaaacaaaaaccaataaagcagtgctgataagaaaaatctccatcatccacttatcccacccactagacactatatttgcatgcaagtttgcgaatctaatgcggctcgcgtgccaaaagtcaatcggaaagcatcgacagagtcactttatccattacctgggcatatggtcgcgcccctttgtgtggcatgccacttggctagcggggatgtggcccatttaagccataaaaacattaccagcgggggaggtaagcaggtattctcagcatgattcactttcaccttgacacgctttagcccccctcctggctcccttcgccgtcaaaggatattgtctttgccaggcgctggatggcattagttctttaagcccatgtgccgacgtctaaagatattttgatatggtcgagagattttttaccgcggaattatggctttaagtgccgcggtagctgaaaccacatcaagcgaaaataagcattggcaaagtacaataaacgccaacgcgtttaagcccacggatagaatttaatagtccggctagcgctagagagtaaggtctataaaacaagatctggtacggttttgcctgggagatttacgattctgggatggcgcagagcattggcacatagcaggttgcagttgtacaaataaacaaaagattcgagtagaaacccgaggaaaacttcctcatattatttttaaaacacaaaattatgaagccccgagaaattttcaccgtatatatgtgtatatgcacatatatttgcctagatattgaaatgcagatatatctattttaaagggatcgttgcggggcatttaggtgggcataaattataaaaatatttcagtgtgtcagatattgtttgttcggtatgccaaggtatgtttggtgtttgtttatttatgatttttggtggggggaaatggttccgcttcattttgaacaaattactggggcttataaaacagcgtcttattaatggagagagtacgtttaaagggaatatgattaaatgcctgttgaaggcctgaccattaagtgtagtttattagagtgataacatatcactgttaagtgattcaaatcatactcggtcatttttattgtggaaatgaagcttattcaacacttcttctggctacaataaaatacctatacgagattaggtgaaatctacctacctataagtgcaagtgcaattgccattctagtctttgggatttccactatttgtaacagtgatgtactaaagctacgcgaagcttatgttcgtgccgctgctaaggcacagtggtatttgttctgaaacaagtatcaaaaacaaaggtacatacatatactatgtagaaaaccatgagagctcatattgtacgtattcataataaagtaagtttttgtcaatacaacaatccacattttggaaaagggttcttaagcgaatgttgcatcaatcccttaaacaggagtgttgcatatctcataaagaagttgattaaaaagtgtattaagcatttcgactgccaagacacagtggtaaataccatatttgttttgaatcaccgatcaaaattaaagctacatatgtacatgtagaaaacaagggagagggtcgcactaaatatacatatgtattaataataaaatacatttttatctatacaacaatcaatattttgaaggggggtacttcccactgtgcgacgcgctgcgtgatggagaagttcagtgcgagccgcttagaacgattttgcatgggctgggaatcggacgtgtgcccgtcgatcttgatgcgaaaaccatcgcggcgttgggacaaatacctacaagtatctgtgcactccgcctcctcacgtgcgtgtgtgatatttgtaactttaatttatgggatgcgttgagtgagtcgtcggcgagctgcttaataaattagtcccgaaaataccaagcatttttgtggaaaaaaaatatcaacgaaatttgaaagcaactaatcagcatgaaataaaagagagatgaaagaggaaactttgtgcaataatttgtggatatgtggaaattgtttatttcgaactagattgtccaccagtgaaataactaaggaaaaagtaatcacaaagtaaaatgaaattagtgtgtcacaaaaataatattttaaaatattttcttaaagtgcattcatttgtagttattaaatccttagaaatattaccaaaatgttgttcaaaatttaattaatgttagtccaaaaaggcacaatccatcttccaagtgataaccaattatgcgtaaagtgcctttttttgcatctttcccaagactcctgccacatcgaattacagcagtcgaaaggagaacgatgaaaattgctgaacaatatagaaatgccattaaaccaatcagctgtaaagtgaattagacaaaagttgttcgtgtggaaagcgcacagaatcagagccatatatgcgattggaatctatattcagatcgcgaccgcatttcgaacatactatatagtctctaaatctcaatctccgcatccgtgcgacttacagattgtatccgatccgattgctgcgaccgcaacgaaataaaacgccaatgaaacccaactaattgatgtgataatgctgcacatggaaatcatccaattcagacaacgtcacacgatgtggaactttttggatcgcttcgaactggacgcagaggatcgacagtgcctcgagagattacagcagccggcggaaagatccaccgataagagcttcacaccaaaggtcagtttgcgttatcagcccgcgatcgtcccatcattcctgtctattgggattgcggtgactatctgcctgggatctgccctcgccgctccgcaatcctcctgcatcatgtgcgacaaggaggacctgcgaccacgacttcctccctacagcgacagctacgaggagtacaccttcgaccaccaggtgacccagcaagcggccctggagtccattcagaaatttaacggctgtaagtcctagaattctagtcccagaattagcttattaaattgcagtgtttcaaaatcatatcaaaagtacttcaactaaaaatttgctcttaaaataatgaattcatgaggaatacaattacatgaaaaaggtcgattggccattgacctcatctttcttaaagaatgtagcaaaataagaaagcgaaatcagacttacaaaagagttgtagatacttatgagcactttctattttgtttaaattttctcagaaaatggaatgtaaaccgaagaacaaattgtttaatttaactgattttcattgtctggccaggattgtgaataattttactttctttatagcaagaggtcagaacaatgcctgcagttcaatcaagtgcccaccgaatacaccaaagtattgcctaggcggtcaggtaaatataagctacgatccatgaatgacatgaagtgtatgtactctattttaattgcagtttatcaacgaccattgctggtgcgaactgcaacacagagaaggtaagatatcaaaaccttaagatatcatgttatcaatagttttggacttgccattgttatcattaaagtctgtaaattaaattttggtcaggtgaggttgatttctgagaagaactttttacagaacagccctgtttaagtacttaagttttgatatttatgacttgcgcatgagtctgcgcagatggcgctaagaaaataataaacaaaaatcatgtgcagcagcagactcccacagtaaacacacgaagtggagacgtgccactaacccacttgcaacgcagtggcatcggcaactcactaaagagcccaattagctaattttgggcccttaacaagccgtactcacgcaaatcactggccattcgactaataactccgatgacgcaacagttggcatagccaaccgagtaaaacccacataagtatcccacggatcgcagaggtggcagatacttattgttccacggcctgccccctgccacgcggcacgtgatgcggcacggaagttgttaagtctggtccactgatcgaaccgcactctaatgctgcgacacgcttcattggttcgacttgcaaccactacagtggagcctgtcagggaaaacctgctggttatcgcccgttaccccttcacatttcaaattgatatttagcccgatttagattcatattaaattgagaccaccaggatgtacctaatatttcaataattttttttataagaaaatagatgtgtgccattaccactttgcccacattgatcctttttgcaacagaaggcagtgcatttaaattcgtttttgaaatcgaaaattatttcctgactgacatctactgtactgcgattactgtggcattcctctgtccaagtgtcagtttataattctttggtttgtttttttttttttttgtttgttcaaatttttgacttgtcgatgtgcattccgccttggtggggcatttttctgggttcggcgcttgggttgtccacacttgaatgattttcctcaaggcgcgcagttttccatgcccctgtagttttccttttcgaatgcacccgcccctgtgaatcgaaactgttttgtgtgggccactagctgcacttaattttttaatttcactttacttggatttcgtaaattacgctacattgtaggccaattaaagtcgtttcggctctaaaagctgttcaaatatttaccgattcaacaccaaaattcggcggaatccccgagttcttggtgctcaaattgacacaagataaataatatgtcagattcttatctgtttgatttgtgcttaacgtggttatcagtaaatataaataaatatatattatatatatatatatatctgtttattattcgcatgaaaggaaattgcaattcttatcatatcaaaaagcaattgctctgagtatctgagtatgtcaagtatatgatcactggtgtaataagacaatactactgactcaacaattctgtgcaactgactattttttttttttagtttgccataggctattcccactaccggcaacaaatccagtcggtaaggaacgtgcctgaaataacaatggaaacacctgttctggcgactgggtgggcgggcggccataccaatccatcccgatggccaatttcaggtgccgcttatagcgcccagtacgaatatctaaagcctatttcggtgttatttttttatatcccccacgcagccacttctcaattaaattcgtttgtaattgaattaattatgaaatgtgagccacaacagttgctttgaaagtaatcgctttgattttccttgataatcacaattacatatgtacatacatatgtatctccctcctagtataatcaatctcactttaagtatctttttgaacaatctgtcgatttgaattgttaccccattgtcctcggcttgtcagtcgccggtcgctaaagattattaacaattgccagggcggcagtcactgaattgacccaacatattacacgctgtccgtgtctgtttacattaggtaataattttataattgcataaatatctgcgacacgcaccagcaacaacaacaacaactggctattctctgtgtgggcttttcttcttctattcgacgatgttcctgaaaatatacacatcgaacttcataaaattcaacacgttgagttttataaacaaatgagcaactataaacaggccaaacggaaaataatacaaacacatgctatgatccgatcgaaaaacaatgccgctcatatttagtcactcgccgcaatttatattttcttgaaaattattgcagccttttcgtgcgcgcagctactaataaacatattctattttattgatttccgtttctactcaaagcgaaaaattccataaattgtatattttaattacgtggtttttattataaatagttaggcacttgattccgaaacgggggcaacacattgaatattctaaatattgtgctgattttccaaccatttattggctatattagttttgtgagtgaaaaactgatggatgtttattattagaaactaattttgaaatgtacccttattttcagagggcctgccctatgtgcctcacgtgtgcttcgcggatcagaaggtgcacacatcatccgtggaatcctgcttcacattcgtccaggtcaaggagtgctgctgtgctgagatctggatcaagaagtgtaagtactagatacaactgccaacccctagggcattcgtggaatcacctcatctggtagcttgatatatccgtgctaaatgcccatgccactccacacatgagaaagggggattaacaaagcaatgctaatttaataacgtaaacatacttccccgattatattcaatttccacacggcgccttcgataaatatacacaagccagaaaaaaaaatgccagagagatctcgtcaatatcattcgctggcagaaaatcgaaccatgctaattatatttagtttataatgctaattgaaatcgctcacaccaaattttttgttgggcgtcaaaagcgcgttctaaatcatatagtacaacatcgatatatggtgagctataaattcgaaagggcaattagccttggttgtatattatcgttgtgagtagtttataccaagaaattttcgagtagattctcataataaacataacactttgccttaaatgggagctcgctcataaatgaatatgtgaaaagcggcatcaacaagtagcaaccgttttccagtgaatatattactgttgcatatcattttactccgccaagggaacacacaagttaatctgcacttttctttctctacttccagggcgtcacatttccggcagttctcgtggccagcacgtgccaaatgtgttagtgctactaatattgaacctgctttctgcattcagtatactcacctgccgaagaaggagacgaatattttggcaaagctaagatttcgaggggaagtcatgatgtgagaaaacttgttgtacagcgtgaagtcagtcatagagaagtaggatctagtcgtagtagcattcaaataagtgtacttagttcaacaaatgtccagtggtaatcaaacttacttgctaagcatatatttaagcgttaataaatacacgtttataatgctaacagactttagttagcgtgtggcttagatcactaaataatgaagtaactccttg

SEQ ID NO: 41105 - DNA, 749 bp, DROSOPHILA
aacaagccaaaaataataagagtcgcagtaaaaacagtagaaaaatcaaaaattgtatccgatccgattgctgcgaccgcaacgaaataaaacgccaatgaaacccaactaattgatgtgataatgctgcacatggaaatcatccaattcagacaacgtcacacgatgtggaactttttggatcgcttcgaactggacgcagaggatcgacagtgcctcgagagattacagcagccggcggaaagatccaccgataagagcttcacaccaaaggtcagtttgcgttatcagcccgcgatcgtcccatcattcctgtctattgggattgcggtgactatctgcctgggatctgccctcgccgctccgcaatcctcctgcatcatgtgcgacaaggaggacctgcgaccacgacttcctccctacagcgacagctacgaggagtacaccttcgaccaccaggtgacccagcaagcggccctggagtccattcagaaatttaacggctcaagaggtcagaacaatgcctgcagttcaatcaagtgcccaccgaatacaccaaagtattgcctaggcggtcagtttatcaacgaccattgctggtgcgaactgcaacacagagaaggagggcctgccctatgtgcctcacgtgtgcttcgcggatcagaaggtgcacacatcatccgtggaatcctgcttcacattcgtccaggtcaaggagtgctgctgtgctgagatctggatcaagaagt

SEQ ID NO: 41106 - protein, 202 aa, DROSOPHILA
MLHMEIIQFRQRHTMWNFLDRFELDAEDRQCLERLQQPAERSTDKSFTPKVSLRYQPAIVPSFLSIGIAVTICLGSALAAPQSSCIMCDKEDLRPRLPPYSDSYEEYTFDHQVTQQAALESIQKFNGSRGQNNACSSIKCPPNTPKYCLGGQFINDHCWCELQHREGGPALCASRVLRGSEGAHIIRGILLHIRPGQGVLLC

SEQ ID NO: 41107 - DNA, 50575 bp, DROSOPHILA
taaacaaacagacgtgatataaattttttctaatagacaataactttttacccatcttaaacaaattttacagtaaaataattttttagtgtatacttttaggatgagacagttaataatcttgcacgcattacttatacgacgaccctggttaacgttatccaatacccaatgataaaatatagaatctgtggatttactatatcagtatctttattatacgagtacattaattcagtttacagttttacaaaattatttgtttgcctgacatgttttcgttcttcgattttaaatttacgttgttttaacatctattaaaagtcgaaattaatttcgtttgtgtctgggatggactgcgatttcaatgttgataataatatatgtatatatataatacttattcgtcatcgacccaagtcggtcggtaaagtgcattaaaatgattgattggcaaccggaaatgaattttaaattcatgattttctaatgtttggctttacttagaacccattaacaagacgatgcaatgaggttgacgtgttatgatcaaatggacgacttaaatttcataacaatcttctttatatgtacacatatcgtactttatctacaactgccacggaattcgcacttatcttaattaattatttaattttctgttcaacagtgtctaagttggtaaagtaagatgcttcagttggagccattatttcctaaagaattcttgataatatattcaatttacggatatattttcctatcatcagtataatggaaactactagccaattgaaaaatgatggctcagtcttcgccttgctcttgcaatatatgttataattgaagtataattgcagccaaatttaatttaccaaatatatgtaagttcgattgtaaagggcatacagaaataaataaaacaaaagatcatgtcccataatactctttataaaatctgaatttatcagctaatatatgaaattgatctgctgggtgtaatgtatacttatgtatttatttgtaatgcagatacccacatatttgtaacgtatgaatctaaaactaaagtcataagtcgtgtttaagccgaacgggattggccaatgataagtgttcttgcttctcaaatcgatccgggatcatctgtacaattttcgagggaaagggggctttaagtcttaaaacctcaagtcggtaagtctatgtaattatttaaattggaccttacgcggtaattaatcgttacaggtaaaatgtatacattgcaatatgccattttatgtataaatgtgtgtatatttgttgtattgtattttaaacataatatttttatacagagtttagacaaaatcaaataaatagcgcgataaacttaaaattatatgtaaatgtattcataaagaacagctatgccatttcataggagtttaccagcgacagatataattattaagaataaatactttccatgattggtttttgaatactcgctatttagcataatgtatgtagcgaagtaaatttgaaggactaggaaccagtacgacgtatgattatgtttatctatatgcttataaatggtaattatatataatttttcaacttatacaaacgaaattgggtttcttattgtaagagcgtgcataatttttagtagaacattttggcttacttacaattgcgctctatacacttgacaataaggaaataactatttacttacaaattaaacctttaggcatcgtaaactaaccaacttttgtgggcaaaattatttgcgattattttttgtatttttatcaagtggtactgccaggtataaaggaatcgtgtatggggataaaaatctcaaagaatcgaagaaataagttattaaatatgaatcaggtcggggttttcatcacaaggtccccaccacagctagccgccttgctgttgcttctttttatcgaatatgggaagcttcgacttgaccgcaccctcgcacaccatcatcctttgctgcgccggcttcttgtccagatcgaagcacaggccatccgcgttcaggtgccgcttgaagtccgaatagcgacgcgactcgtacgaaaggtagttggaacccagggcagaggcagccacagcagctgctaccgtcccgttcccattgcgatggtgcaccgaaggcggcgaggagtcctgtcgctttcgctcaaaatactccactatcttggcaatctgtgcggatcttgtactgggcagtgccgtgaaggagcggtcgtcccagagcagggagtcagagccggccaagctacttatatcatcggagctatccgtgtatatggacgaggtgcggttcttacagtacaatagttgattcgttgcaaaaggactacgctgaagcagagtatgtatctccgagtctaaagccagacgattgatcaggctcgccgtagccgccatttgggattcgctgccattcccgctgagcaacgcatggtggcaagtgtatcgtcgctggtgtgtgcgccgcgatgccacaatgtccgcgtccaagtcatccatcgagtccaacgctgtggatgatgaggtatttccaccgatcacagcgggatcattgtcgatcagcagcaccgacgatgaggtcgaggacgtatcgttgagcaagtggctctgctgttgttgctgggccgcagcagcggctgcagttacggcggcattcgatgtcgaggtggcgtagtagcagcagcgacacaaactcgccagtttatcgctagaagataaaatcataatcagtaaaatcagatgccaagaacacaaatacagcaggccctacttcatgtaccaaaaacatcagacaaacattcgaatagcttttgaaaatgcttaatggctttgtgatgaacatcgactaataagatgatattacacaattagcacgatcaagaaaaaagtgacttatgattgtgatttttatgctttagctaaacaagtcacttacgttgcttgtgcgttaggtgctcgatatttataccgtggctgtgtttaacctggggtatgccgaaataattatcatatatgcaacatttttcaaatttaagtttgtatacgtatattcacagatcatttagctaacatctaatacatccattataaaaatctattttgattctaagccatttaagatacaatatggtcattacaattcagttaaattgaaatctatacaattaagagatttactcgaaagtcttcttctaatacggtacgattttacgaggcaagttaaaaaaatatctaatatctactcacttgatttcactatctgcgctgacgcatgcatcgagcataagctgcgtcttcaatttctcatagcagcagttgctactgttgcccccgccgccgcaaccaaaccccaacgatccaatcccgttcagctgccgtccgaaactgttgttggttatcgccgcatcggactcttcgttaaagcacgagaagaagccactttctatagagtcccgcctcgttaggtttgtcttcaagggaagctgctcacacgagttcttcaattcgttcagatcgcaggtgtttttcagttcgtcgagctcaagatcagtgcaggatgaaacggacaccggggtttccaccaacctggtggagcagccagacatgggagtgggcaaagcctgcaccgccgctgttgcaccgctactcgcttgctcttttgattttctggcgctttcagtcagatcctcacacgaattggtcgcacccactgacgcagtcaacgtgattgtagatgcgctggccttcagtagagttggactctcgaattcaccagtactggtacttttcatgctggtgccattggagccgcgaaaaagcggatgcgcatacaaggaattcgcgcggtattttcgagcggttggcacagtggacggacgcacggcgctgtcatcgctgcttgattccgcatctgcacagttgccaccgccatcgggatcctcaccttccgaattgcaatcatcgcagtcatcctcatcggttggcaatgctattgatggtggtggagcactggtaactgctggaggagcagcattgctgattcgctgaggaagtcgaagctcgatggcgctgtatttgcgcgtcatatgcggcgacactggcaggctctttggttcactgggcgttgctgccgaagccttgttacccgttgatgtttcctccgtactcgttcctccgccctgagcccccgctttgctctgcattgcggccagttctttgaagaacggcgctagcatctcgaagcatgagctgaatagatctcccacccctgctgcataggttttcggattggcgtccaggattttcttgacaccacgcagttgcgccagcgcttcaaacggattgggtttagagccgttgtgatccttttcagatgtcggcttgtactgtggatcgcccactttgcgcagtgtgagtaccgctggaacgggcttgggaagcggtgggggatctggaatagacgtggcgggcaactgaaccgaggaaagctgccttgggggcgttggtgagtgtgttgaggagcgctgtcgctgcatctgatgacaccgcgccttgtcacttggcgacgtgtgcatggggaagtggatgatgttctcgcttagcgaacgccggtgcaacaagatctcggcctccaacttctgagtagcccgtcgcactctagacttcagtatatgatcatcaaagccactgcttccagcagatccatttggcgtgcccggaagcgcagccgaagcagactttttacttggaaatcggaagccgtcctcgtccacttcctgtagatggcgcggtgttaaagtgccagcaggagcagtacaaatagtggccaccgtgggtactgatgctcggggtgtcaacgttacgttctccgaatcgctgcctcctggtgagcagttgatcaactccagggaactgagtggacttgctccggccgacgactcgtgctcgtatttctccagcagcaaagtcaactttttggtggcatcgtggaacgtgggtcggctcttggcatcgtactgtaagttatcggatgggttacaacacattcttatattgattataattccaaaactcaccagacagcagtagaaggccagacgtaaaaacacaggaggagtgtccatcggacacaattctacaaatgccaggtagtccagtccaaacgacgccgtgcgcggcatcatatccgggtccgcttcgatgcgggctatgatctcgcattgaatgatgccaaaggagaagacatcgcttgtctgatcgtaccactggcccttcaggcactccggactgacccaatacggtgagccgactgtctcaaggcgtgattttctgctgtaagcaagcccattttggattcgtttaattatattacacttatgttatgcttagaccaagatatacttacgatttgactggtatctttgcggctagaccaaagtcacccactacagcttcgtactgatcgttggccagattgcgaataagtacattctgaatgaagaatcggattagcatactaattattggagttccttgcagttagcgctcaccttgctcgtcagatccctgtgaaagatgcccgcgtcgtgaacgtaggacatgccgcgcgctatacccagcgccagtcttatcttctgcgtggcgctgagcaccacctccttgttggccagcagctgctccagggagccgccgttgatgtactcggtcagggcgtgcagttggccctcctgcacgcaaacgcccatgaagctgaagcgaaagaggaaggaacacgcttagttaaagtttgccactgcagtgcaactattcggtatggcccgaataagtttcactttcaatcacacaacttgacgggcactgcaacttcgcggagcccagatttcttatcgccggtcgacatgcaatcggccaccccccactgattgttggcattgtttcagccttgattcgatgcaaaatgaaattgtaattcgaatcccccgatgcggcaggagcacgcaataaaaagagaaagttttcccttcaatggacacacagttccttggaatagggagttggattggaatctcctaggatttaaagaacaaagaaaccacttcctaagcactcatctccgcttcctgctcagacaatgtcaatgactcctaagcctaaggagctgctcgctcaccagccgccaaccaccgactcactcctggcggcagcacaatctgaggtcaccaggctctgcaaccggaactgtaagcttattaagaaaatggcaacgcatgcgtctaccttcttgctaactccactccttcctcaaaactgtgtgcagccaggtaaaaaaaaaggtgaactgctgccagacagggctgacgatgatgcttcaaggtgacaatgaactttagcggaactatgaaagcatgtcagcgtgcacatcatactatgtatacccttaaaatcagggtagttatataaaacacatttggttaataatcatgctgagatgttcttgtagaaatatatagaaataatatataatatagccgattagcgcatgtgactgaagtcccgtgcaggtgttcatatcgataagggttcacttccattccgtcttctgtcaaatggtctaatcggacttgcaggctttatctgcgcacatgtttctttttggccagacccaggttatagccatggcccaaaagagttggccaaatggttccaaactctgcgtcgtgtgccagataagctttatcgcctatataatatatattcgccacactgccccgcacaaactcaagtggcgtttgaaaagtttgacttacgtttatgtgcgcgattgggccattaattcttcgctcatagtaaatatttatttaattagttcaaccgcagagcaaagtaaatcgctaataaatttagcaaacggtgtgtgggtcggaaataattgctttgagcacgcaacccgtcacctcatccaccgcagaacagacacctttccgtcaggctgtcaataaggatacgacaacagggtctccagggtgcgactgggcgcgtgacgtcagggcactggcaatcaaatgttatggccaccccgacgcgttttaacaaccgagtggtctcaacgcattaacatacgagttgcaaaggggttggcccagaacaccagttgcatcgtttgccgactgacattgggaatcacagcagatagaatcatcagcggtctgcggggaagcttaattgaaatcagtcaggtcactggctttccggcagtgaattcaggtgaggacactacagtggaaactgtacaaaataacttgtttttatatacggcgtaggatctgactatttaaaaccattcatggtttaaataaatatttattatttcaaaaatttggatggaatcgattgtggtatttgttcatgagggatatctatacgcttttgtaactcaattagtttgttctcagaaaattcgatctacaaaggatcgactgtattaccatacacaatgcgctattacgctgcataaaaaatggaaatgtcttggccaagagggcatgacccttttatattttcttgatagatatgccacgccagtgtgtggcagacacatgtcagcccttcagacagcccaagggctcggctcgacgcggatctgaaatgaagttatcacaaaggcgagacaagctcgatgatcccaggtgttgacggcgaaggtaggggctccaaggcccgagggtttttgtctgccgcacatcctctccagcaggagagacacacctatgcctcacaccccccccccccaccaatcactcttctcgcgactcgtgaccgtgggtgcagcatgccgcacttccatttgcatgaccatcgcagggatttacggttctaattcaatttatttcactgcgtgatacacgattagcgccccgagtgagtgtaccccccatccactccatgcccttttcctgcccattagcggcttacattaagaggatttgcctgcagttaacacctttaatgtacgctctaagccattctcaactcaacgtggctttgaagaagagatctgttgacggaaaggatttaattgaaaagcacagaaactggtttctgttttaaaatgagagtgaggctgccaacatcgtttgattgcacgcaaagtactttgttaattgggcagttaatttataacgcattcatcaggctgggtgcaatgttattttcggaacgcaaaaagattaattaattatcaaaaggggcaaaggcagagccatttgcagtgggcgtcgccagacattttgaggcgggttcgtcgacatcaagcagcattgcctgcaaatgcaaagcagtcagtagctggccaaaagaggaggaggtggaggtaccaaaggcgaaggtgtctccattccattccattctctagcaggaaatgaatacacgtcgaggggcccacttgagaaactgcagctaaaggatgccgggagcaggaagcgaaacctactcaagcggttataagcctctgaaactgccgaagaatcattgttctggcagcgtttagtttttcaatttctttttttttgtttcgccagcattttcgccagttttctaccgtttttaccctgcagccaaaagagatgtgatgtggtgttaaattgaaatgtactgcttcgctaggtgttacaatatttgttacgagcatattacactgttttcccgggaaaacgctgtacgttcaacagtcggcaaatcgtcagccggcatttctcttgcaagttgcaatgaaaaccataaattgacacgtttgcacgtttctctcccaagactgcgccaattggtttcccagacttttcacagacgaagtcgtagtagtccaactaagtccgctaactgccgctggccaggccagcttggttattagatagactaatgaaatgaaaaatcccgctggaattctttcacccgtgtgttgcaatagccgccgccgccgccgccgaagcattttatgttggcaaatcgaattggagcattgaagcattttgcgcttaattgaaaattattaccacaacatcagtggcagcaacagatattgcaactacagcagcagcaccaacagcagcagcaacaacagcagcagcggcacgatcgcggggttaaaaggttgacacaaagtaaacaaaattcgcttttaggcaaacagtaaataacccaagaccaggcccaatgcccaacttccaaatgagacggtggcactggagcagcagccgcagccgggggcgtggcaatgggcgttataaatggtcctaaacgctgccaactgcaattaccattcggcatttgctgctgtcgggtagtaacaacagagcaacagtcacagcaacagcaacagcattgcgaaatgaaatgattgaatttggttttcaattagaaaaatatgcaaaacgtgatgcgaaaattatgcagattgcagctgcagcagcagcagcggcggcaacagcaacagctacagcaacagcagcaacatccaacagtggtggccataacttcctcttcttgttttcactgctgaccgattttcaatctagtggaagctagtgcagcccaaaaagaaagctcatatatcgcggggtgttgcataaatctgaatatctaatgcccgctttttgttgtgaaaaattgattgaagtgtattgaaattgattgaaagttgatgacataatttcgtgcatacgaaaaacgcaggccagagacaaaagacaatggccaaacgcaaacgcaaacgcaaattggaagtgaatgttggcagtcagccgggccaaaagacgggcgagagagatgaatgttttatgggacatcgggcctgcctgacacacgtttatttaccattttacggctctattttgtttagcttattttttcatgcggaagttgacaattacacaagtgcgatttatgcagacaaatatgagacgatttatcgctgggagataaactaactaaaaatccagcggacgcacagtagtgagtaattgctgtcaagaaacttgttacaacacggcatcagcagcacgcaacttgagcaaaataataataaaaaaccaaaacaaaatggaatgcaaggcaggctctcattaaattccaatctgtatctgtatctgtatctgtatctgtatctgcatctgttgccgaaaaaacgctgggtattgtgcgatacacattactcatgctcttgctcgttttttttttcgggtacatcaatcctgctgctcttctttttatacttttacatgtgttagcacttacagcgacaacaacacaatgtaataataataatgccgtgggttcaatgacttgcaattgcgtcgcattgtcttgtgtactatacatatacatattattgtggctgagacataaagcattaccaaaataaataaaaataacagcaatatgcataccccagttttgggtcagtgagtttagttgtgcttggcattgccaaaaaggccaaaaaacaaaaaaaaaacatctcccttcccaccaaagtggatgatgatccatcgataattgctggctctatggaatgcataatttcgtgtttgctgtaaacacacactattggtttaaatttagcacacacctacatactctacgctccataaataggcggcattcggaagtgctaatgaaaatccgtgatgcaaatactgcagatgctgattcagatacagatacactgacgtcaatgcaattgacgatcgaatccaaatcgaacacactgatcacacgggcgtctgaaaaacaagctgcctaatgaaattgcgcgcgacagtttaccaggccatgttgatcatcaatcagaaattaacccaatttagctttcttgcactgcctgcaatggcaacgattcgtgccacacggcaaaacacggaggcagccgagcagcttcaattacaggccatcgatcgacaattgacaaaccccaatcgacgagcaaacatgaaaagctgcgctgataaaagtgcgctgcaagtagtcaaccagtctggcagtcccgtcgtccagggtatccattaagcaataaaaagaaatgtttatatggccgcaatcatgacacgctctctttcggcctcatgttgctgctgctgcagctaatgttgcagcaggtgttgctgctgcaacttgtcaaagtctaaaagtctggtaactgtacaaactacccggcggccagaaattaagtactcaatttggccagacactaaatcccccattaaactacttacatctactatacacacatatagaacttaattatatatgcacggatttcggaattcactcaaactgctgtcgcgctgcatgaatggccaattgaacccatcttgcacaataaaattctcattaaattgtcaacaatttttttttttttttcgcccgttctcggcaatcttttcattagcccgacaatgtgccaccaccgatgagggcgcccattcaattcaaggccagccatctcggtttattggcaagcatttcattttgcttcgtttcataaaaggggacagaaatgagccgccaacgctcggcgacacacaaatccagccaagacaaataatggccgagagacaacaatgtgcagtggcccctcgaaaaatggaggcttgtggcaaacacatcatcgcatctatactacggtaccataccataccatactatactataccattgtatactacctatatgcaggcattccgccaccacagacgaccttcaagtgacgccgcgactttactcatcgcaagatgagtggtggtggtagctcgatcgtctgactggctattcaattaagtgcaatctgaccttagtgaaacctcttgcaacgccaacgccgggtttatatcaatagctgagctgactgattgctgattgcccaagtcgctttattgtagatcggggtcaaaaagctcaactgcaacttgtgcggtagaaagggtgagagctcagtggtccaatccggtgggttagcaccttaagtcattaacccgcgcgcatttgcattcgcatgccaacaatttgtcaacatttgcccgacaacttatcacctgcttagcatcgcagccaggcgcaaagatcaagtgccgccaaagcaaaagctgaaacagcagctccagcggaatttccaccattgtttgtggcccgtaatgatccgggctaagaactgtcacatgtctttgcgcggtctgagtcgcgttaaatgagcgtttaaatggctgtgagccaaagcggcagcttgtttaccattccccccctgctcggttgttacaagtggagtagttgttgtttcaccagttgatatataaatgtatgtatgtatataccataaaaaaaagggggcaaaacaaagtgtagagcacccggcgccatcagcgtcatcgctgtgtttacattcagagagagccactcaataatgtaagtcaacttgcaatgggatttgtgagtcaaacgatgggtatgctgcgctatcaagaattacgtattaaatataaggagatataaggagatataaggtatccaataatatgaatagtatattattgcttaataagaaaaagatatcaaggttatgtgtgcatttaatttatgaaataataatgcgtagatgcatgcgtgtcgatgcatactaccgatgataagtaaactatcacgttaattacattttctatttgaatgaccatttgaattcatgtataattttggagaccagcccctagaaacaaatactactactacaattagccacattttcgcagtgcattagtgttgctgctggggagcagagtatggagcaaactatctgtcaagttggtggcagcttgggagcggcgacagctacaagccatgccatgtgggtggctgggtgccgttgctccagtgggccaatagagaggggaggcgtgccaaaggctgggcggggaatgccattcgcaattgcccgactcgctggctgttcgttctcattgtgcgacattccgcattacggcggccgcgtgataagcccataaaaaatacacgccgccaacggcaaccactcaactaactatcctcagtcgagtgtgttgtgagagtttcagtttcagtttcagttttgtggccaataagtcagcgattcgggcgtgggtgtgcatactattcgatgcattgctgtagtacatggcgtgctgccggctagaaaggcggtttcaattacccaaaagattagttctattgacgctcgactgcatcggcattacactgatagtcggaggatgcaacggtacagctagttctggcagccaatcaataggcttcattagccggatcggatcggatcggatcgtagaaggccgccatgggaggcggcccgcatggacgcccagcggtgtagctgttaaaatttgacagttagccgacagccgcgatcgttaggcatcattaaacgcgcccgccaacaagagcagcgcctaactaactaactaactaactaactaactgtcagtcaacccggtcagtcattcgtacagttgatcatttggacgacctgggagcggagtgtttagcgatccacgtcactgataaaatcacaaacgcggatcgaggatcgcggatatgagcgggattcaatcgggcggaacaggcataggtactagtacctaaatgcatacactgagacaaataataacgctgttaaatatatataaaagtacatattaaaattgattgaaatgcagcgcttacagaataagctataaataattataaagcatctcatttgaagtgcttaaatagctttaaggtgtaaaataaagtttgaaaaatgaaaaatatttaaatcctgttaattccaacatattgtttttgattgcaactacttgttctcgcagtgtcgcattaattggcctcagtgtaaatatataaatagctttgctgcaggggatccataaaacaaagaattaaatgcgtgcgcctgaattttaatttcactatccagtcgaccgatggcgccacagctgcattccagagtttttagaattttcatttagtgccgacgaataaagaaaagttggcagctgcatggattcgctttagactggctgtgttccgctgacccaaatccatctctcaacgagcccggcgcacacagcgaaataagttggccagccagggcatttaatcaacagaatccgttgcatttaataccccgaccgcgattcgttgcacgtttctcacttagctctgtgtcagaaacagtcgctaatgacagatgtcataaaatcaggtgggctctaccaatactaactcttggaaaatcccgagtgaggtcagatcaaatcgcgttgccttcttaacgtttaatctttcggattatacgagtttaaagtttgaatgcctaaaaaacaaaagaatggcagctaatatagaagacatgtctcttgccattttcggggtgttaacgtggtaaatgaaagggcgggtccacaacacacacacacacagagagaaagagaaaaaggtcttagccagaaattgcatattcatggaggcgagcaggaaaagatgggcggtgcaaaatggattggtctgtctggtctggcattttgcggaaaaaatcgctaaaatagaaaacggcaacagcagcagcaaaaagtccctgagaattgcatacaattgaagtcgctgccatcagacactcattgttgcgtgcagtcacgtgaggatgaaaaacaaactgaaaaaatagtagaaatatattcgaaaaaacagaaacaaaaaacaaacgccagcgaagtgagtaagctctacgcagcttggcaattaaatctagtcaggtccgacagacaacaatgtcatgagcctttgccatattgtttcagactctgccactcagccagccaattacatcagcagtttgttttttttttttctgtgacccgtgagagggtcccccccccaaactctgctaaccccccaaacccacccaacacacctggtcactgccaaggtaattacacagcagagactctgctgcagcctgaacttgacctttgcgcgagcatcggaaatgtgttgtgcgattttggtcttgaacccgctgctctgaactccaactgggggtactctttcaaaatgccaaatagcaaatggccagtcgaaaaatataaacaaatcggcgaaaccataacagaccaatctcattgcggtaaacagtaaatatttgcacattattaatttgaaagcactcatgctgccataaatacatttgtgtgtaaaaataatatccataatgatgtcagtggagtgagcggccccagaagcacagatgtcaagagttacgacgacaggctgaaagtgaatcatacccctcatatactacatacatacatacatacatatatgatcatttccattttagcataggtcagtattattttgatgatgccagcagaagcagcccctaacctaagtgctgagaaatcatgtgtaaaatatgccaaaaactgaattgaaaccgaccgagaagaacatgggcattatttgcgtagaatttaaaataaagaccccgcgcgatgaacccattaaattgtttacgtaatccatttaaatgaatggtcaattcgcgtcgaggtgcgaactgaatgcgtaaacacaatcgggccacatgatcatcaaaagctaaggggggagtagtatatatgtatatatgtcaatatatgtgtgtgtaaatacatattatcatccagagtggacaacaacaagtagcattcatacataaataagtaacgcagtcaagtttgcaattaaaatcagtgaatgagtcagaccatcgagtttggcattgacccataagatgctttggcttgctcgcgattagaatgggtatttttagacgataagctggctggaccacaaacttcatattatagaccatataaatataatattatagacttacctcaatatattcgcatgcgaaagtttattcaacagctgcacctcccgcagcatattcggtcgattggcccgcaactgattcatcttgagcaccatcacctggccggttgtacgatgtgtgacctgcaaaatcggaatcagcaaacagaaatcagtataaacattgccaaaatcagaaacatgaaaatatatacatatatgtagaagcagatccataaatcgttctgccagtcagacaattcaagtgcaaaatgtgaggacacgactaaactaaaaactgaaccaggtacaaaaacacatgttcgaattccagggtcaagttcgcgtggaaagttgttggcgagtgcaaggcaaatagttcgagagctggtggataattgcatcgaaacaagtgagacaacaagcaaagtggttttcatggatttgtgcagaccaaatgaaaaatcaataaacccgtctaactgtctgcgctggcaatttttggtccaatgcaatttgatggtcggtggtttgcgcgccagagaagtcgtctgcaatcacaattaaaattgttaattgaattcgccttttccagatgggttgggttggtaataggtacatacgcccaccaaaaagggttaaatgtcatttggtatgtaggtgctattcctgtacatctacactagaagcagaaattaaattacttaattgagttagcaaattaaccccaggctagacatcgtttaaatcatcttacaatattctagacgacgtgtgaaaaggttaaaatattttaaaataacctagaactgttgccatctaaacttgaaaccaaataacaaagaacattagtatctttatttgaagattatactttagatttaagagcgactttttctcagtttcgagctggtcgttgggcgtctgagccgggattgccacttggcgccagacaacattattcacaattcacttaaacaaatagccccaagttgctgccaaagcacacacacgtacacacgaacaacactcgtttttatgtggacaatggcaactagtgttcaactcttcttgaattttagtattctattctatttttatgccaacaaacacactgcaaatacgtagtgaaaacaaacagcaggctgtggcacttccacacacttctattccttgagcgcgaatttctcggctctttgctaatggcagcaaattaagtttccttgtcccttgcaattcgctcgagcggaatctacatacatacatatatatatatagatatgtaggtgagtaagctgatacaggccggatggatggatggctggatggctggatagatagataggatacgggggacacttggagaccgggaacacgtgtgcgtgggtgacacacacgacgccgacaactaccatgctaccattacctgcagtacctttttatgtgtacaaacaaccaagtcgtaaccaagtcattcccaagtcgttctttattgtcctgttgcgcttttagctcatttcgactgtgagctggcctccattctctatctgctagctgcctttgcgtcggtgttaacaaatttatgaagtttctgttgccatttgctacaagatattcgcttacgcccagcggccgaagtccaattcacggcggtctgcagtcatgagttgtttggcttgttgtctccgccggcagcagaatgtggcaatcaaaatcaaaagcagagggtaaggaaaagaggtggttgcccagattcttaactcggctcagaattcgatttccgcttggtgtcactttattttcggctagcttctcatgtcattcgctcatttgcttatctgccactcaaaaagctttcaatatacttataagttatatttatacctatatgctttccgcaataaaatcacctcataatgctgacacacccagccggatggactcgaaaaaatatatttgcagtaaggcagttctcttttaaatcgctgctgttcatcatacatatatcgattataatggcaagactaattttgtgagaaaaccaaataatatatgtaatatatattaaatttgcaatatcatatcttatctatcatatcaatagcaatttctttaaataattcatacttttatctatgatataggggacttccatgtatttttctatttctttgaaatcttgattcctgaaagtttcccacctagtgaggtctcactgtatttcttgctttaattgcctaattatttgtgcgtgaccaataaagttgatggctttacgtccgtttgccaaattgatttgcataaaacgagaccgtgtaccttacagacaacattctgtcacacagccctgtcatcccgagcgacaggccatcaaaagggccactccccaagtgtgtgtgtccattgagtgtttgccgggacaattaaaccattaaatgccattttagaatgctttcgaagcgcttaatgagcgctgcagatgaaaagcggcagtgcagtttccacaaactacgtggtgtatttaaccaaaaatgttcgaaccgttcgtgccgcagacaaagcgaatgagccgcctctcctccggctggtgcagtggaccaaaaagtggcacgtccgtgttcctaagtccgaagagccagtctctgcaactgtgctaaaagagaactcactccacatccatcatacatacatatgtgagctgagctgtgtgtggattgatcttttgctcggcggccagcttcaaagactgtccatttggtcggttggtcggtcggtttcttattgaaaagcgtttaggccagcaatgacgtgagaaaagaattacccacagaacgcaaacatactcatacatcatagcccagcatcgatgggcttccaaaataatcaattacgggcgaaatccgaaaacgaaggtgttccagtgaaagaaaccaccattgatctgggtcgtcgtcgccgtcgtcgtcgtcgtgtgtgggaaagttactcccaagattggattctaaaagctttttagcagcttagaaaaatccaggaattttcccccgaaattcatcgtttcattttttagccccaaaatgtgtgataaacaatagtcgaacgtaaacagcagaacaagaaatcaattatgaaggcgcatgaagagcattttcaacttattggctctgtttgcttatttcgaagcatggaaacgcttttaatttttcgtttgcactgcaaataatgtccaacttaaagttccgccaatgaagacgaccggccaataaccgcaggaggtgagagtgaagtcacagttgtgcgttctgcgcattcaaatgaaacgcatcaaatgattattacttaaccagttttaatggccagctgagaggctactcatctcattggattgcatcgatggttatgtcaacaggcggcagcaagtcagcaggcatttcggcatgcaaacaaatttcttgccttttgccgtaaaatactcgtattttcactttcagttggggcaaaaatgaaaacaacaaaaacaacgccacaataaaaatggtggcggttgcggaaacaaaacaacaacgaaagttgccgcaccagctcgccaaaaaaaaacatccttttttgaccaaaagtccaggcatttggccgaaaaccagtcgccactcacactgacatttcggccggcggaaaggaaaagaaagatgcaagcaaaaaaccaacaaaatattggtaatcggtaggcagagagagaaaaacccgctcattttttggcctgtaagcgcgctcgttacatactcgtgattaattttgttggccaaaaaacgcgttttgagccaaacggacgcggcatggggcacacgtgtgacattcgatcttcgactcgattgcaccggctaccaccagttagttagttgcttttggtgttgaaaatattccagctatttacacggcgttgttgcgttttcgttcattttgctgcttgacaaatacttaatgcgatttacagttgggttttttcattcaccagagtcagagccatgcctggtcaatcatctttcacatggtaggcagcgcgttgtggcaacaccagttagcggtacaatgtcaccggcggaacggctccgtagtggcagtgagtctggccaaaacgtgttctggcacactccgtcgcgtttttcacaccgttgcgcgaacccaaagcccaatgcccagaaatacgcactccgagacgacagagaaatgtcggctaaaaccatgtagtaagacaaatattaggcgaggtgttgctgccaccaacttctggtcattcccattcccattcccattcccattgccaacaacttgttggcaggaaaagaaccagctggcgagctgagcgatggaagccggcttttgaatggaatttaacccagtttgctttcttctttctcgctggctggcagatagcagataactgctgctagccggcttgttgtcttcatttctaccacgacaactggcttttcagttttgcttttgggcgtcaggggccgctctaactaaatggcctttatattgctatggtcagttataacgagccaatgcagagagacaggtgactttgtttggaaatttgcatggagctgaaatcgggttaaatggtattaatattgcacgctctattgtcacgagaacgagccaagtataataaggattttaacctaaatctatcttataagaagtgtgtgcttcaagctttttaatttacatttgcctataaggtatggtttatatcttcttcacttatggcagaactaaaattaaccttgacagctgcactgacgtaggcacaaatatttttagacattatttgaccgtatcaaaattgttttagccttatctggctgaacatgaacatatataaaacctacatattctctggttatatcagcacagtcaagtactaggattataattcaatgggtaatctaatcagcctagcttatcatcggcaagtatggaaagttcaactgcccaagggcaaacttatgattgggccataaaaatgcatccgttggccgaagggatgggatccccaattaattagccaaaaagcgagagagcgagagcgtgtgcatcaatcaccataaacgtttattaagccgacaatagcggaacacaagtgcagataaaacttcagccagccagcgccaaataaaagatatatatctctctatattatatgcccgggccacaaacagagtcgtaaacaacggcaaaaaaccataagctcaagtgccgttttaagcgatttcgaatttggttttcatgtgaaacgagcggaattcgctgttgcaccttatacattcacaccatcactattgctttttcttttttttttccaaatgctttaattgggcggtgggcggtgcaacatgtggtatatgcaccatgtgtgtgggcgaccaggaagttgtccgtgttgtccattttgaggagtgcaaatcaaagaatattcgaggctgtgtgctgcaagctgcaattatcgggggcaagatacagtttcagatttatgcaaccttttattgaacttgttggataataatgtgtgtctgtgtgtgtgtgcctcggacgtcggatgattattattatggtttgtggcaccgtgtgtgtttgtgcttttaattgttaacggaagccttggcgcgcagttatgcaaatcttttttgctttagtttggaatgtttgtttttttctgttttgtgttgttgttttttttttttttcaggcgtttaccgtcttttctttgccatgcagctcctgcctgttgtttcaccttttcctttgcggcacagcacatgtttaacaaaattttatttcgtgttaagcaaataatttagcaaagtaaaatgttgttgccattagatgttgccggggcaggaagcaacaacggcaacagctgcagctacaatagcaacagcaacatcagcagcaagctcacgcatattgcacaacttttagtgggaggatgaggtgggagctggcaatttcttttgccagtctgttttttttttgtaacaacagcaattattagctgttagttgtaggcaacatggaaattcgatatcaaattgaaaaaacccgaggggtaaggaaaagcgaatgttgttttggcggaggcggggacaattaacgcatactaaactaaaaaccgctatgcatcacgaacacgcggaaattgccagtgcacatctcatgtatttatcagctaagctcaaagtaataataataataataacaaacattgcataatcaattaaatctgacaaggaggcctcacttgctatcagccttcgagatcaccttcagcagttcattgcacgttcgttcgctggctgggtagatgggttggacgactaactgccagtcggtctataactaagtatagtttaatggcccatgttatgtcaccgtcatcatcctcgtgcccctgcccctgccccttcccccagccactgcccatccatcgattcattttaaagaccccgtaatgctgttctcacgaactgagagactctaggactcttggctttaatgacatcggacgacagcaaaagtttacgattacacgaccggcgtcgtttctcggccataaaaagcattcaaaatcgaacacgttctacatattgaattataacaatgtcacacaatagtaacaatccagccattccagctatacaaccgtcatgtgtaggatgactcggcaactggggtatattcttttcagttttcagttccagcagtttgaggtgggtcgtatcatacgacttgcatacgcttaagggttcgtgagcgatatctttgggaagtgctgctcctactgctcacctctgaaattaataataaactggactacgacgtgcctgccatggatacggaatggctgtttgtttaggtgaggcgcacgacgacgacgacgacaacaagacattcttggcttggatcgaacctgatttgtttatgggcttgcccagctgcatatttccccctagatcattcgaaatcactctaaacgaagagaacgtcgacgacccccgccaagacgaaaaattatagtacaactattacctattacctatccgccgatccgaaggtcataattattcatattcgtattcttggagatatcaatcatttgcggttgtggaatgtgctgaaatgggcaatccgctatatatatatataatgacttaataatttgccgaacaatatattagactgatttatagttgatagaatgctatctcactccggcttcacctctatttgtgtactttacgatactccgctatagcagaccgtacaataataaaattaaaagccgcttaacttgtttacttttgcatcaatggcatggcaaaagacataataaatgggttaagcaaacacactctcacaaacgcacctcaaaaaaaaaaaaaataaaataaaacaaaaaaaaccagcaacgtcattaaccgaccccacgtttcgggcccgttgagtgccttcagatagtcgagggatcttagattgcagattgtacatacatatctatgtatatatatatgtacatataactagcactattcacgtagcgattgcatgggcattacgcttttcagttatttcgttttctctaatattcggcgcggaaaaaactccccaaggtagttccgcaaaaactctgtcgtttaaaaattttaacggggtgccttagaaagtgttagaaacaccactcacacgactgagcttataatagactcacaggggagatacatatgcatatatattcagaaattatcataaaacctagtgcacttttatagccagtcggtatgatgcaagcaaatgcattccaaacatgttcctctttccgttttgttatcagtacacgttaaaacttctgatacaagaactaaagctacaatccatatttataagcacagtgccattgccacaccgagtatgagaaataaattaatcttcgatacatggttaaggcaattaaatggataaatgtaacacaaaatcaattaaagacgtcttgttgtacatgagcagcagctatagacacctctatatatatctatatatttatatatatatatgggtatatgtatctatatcgacaagttgccgcctctaacaaactgtgctaaataccagaaatgaaataaaaacaaaaaccgcacaagacagtagcaaactgttaattggatgtggcgactgtcaatcgataggtggaagtgaaaagccagaactgaagcgtagatacatatatgtatctgtacgacttgcagtgcgtttttcaagtacatacatacgtcaaaaaggggagggattaggaggggtgtgctgcaaaataatttgaccttagagccactaaattgatcgaattgccaattgaaaggggcttcgatggggtgggaaaatacacaaacaaatttatcgaacagagaagctagtttttcagttttaatttcaaaccaatccattcgattctacggcgccagacaatcccttcttgccactaagctctttgatcacttatgcacggcgagtaagtcatacaatttaattgcttttatcgcacgccttaaatcgcaaacatcaatggatgtgggctctgtcaattaaattagaaaagcacgcgtgtctgtgagtagtacctttttgccacacagcagttgcactcacacacattcaccaccaccaccaccaacaacaacaacaacaacagatgcatttggccagttgtgacacgtccctgtgattaaaatcaacataaaatccagacacacgccttccgctggcttacccatccccatccccgttcctaggttttcattaaatgacaacaacaagcacttccgtttccatcgcttttctccggctattcgactaagtgtggcgcatttgccataagcagtcccagcgcccatgtcgccaccattccaccattggcccaaagaccaaacagtccaagccgatccaatcaagacgacttgggtcgcttcggatcggattggatcggtgtccgttgcatggtgaccattaaagggtcactggcatgctgctggcgattagcacaagcaagatgccatgcgaaagggttttcgcctccctatttggctagagaaaactccgacaagatgggaaagttgcaaggcaacacagaaatggggaataccctatctttgctcaactaagagagatttatagaagtttttactatccttataaccttatgataatgtatgttactatccactttagaatcgaatcttttaatatccttttaaggctggcaaggatcatgagtgtccatcttggagaaagggtatttcagctagagaaacgacgagtctcttgagagatctttggcacaaagagctgcattcgaaatccacgcaatttccatacccagaacggctcgaactttgtcggcttgttaagtgcgcgatcgggtacgaaatgtaattggtttggcgcgttaataatcaattggcgtttacattttaaatgtggcatgccgcggacagggaaaggcggctgcgtttgttctcccagcgagacaccgaggaatgccagccagccagccaaccagccagccaggccaaacggagccagcactctaaactctccattgagatcgtggcgacgtctgcccttgatgaagtgccacatgctgccggttgccacagtagccagtccgtatgatggaagacccttgcccccgcccttttctccccccgccaccatcaccgccagttagcgtttgtgcaactcatgtcaagtgggccggactggtcggcgactacacgtgtcgcccaacgtcatcgccatcgccagcacccaactagttctaatcgaagccggatcgtattgcacgttaaaaaaagaatatcaactacatggataatagtttaaaaaattgggttatctttcaatacctatttaagatttttagtttgagcttccatttctgtaagctgaatcaatcttaaggtttaaagtctttaactattgtattttccaagataagtaattcaattcctgagtgttaattgaagattacttcaatctgaaactgattttacttaaaagtgtcaacttttgtgaggaaaaacttataaaatatgtgcaaaacttagttcaagtctgcagatcagatcatctaaaagccctcttttaatctgttgtaatgttctgttagttcaatctaataagattttgttctgagtgcagaaaccagttggactggtggcgattggtggcgtttcaagctcaagtccatcaatcagcggcttgtttgggagctgagtgagccatgggctgcagacccgggctaaaatagctttttaattgtcgcaaatatttataggaaatttctcacgcacagccgaatggagtcgtgcaaattacctggtctcagttacctcagtagtcactcgaatgtcgtgcaattaaatccaaggatttgacaataaggaacgaaaaaaagctcacctgaaagcagagagaaggaaaaacatttattaattcggtgctacgcgtgcgatggcaatgaacttatattcgtttaacaatctacttttgataattaaaatgtgcgcataaattattgtacacttcatgagcaatcagaaacagaaacaaagtgcaaacgctccacataaagaaagtagagaagaaagaaacataaaaacaacacacaataaacaatttaattacgcatcgtttgtgcattgagtgtataacccgcacaaaagtgaaatgcagttataaacactcaaaaaatgaataatcttatattgccaaagcaaataaacaaagacacggcccacaacagttggctgcacatttcaaattggccaagagagcggacaagtaagccccgctacgaattcattacgttttcgaatgtgagaaaattttcgagatgaattcctgactctagtcgcctggaagttttttaattcataaacacgagggcaataaattactttgtattggaaaaacctacgcagatgtgcctgctgcttacatgtcgcgtgttagttggttcaaaaagaaagtctgcactatatatatgattgctttgtttcgttttccacaccattgttagttagcggttttccaaatatttcagctcctttggcaaattatgttatgtcgaaatcaagtttaaaataaatcagaaaacttagtcaaaaaacccaatctcaactgcaacatctgcatagcatcttgtcatgtcgcttgtcgctcaacttttccaacgcgctcctcctctgtttttattactccattgccgcggagggatggatatgaatggttgaatggtcggatagttggatggtccaatggctggatcactggatgggtgtctgactggaggagagcctgcgacatgtcaactatttcaaggctaaatcagcgaggcagtcagtcgtcgtgtgtcaacagtgtgtttcaccctcgccaaccgagcgaggtcatcgaactccggacactgcagctcggatttatggaacaagtcggaatgcatttgcctgtcatttcgttaattgaaagttggtgacaacaaacagcagaggcagtcgagagccgggtcccgtctcggtgagtaatttcatttggatatccttcattcaggcactccgaattacggcccagatggaatgcaaacaaataagtacaagcagactaactaaatgcaaactcgcaatcaattagaacaaacagagctctgtttttcccaggcccatttggcgactcgttaaaatagcttactcacaaacaagcaccgcgccgcaccctcactgccacaaaaaaaaatgttgctcattatttttcggtcttttagcgtttttttgttttggtttttctgctgtgtttttccaatgcgttcgaaaataaataaataataataataaagttgcacgacacccatattcgtatgaataaaggccgagtatctcgaaatttatttaattttgtacctcttttttttgggcacatttgctgggagcagccgtcaattcgtcagatgcgttttagttgcctcataaaaaaaaaacccagtctgggcttagaaaatgcaacacaggaaaataataacatttcgtggtttctggcgccgtgacaaatttaaatgagctctacttttgggtgcagcccctgcgacaccaaaacaacaacaacaacagcaagtaaaaaaaaaacgaaaaaggggcaacagcatatatatatatagtcataataatggggtcatatattactaatgtgtttggatcgccggcgtctgcccgaagctccaaaatgaatcaatgcaaaactatgaaatgcatatcgcaacgacagcaacaacaacagtgacaacacagttgacaagcgctgcccgcggtgcacagtggtcaaaacacttgaattatcgtgtaaaataatagtaattataaagttaaatctcttgccattgctaagctaataacaagacaattttattgtaaaaatcgtaataagagattataaaaacctgttaagggtctaaagctagtttttccacagtagctattgagtaatgaattgttgaaatataagctataatttataattgcgtataacaattatcatatacccattaccggacccactgtgctgcaacacgctggcgatgaatcagttctacagcggatggaggctgggcaatcatcgtcgtcgtcgtcgtcgtcaaggggcaatatgctcaaggccttgtgtcagaatgcatttttatgaatgaacgcgcgaaggcatacaatttacacgtattgagtgcgcttaaatgctccgccaatcgccggcgagcgaaactgctgcagatagctgggatctcaaaagctaaactatttttgccagcatcctcgatgatttcgaagttcgccagagttcgctgaaaagccaatgcaatgcaatatggctatgagatagcgaagtgcattgaactccggccatcggatggatcaaccagttgagcagtcaaacaaacgtttaaacgctcaacagtcaattccatgcgactccattcaattcaattcaattcaacttgattcgattcgagtatctgctaaaagcagatattaccaactggctttggccagcccgttttttggccgttgcctatttggtaggatatcgtgttggccgcggcagttcgctttttgggcggccccatcctccaaaaagcgagtgagcgcgcccagccggtcacgtttcaactatcaactggaaatggctttttgattggccatcctccccagagcaatgcctatatagttctcgaaatgcggaagttatgagcctagccaagattaacctgcgccctcctcctcctcctcccttcgctaatggcgtatattttctaatcaattttcgaacacactgaaaagtgccttgcagcgttaaatcgataaattgcgatggggcagctatatgtggcgatgttgttgctgctggtgttgttgttgtcttccccattagacaacaggctgtgcaatctttagtgtcgtttgtcaccatatttgccactgcagttgacactgatgggggaccaacaaccgagaaccacacagaaacccacccagacagccagcctctctgctgtcagcttcgtctgggtctatgtttgcactgaaagaaatgcacttggaagtcgtatttatggtttcaatatacggaaacctatataaaagctatctttttatgcattatcaatatgatattgatttgcatatgcaactcccccgtaaattcaaaattttccctcagtgcattgaagccaccaccaaacttgttgcttgcctgcgcccttcattaatcgtgaagctggttgggaaaacacaactgtgtgtgcggtgatggcatttgatgtgatcctgaacctgcgggctctgactgactcccctgggtggtggtgagcacagcgcaggtttttggttggaatttgattatgcaccagaccagagccagtgtttgcagcaacaagagctccccgtaccattcccattaccatttcctattcccattcccattcccattccctggttgcatctgcgcaaaagcgtcgagtgcaacttgtcattgtttatctgctgtggcagtgccaaacgatagcttcggcttctgcttctgcttctgctccagcttctgattctgattccgcttccgctggatggtggtggagctgagatgttcctgctgcagctgcctacaatgcggcttgcttgtgccatttccatttccattttctttgcctgcccaaatgtgcgcaactgcagcttatctaaaaaaaaaaaaaacgaaggggcacaagaagggtttggcgaagccggggttccatgtcttgccattcaccactgcttctatttagggttcttctctgccactgaagaggcggccatagaagtgcccgcgtccaaagttctcagctgctgctaattaaaagagcctgccagagacaagatacagatacatgcgggatccactgcgaagatcgtgcacagcaagaaaaactggaacctttatgctttacatatgatttaaagcaaagaagaagaagttctttcatttgtattcatttacattactatttttaccatattgttattagactcggtcattatatattttttcagatactggaatcatttgattgcaatcttttttcgaacaattgccgcagtgtggcttagtaagtgatatcacagagaggcatcacccaagacacagacaaaacacgagctgcaactgcaactgcaactgcaactgtaactgcatctgcagcaacatcagccccagcaacatcgcaagcatccatcgcaagggggcagcgcttgggtggcagcctgttaaatgcatttgctgccctgacccctatatattgtgactatcaggccatttggcggaaatttaaatttaattagagcgctctgcctctgtccaagatgtccgagaacggaaagcacaaactccgggactccgggatcgtagtatcgcaatcgtatcggttcgttaggacggtcgttgggtctttgatggcgctcaattgaggaattgaacaaaggaatgaagaatatacatattagaagacttcgataatatttttgatactatactggaatggaaaacgacaacggatgcgtgggaatacgcagtcgatgctataaacacatatattcatttgttttctttatgtctctttatttctgtttaaagggaagatattcgagatgttcattgtcccacggatttatgatggcagatagtatctatgtatattctgtatgggggtgtggtgcgcattatagctgtcattttactattgtcgtatagtttatttgcatacttataccgattgtttcatacgtttcttttcgctgatgaatcgctgctggtggtggcatgacgcagttcccatccatactggcaataaatatatattcatctatggccagacaatcggaaaaagagagcgccgaaaagtacgcacttgagtcactaaaaaaaatattatgtgtgattgaaagaaatgggggaaagggttgcagaacatagacatatgatatatgcacgcataggtttctcaaggggtgcgcacaacactttagagaaggaaatttttaaatttcgaaattgtctgacactcagacaattgagttatgacagccggctgagtgtttagttctattaaagtgcctccgcagatgctccaacttgatatgggatacctagatccatagatagatacaaattcggatatttccgagccagagtttgcctgagtttcgcccgtttgcagagttcggccaatcaatttgcctcaacaaatttgcagcacaaatagaaacgcttagatatttaaccaaatggtcaattgtcacgccaatttaagacgccaaagtctcctttggcgactgccgcttgacgctgtgatattttccccattcaagccgatttgtttgttttatgccgcgagccaaaaccaaactgaccatgaaacaaacagccagttagctccgagcggatagttcaatacgaaatatttcaaaaaaaatatatatgtctccgacttctctgcgccacgcttgaccgcttcgaagggtatatatttagttcaagtgatttgtaaaatggaaaaaatacaatacaaaaaatacaacattgtgaagccggcgattttctatttacatttaggtgatggatagcttgggctagagaaacccctggataaaccacaattaattacgatccagcgacagtcgatcgattgccgactttgactttggctccgatattatctcgacttcgtctcgagtttttttttgaaaaaaattctgggcatttgagtttttcaacttcaactgtcgggtatagtttttcaaacaaatacgcacatgggtgttggtttcccctcctcgatcggttctcggttgtagttgcgtttttcgctggaaatcattgggggagagtgctttctttttttgagcgatgcgtgcctacaaaggcgccccacgagttcaatgaccatggtcagccaagatcgcttgtatgtaagtaagtatgtcccatgggaagggggtgaaccattgtgtgtatattgtacatacgaatatgatgtatagtgtgcgcatatgttgggcataaagctgctttatcctggggatgcggtctagggcatttcactgggcttttgtactctgtatttctgtattgtgcgctcgcagcaattcatgcacattcattgtttgcatagccagatgtttaagaccgaaaaaatgtctcgttaattgactcttacttaactctcccactcccactgaaaattgcaattagatgacttaatgggcgcacgcggccaacgggctgtttgcaaaatagctgagttaattggaattattccgatatcaacccaccttgcgcaaagttttccttttggcttaattgtttatttacacctagaaagataagagaatttgtggctgtttcgctgtttacgatctggagaatgtggagtgagaacaataaagtattccacagtctatatataaagctcaatttatggatatgtactccccaaatacacccattcttttcactgaatatttgcatagccgataaagaaggccccaagtctgacacatcggacaactgacaaagccagggaggagcacagtccatggcgaatggagcatcttcagggcggagtagtggagattaagttaattacaatttcgcgctgctctggcaaagtcagccaagctggccaagctgtacacgctggcaacctgtaacgtgcaacgtgcaataagcaacttgcaacattgtagcgattgccactgaatactttgtgctgaacttgatcgctgggccagggcagtgtggaaatgcctatgccatcgatggctatatatgtatgtatgtacgttgaccaacttttgaagacaccaaacaataccaagtgcaagacggtatacccattctcccattcattcataggtcgtcgacgtctggcacccacgtagcaaaacaaagcaaaaagcgaaactaaatcgtgatttatgatgattatatttgaattgctcattgtctctcacaccccaaacatcccagattcgcctttagatcgtccaaacatttggctctaacgaacgattttatttttttttttatctcattgcaaataaataaaaatcaaaattgggactcactggaagtgatggtggcctgaccatgaccatgttgcagctgctgcaaatgcagttttccatcgagcagcgatagttggaaaagccccctaccaccaaaaaaaaaaaaagggagctctagtgcagtttcactttgactctcccttcggggtttaagttcctcgtggcgttgcattggggggtctgggtctgtagggcgccgggaaagttaattaatttttcagcgaaagttgccttaattaatgcacatcagagactgcattttggggtcatctactaaactcgccaagcataaaccttaatccactacggccagcaagcaaccccttaaagttcgtattaccaaagtcctggcatttgctattagcagcagcgttttaaattacagtttcactttttaattagaccccgcccgggccagacgtctatgcaaagtcgaatagagagcaccggaggcagcagctcatggaaaggaaattttaattaaacagtctgcgagagggttgccgcaaacagtaacaaaaaaaacctaaataaaaaccagcacatcgcacaacgaactccaatggtcggagtcacacacaactgcgagtgctggtcagttgcgaaaaatgtttcgagggcttggccaggaaaaggaggcgggcccatccttttcagagggtaaaatacaaaaaacacactattactcgtactagactgtactggaaaacttgaaatacaaagtgctgccaaagtccaaactcatcaatgatttgtatagtaaagactgcattccttaaaatacacaattgtgagtaaacctctagagcaagctcacaagtaaaatgcttagaaaatcgctgttgtattatgctcataatatatatatatatgctcagtaaaagcatagaacacaaataactaaactcaactgcaaatgttaaggaactcgatcgatacatttttcaccatctttgtttgggtatttcaatttcagtttttcgcagtgtaagagccagcgatgaactaagtcatttgcagacctgactgagggattcgaatagggcacggcattcagctttcggctcagatcggtttggctcgctttggccggggttcctggtttaatagcttcgctcttggcattgaaatatttatcatgtcgtgctaatattgcccagaacctcgaggactggacacgctcgattggacacttggatagggcgcagctagctctggaggagctggccaaagtaaaagccaggtcgcttgcctggctgcctggttggttagttgtagtcagtccgtctatctatgtattccagagactccgaatcccttccccctttcgactgcttcttgcgttgcccctgtcatcattgacacgcgaattgcaaaagttaatttaagtagttttggccaaaagacgacaacaagtcagggaaaccaaactgcactgcactcctgaaggctctgagcttcggctttggctagtcatgggcagatttatatggccatttggctaatgaattgcggccagaggcgaaggaagaaataagagctgatccatgggcgcatataaatcatgagaactcaacttcgttgctgcctttaaaaacttcgatttcattcctgagaagccagatcatcgatgagctcgttttttttttttttgttttttccagccatcagcatattttgtttgggcccgcattggttgttgttgtttttttttttcgaatgccatttgcttatttttgttggccatctcgtcgcacgccatgtgaattatgtgggagttttgttggccctgcgcaaacatttcaattcgaatcgtttgtaattattgcgcaaatgtgacaagacaaacagtttgttgaacacatgtctgtgagaaaggcgaaaccatcgagtaaaacagaagaaacaacctaaatggatggcaaggtcacaaacagcagcgagctgaaatcccttcgaaaaggtttcttttttcgtggctttatggccgaaacaaaaataatgaatgcgggccccaaaggaaatgcccagaatatacatgtactgagtcatcgcaccgtcaaaagatcttgcaaaataggaaataagcattaagatcgcactgctaaacaaagcgagtccccacaaattaaggcaacgtcaagcggcgtgaaatgaaaaggcaaaattcgaaataaattcacgagacgaatcgccgctaaagttgagcaaacgaaaccagccccaaacacctctcataaacaaaacatatttatatttatatttatatcgagaatattctccgagctgcatcccatctgatctgatccaatccatccaccgggcaagtagcacatcgtgcatttattacatttttgactcacagaaataatcaacgtgaaatatttggcacacattcaaccaagaggagaaaaaaagcgattggggcacgcgacgtttggcgggggcctggcgtcccgatcaataaaaatagccactcgcaatccgcggcaagacgtgggcgagcaacatcatcatcatcatcatctctagtatccgaaaccgaatcgaaaacaacatcatcatcgccggatgatggcccgatggaatgccatctatgccacagttaagaggcaaacaaagtgcaaggacgtcccaaggggcccgtactcatccctccccgtttggctggatataaaaatatcttcttctcggtatctttggccactccactctccagaggtgaatgaatccgaaaatatttctgcacgcaagttgtgcgcgtaattgcacgttgctgcacctcgctctcggttatgggagtcactcagtcgcagccgtggagtaggagccatccagattgggatccagactctgtgggctgtgcgacggacggcatcttcttctggcttaacccacatacaggcaggcaaacttccctttgcaacacattcctagcgcttttactgcgacatgctgattggcggcagcatccctgccgcagtatctaactgcatctaaatggagttgtgggcttcagttctttgaaccagccagcctaggagcactaggatccacgaaagtagtgaatatgacagtattaccgcacttctggaaagtaactaactgttactttcggtaacgagtaacgagtgaccaaaactaaatatgtcaaagaacgtatatcaatcttaaaagtgcatagtattcatagtattcatagtactcagtttgtggagaagaactatcaactattttgcatactactacactgaaataaatacacagtcaggtttccccttttcgcacaaaaatgtcgcaatttatgggctctaatatgaaattcattgcttttctcgcccgctccgcatttttcgccgacttggctcctcgaaaatgcagcaactcgttagacgcattagggcctgggacatgggacatcagttcacttccctgcggatgacatatggccaagtggggatctgcttgcctcccagctcacatacctgtggtggtggcggcgcgtcttattagaatttatgattcccatctttttcttttttgctttcttcggcgccgtcgtttcgtggactttggtttacttgctttgctttgctggctggctggctgcctttgcccagctggcatttactcttagtttattatttatcaggcactttatggagccccgaacagcacacgtatatatttgcatttataatttcaaattgtttatggccaagcgtgaaaatgcctcacaagacaacaagaaaatggcaaaactgcaagcttaaaacaaaaaaaaaaaatcagaaaagaaaagtgggcagcaacaaatcttttcctaatgcatgaaatttaatgtgcatgacgcatccgacacatgaactaaagaactgaatatatttacaacttatacgagagtcaactaattgaattcgattattcagcaggaagcacttgtagtggataagccgcggatttgcaataaatttcccacccgctcagcagtttatgaagataaatacacaaaacagctgcgatcaaaatcaaagcagcgtttgtataaaataaaaaaaaattgaaaaaaaattaaatgtttgtacaactaatgaaccttcaattggcttaattatgaaaacatttggttaatgcctgaagattaattaatgacaaatttgggcggtcgtatcgcaattaatgggacagctgatctaataaattacctgttccttgattttgcaatcatgggcatgtgcaaataaatacccaatacgttgcgcttatcaatgaaaatcgtatttcgcaatacaccactgcaatgactagaagaattctatttcacagcaataaatctattattaatgaatgaaacgctacgctggatgcccacgtaggcgaaacaaagcacaaatatttgcatatttcaaaatcatatttacgagctcgacgacttcaatcaattaacgcattaacatggttttattatgtatcgcattcaaattgggcaaatcggcggtagccaaagtgcgaaaaaacttgttctcggcgccattaccaaaaaaatataaaaaaaaataaaacagcgaactacacaaatgttgccaacgtgggcgatcgatcgatcccaaagtgagtaagtattataacttaattagctggctagcgatttgcacagttgcttgaatggaaatcaaatattttcgttgctcattgtgaagtgtttacggtaaatatttagctgtgtatatatttttggcccattgcataacttgttttgtttgcaatttctttcaaagagtgcaaaattcatttgggcttttgttattgaaatcgccgccggttggtttgattagtgcgttaagcacttttacttttttcgaaccaaagacaaagcctttggatatgcaaatgggatttcaatttctcacatttataggcccgaggccctaactaagcaaactttgtttttagcttggacattaagtatttttaatcaagcccaaaggtaagatgcattataacattcgagggaaattaatttggggcgcatcagggttcgtctataacaaataagcgctttttctgctgaatatgttcggtttcgctgtaaacatttgcatgcacatcaaaagtaactgtaaccgaatgtttgcctggccagcaaaaaagtaagaaacaaccagcagacgaggcaggcaacaacaacaacaacagcagcaacaaaagatcaaaatcaattgaaaaattgtttggcgaaatggtaagaccaaatcgaagatggaaaatgtgtgtgcagcaggcggcagcaacgggacaaaaggagggaaaaacgagtggccagcggaagaaacaaaccaaccactcccggaccaatgcagatgttgcagttgcagcaactgctgctgctgctgctgctgctgctgctgctgatgttgctgttgcagtttctaaatgccgccgcgcaccaattcaccgacagtgaggcaggcacaggcagcgagaatgcaaactttgcataatttatggcaatcaatttcgcgtgaacatcaacacggttgcaacgcaaagagatacaaagccgtgccaaaagcaaaacgcaaagatggcgaaaaagaaaagaagaaattgtggcagcaacaacagcaaatgcaacagcaacggcaactgcatgccatccgtctatcgaatgccactatcaacttatttagttctacttaaatgtttactttcatcaattcgcaacgaatgcgactgccagcggtgcaatgtcaattggctgcggatcgaatcggatcggcttggattgtctgatgtggctttttggtcacaaaactgtagctggtcaagagcgactaagactctctagtcgcctcaacaggatgcccgccatcgcagctacagatacattcactttgccaactccgtcgcttagtggaacacttttcgcaaaaacaaaaaaaaaacaaaaaaggatgaaaaaaaatcatgcaaaggcagccggggagtacgatttcgcctggccctaatctaattgccatcgcctaacccaatttcccagttcttcaattgcaacttagaactttcactcgctgccttggccagcgcgaatcaaccaaccacaattgttttgcacttgcaagaggatggctttgaggtctcctcgctcaaaatacatatcattttacataataaatttaatgccgcacaatccgatcttctttgtctgcaatttgctcacataggaacccctcattgtgtctactgtagttatcaaataaatactaagcactttagtcaaactctactctacttccattctgcttgagtgccgtctacactggcgttatgcattcaccgttgcttttggcccacttactaacaacacttacttacgaaaactgaaaactgaaaaagaaaaaaccaaacttgaacgaaaaaaccaagtttttcctgatttatgtccgaacaaattgtgtgttggcttggcgttttccgtatgcgacatgatttagctaaattatgttgtgatcttttgatatgtacaatgaaaacgaatgaaaacggttcctctcatctccgattaaaatcgggaatatgcagaggtcgttattaattttcccacttatggacgctttcccgcctgattaaccccatctgtgtgaggttaaaatccgccagcttctatgcatcttgcagctaaaccgcatcgtttacagttggtatccgttgcacgcaacagatggaaatagatgggaaattgtgaaagagttttaatcaaagtgggaaccgcttgctgctcctccgtttgatatctttctcgcgactgccttgacacgcaattgagcagcagttcccacccagggccaaaaataaatctcgaagagattcttcatttcgaaatatatgtatctttgggagggagcagaaattggggccaaaagcgtggcagtcgagatgaaaatccatgcgtgcacttgacgccgctgaacccacaaattggtcgtgtcattaggcagatattgatttgaatttattggcaattcaattaactctaaccgaatgatcgggggctggcttcaattattttccttctattttttatcgatatgaagggaaggggtgaagttttttctactgctgctgcagacattaattgtctggcagctggcgcattacaatgcggaaatgcagttgaatcgaatggatccgaatggaatggaatcgaacgcacttcacacgcaaataaacagtccgtttgttggtttggtctggaagttatcttcgggatgcacggcagccatatattctccatcgaggggtgaagtgaactgggcatattgaatggggggggcaactgcgaactgggaatggcgagcagttatgcaaatcagcaggtagtctcccccggaaaggtagaggaacagaaccatacataggtcggtcattcaccgctagattcacaagtatccatgagatacgcgcaactcgcatgcaatttgcggcattagaatatgcgcacatgaatagatagaaaggatccttgtgttgtgttgaccacgaatgaatggagcagatttccatttaaccgcagctcattgtgcacattcattagacaactgaaatataattgcaagtaaggttgccattggtgctgttgggaaagctgggtgaaaataatggcaacaaataaccgaataacgcccgtgaaacacaataaacattcacgaaagaaatgtgtaaatatcacttaaaaacgaaaatgaaagtgaaaccgttttcattcatccattcagacatatgaatctgaaaaaatagatgagaaagttcaatataactcgggtgaaagagttgtcgtatcatttagaaaagcttggtgttcacattgatttcaatttccactaccatgtccccccccatcgatctatgcagctaactaacccatcatctagatggccgtgtacattgtaccagtaccaatgtcactgttgattgcataatcacctgaccgtcactaattcctacgtaattggaaagccataatgtcagagtctttgtgccggtcgtttgggccctcctcccatcgcatcatgcatcgcatcgcattgcatcgcctcatatgccatgcaccacatctgttgcaacttattaatttttggggccaacaaccgttccgagctgtaagcgaaatgcccaaatagcaacccgcaacaaagcagcttacactcttaagtgttgggccgaggctaaaactaaacgctattaaattttacacacggtttcactgcagttcgaatgcgtttttcatgagctctccgctcggaatttttttttatagctcccagccagctagctaagctgcagtggcaatgggtttggatttttgagtcagctctggctctggtctgggccattgttttgcaattttgtttcattttggcccagagagaagggggggggggggtgggatgatgcggcggcggggcggcatgatgatgataatgaatgatgagccggccgaacaaccgccacaatacctattgagtaattacaaaaattttaaagtttaattaaaattgtgtaaataatcgcatttgtttggctttgttaccgttggcgggtgttaccgttgcgaaaacgaaagtgccatcaaattatgatgctcaattgtgggaacaacagctgccttttgacaagctcaccgcctgcctgccactcgatgaatttcaaatgcttgtcattgaggcggcaaagtatctgcatggatcctatgactaatggcagggagtgaaaatcatcaaacagattgatcacttcatttaacagtgtaccaaaatatttcttatctgagacatgcgcccacgagcaagatacttttcagcgagatacgtgtcaatgatttaaaaataaaaaaatgaaaccaattgtaaaaactaaagaattgattcttatgcttattcaagtgcggaattgtcacttaccttgtaaacctccgagaagaatcccgatccaattttctccttgacgaagtcatccacggagtataatgctgagacggcagtgcgcagcgcccgacacgagctgccggtgaccaggcgatccgatgatatggtccgcgtcacgggcgccggcggaagaccatttccgatccagccgccgttgtggagcggctgatgtttcactggtgcttccgcggtggcgtctccattggtcgatgttgtgacggtggtggcggtggtgcacatacccgctgtgctcggccagatgaaaggggaggcggccgatgagtccacctggtccaccgataatccgcagatctccgacggcgggccgggtccactgtgctgattcaggctcatgtttatcagctacgacgtatgttgctgtcgtaaccggatgtgtatgtgaagttggtttaagtttgtttttttttggcgttggacgacctcgccttgcctgcttgttgtgggggtgatggatctctggggatcgagttgggaactgtgtggtttggctaatgctgatgttctcttggctacaccatggtgtcgttcatcgcaagacaatagttagcggattgacgcgacagttagacgggcacgatttgttcaacggatgatatattttagtgtttgcttatggaacgcagcacgaaacatttatgggacccataggtctgaatttgacaattttaaaaattttgaaacaggaaaaaaaattgtggagaactaactatcaatcactttttgcttgcttcgtaatagagaaacttgtgtatttagttgttggatatttggaatgcatttgattgttcttcgattcttggcacgttgcaattgtgttggaagctgcactggaagcgctcgcagttggaagtctgaaagaaatgcaggcaatagttaaaaagttaataaaattcaatcaaactcgtcgctgctctaatgaaatgtaaacaaatgcgtctatagataggtatatatttgctcgaaaaaacagcgaagcgggccgcgtgatcaacatttctgtgtttattccttttttatgaggtgcaaattaaaatacttcaaagaattcgccttattttctgttgtcacgcgccactcaaagtaatatcccagtgtcagcaataaattctagaatataggaacataagatatttaaaaagtataaaaggggcagaaatcaagacaatgcaaatttattcaggcctaataagagctaaaagtttaatattttaaatggtgtagataggaatctgattcttactcggaagaagctgataagttttttcgaagaaacttaagcctcttcatcacgaaatcgtttcttcatttaatactcaaacagcggccttatttatttatcattccagtttttcgtagacattttgcattagcacatggcgaaaaaaaacatcgcaagctaacaaaactaacaagaatgaattaatcgaccccgctggaaattgctaataaatattcagggtcaaagtcgacaaaattggcaaagttttgcttatcagcgggctcttgcggtgtgatagccgcttaatatatgtacaggtatttgttgccgtttgataaggcggcctttttaagtgcgataaagcacacaacccatcaaatgtccccaaagccagcagacttcattcagcatttgcttttttttcgaactaacaatgtaatttagcagcaattttgttatcattacgcttacttttgtcgtcgtcgtttgtttttcgtcgttgtcttgagaggggggcaaatgagttcagttcatcagcaaataattgagataaacacgatcactaaaaccttggccttgcgccttgaaaactacgtctgttttgagtggcttcaaggagttagttacattcggcaagggaggtcgctgaagagttccacaatcggaaaaacaccaccacccaccgcgaagtactcagtttcagttttttgagataagttcggaaatgatataaccaaatattttgctgcttgctattagaccggcgaacaatggcaacaggttggaattttttgatttgccattccttatcgcaataaccacatatatattcggcgataagatactgagaaatagcttttgggcgacacaacaaaattgaatttggctcgtaaaggatcatgcgagtggccaaaaggcgatcatgcccacagagataacagctcaaagccacaaagctcacaattaaaactataacaaaataattacaccaaatttcgacataatgataatgatagcagcgaacggacacagagctctcacttttccgctgctggccaaagtcaaaataaaactcaaattaccaagcacatttttgcactcggcaaataaacggggaagttatgcgaattgggatttgctatttgctatttgccgttttggcattttgtgtgtgtctttccttctcttgcgaaatctgtccaaatagccagttgaagtcaaagccggcagcaggccataattagggtcaattgcggctaaccgccgccaattgacgacaacgaaagcttttggccaaatgaagcggccggggaaaaagtgctacacttcattaggtgccatgacaaacgaagagctgcagcaaaaagtgggcttgtggcttcgacttaatagcacccaaggatcgttttcgcgcccaccacgcccccagaatacagttgtccaattacaggcaggtctttgtcaaattatctcgttttgagctgtgaaatgaatacgtgctatcttcaccagtcagctgtgaaagtttccatacaccctaatgagtggcaaacttaaatatatttttaaaaaaaaattgtaaacattaaactcggctatcatggtgaagagttagctggggagagagtgcctatcatcgatgaagaggaaaatccatttcgtggcccacaaaaatgagtttagcacgctccgcgaaactaagtcaaggccccaagcaacgattttcgttaccgatttgggtgagcaaatctatcgagtcgagaaaaacacttaagcggtcgcttttatttcgactcttgcatacatttattttcccatcacgtttcaaactatatacacatgtattccgcgtggaaagccgcagcagtaaagcatcaaaatatttatgtttcaataggaatggcagccaaacaaatgtcagtccgcatccgtggttgttgccaaacatatggaaaatagatgatgagccccacaacaccggaatgctgcaatcttaaaagtcagcagttccacgaagattaaatgccctaaaggcattgaagcagctgaatataatttaaaaatctaaaaaaaaaaaaggcggaacacgacgtgcaataaatttaggcaattttagaaaatacatcttgtggtgtcgcaagaactcaaaactaaagaaatcacgttcaaaacagcagataataggtatttctacatcaacaagttgacttaggcaagaaagtttctatatctgaaagttggtgggattctgcaccgacttaagaacaacttttctccaaatattaactctactaatcgttcaaaatcgaggctatttaattaatacatttcctaatatgtttgctagagagaaaccaatgaaattaatttcagcacaccacttatcgccgtttgctttcgatggcgtttatggcattttccaaaacgaatgttaaaccgttaaccgccacaaggttcgagtcaataaaccgctgtcgactgcggtgactttgttgccgtgctgtgagatcaagttgcatttttatggggccaagggtcgtcgcggccaccaccgtctgcatcatcatcatcatcagcagcagcatcatcgtggtatcttcgcctacgtagacgcgtgccaggagaattgtgtgcaatgcacactgcatcgtttcagctgggccattaaagaggcataaatcttggttatgaaattggaaatgatttgctgttcaggcacattcaagtagggagcaagtaacgcaccgagaagtgatgcgttcaggaagcgtcttgcgtttagagtccgaaaaaagcgttaatgaaaaggaaagttggtcagcggcagaaaaaatgccacttcattgccgtgtagaaagaaaaacaaagacgaggagacggcgaaaagaagccaaggcagctcaagaagaagaaatttctataaacaaagagatgagacgccgaggcagagcaaaattatcaaagaacaacaaaaaccgagaaacacaaaaaaaaaagaagtggaaaatgggacatggcacactcttgggcccacagaaacaacaaagactgaatgaaattcatgtcgttgtcgcgctcataaattcttctacgcctatatatcgctggctatctgagagatacagatacacccacacttggaaaaactaccaactcattcagccggggaggtgctggctgcatccgctctctacctatatgtatgcctacttatgaaaaagaatctatgtatgtaaatttggtgtattttgaataaattccaagcccatcgaaggtgtgaggtgccagttatcgttagttttttattctcttgagtttaaagtttagactccagaggccgtacaacaagtgattcacgtaacgaaatggaaagcgaggagaaatatgtgtgtatacaaatctaccaaataaattcaaaggcaatggaattttcgactgaaagcataagataagcttaattagccgggcagacaaaaatttcactttcctttggtacagaaccgtcgttttctaaactatttctgaatgtccaacgatcactgcgccatttagacatttcgactaattggcagccagtcggctttcggggggagggcactcacgtgccgcccatcgatctgcagcaaaactatacgtaaataaactttaggatcgaagaaatccaacaagaacgtcaacaaaaacgaaaaccaaatgggtttattttcagcctcaagtgcaagtcctataagaagatcgaacaaaacaaaacacttgatgaatgcaaccgaaggaggtgcaaaaatcgaacaataacaaatacaataggaagggcgcgtagagtgagcacaaatcgtttcgtttattttatttattttattcccctctatgcggacacacacaaatgaaaacaaattagcttaggcagcattaacagccagctgccaagggcggaagtacgggggagtttactgttaattttataaacaccacgaaagaccacaacgaaaaaaaaaaaaacaccacaaaaatgcagcagtagcaacagccaacaaccaccaaaccggcaaaatcccaatagggcagctgcatttcgggaggaaacccaagtggaatgtgcattcgaattgggagctatagcttctcgatccccggataatgagccgtgaacatctgtcgcagttttacgtggaaaactgtctttccgctgaatcgaccgaatcggaaaaaaagggagaaactgagactaaggagagagcgaatgctgggaaaaccagcaccaacatcggaagcatcttcatcataacttgcaaatgtgtttgtgttatttttacatttccgctgcttacgaaaatatttacgctccccttcgcacaaaaccttccccatttcgaatttcaaatttcgaattccagacgctcgcacacacgcacgtgttagagatgagccagatttccgagtgcatcgcatggtgacaacaggttcgattcaaatgaatatggaaatgattctgctgagctcacaaaaaatttaagcatttgcttttcaaattagatcatatggctatgctattcgaaacagatgtgaaaaagtaacaagttttagctctacaatgtttactttaaatttagcatttacgaagtataaatagacacattatttacgcattatgttttattatatttaagacaaaatacaatcaacgtaagttaaaatataagattgcaaacctatttaccctcaattctaaatgtttaaatatacaatagtacatgacaattttgcatttcccgttacgaaattatatttgtgtttttatctcggtagaaccttgaaaaccatgttgtgtcaagatgcagcgaaagcagcgggtggcaacttttggcaggcagtgtgcgaaagctaaggtcaggcccatctctaggttgcttccgcacacagacacgcacgcacacagcgatggggaaatgccaacgatagcacaggtctaatccatttaattctggcttttaaccgatttctgctaatactatttatttacccgtttggttttggcgactgctctctctctctccctccgttcttattgccgtgtggccataatccaattatgcttgtgtttgtgtgtatgtgtctgctctctattgcaattgcagttattcgcatccgccgtgatatgcaaccaacacattcgcactcgcgcactcacacgcacccgcagacatcacaaatgcgaggaccgaaaatcctgagcgtcaacaaaataaatatagctctggtgttttaaaataggttttcactcgattctgcgtttgctgtctcgtcttgtttatgtgcattcgtcgttggttgtgtgtacttgtttttttttttttttgttagacgcgactgtccattcaacattaccactcagccgacgcagagcgagattataattcggtaaccgattcactggcactgctctaacgggctatagcctatgatccagtctggaatggagctaaagatatgttgctttcatttatgtctgcactcgcgaaaaagcgtccacaaattaacagttcttcgggagcgacgcgcagctagacgtccgactttgttttccgactcgattagagtgaccgttgtgggatggtggaaaaaagtggagggcccatgctgaaaccgataacaaaaataccagatgtgcgatatacactatcgataacgagcacaatttcttaattctaatttaaaacaattatataacgggctttcgtgttttatttaacaaatagtgaataaaatgcggctacttctttttgatgtacttcatgtacttcttggcgttgaagttgtcctccacctcctccatgatcttgaccttcttgcgcggcttgcgggcctccaatctcgctctgcgctccgcatcggttaaggtgctcagatccaagggaagctagtagatggtactcgttaattatggtttcgttaagttatagtaactaacgttaccttgataatcttcctgggctcgtgatagcggatgtttatcgtggatccatcgggttgcaccacaactgtgggatatagccggcagtaaaccgagcgatgcagcctggtaaccgccgtcgtggccgatgagatgcagcgtatctgctgaacagcctggggcaactgtttcagcaacattttaattgataatcacaatatttacactaaataagagctacacttaaatcgtgtttttgctgccaggcagctgatagtgtgaccgacccgagggtaagatttaaagactcctaaattagttattaagaatctgtggtagccctggttcagtttccacattatgtggtattttccccagctctggtcacattcgtactcaaagtgtaagtgttggttgcagaggcagaaattcttatttttctccttgaaaatataagtacgttacgttaaacactgcaaaaataataaaaaaaaagcgcacggttgggctacaacagcgattagtctgcaagcctcgaggaaaggactgcaaacgcgtttttagtttgaaggaacattgaggattgaaaaaaattacataatttttgcgagcataactcgccgtgcattatgtcgataagtctgcaactaaa

SEQ ID NO: 41108 - DNA, 5665 bp, DROSOPHILA
ggtcactctaatcgagtcggaaaacaaagtcggacgtctagctgcgcgtcgctcccgaagaactgttaatttgtggacgctttttcgcgagtgcagacataaatgaaagcaacatatctttagctccattccagactggatcataggctatagcccgttagagcagtgccagtgaatcggttaccgaattataatctcgctctgcgtcggctgagtggtaatgttgaatggacagtcgcgtctaacaaaaaaaaaaaaaaacaagtacacacaaccaacgacgaatgcacataaacaagacgagacagcaaacgcagaatcgagtgaaaacctattttaaaacaccagagctatatttattttgttgacgctcaggattttcggtcctcgcatttgtgatgtctgcgggtgcgtgtgagtgcgcgagtgcgaatgtgttggttgcatatcacggcggatgcgaataactgcaattgcaatagagagcagacacatacacacaaacacaagcataattggattatggccacacggcaataagaacggagggagagagagagagcagtcgccaaaaccaaacggacttccaactgcgagcgcttccagtgcagcttccaacacaattgcaacgtgccaagaatcgaagaacaatcaaatgcattccaaatatccaacaactaaatacacaagtttctctattacgaagcaagcaaaaagtgattgatagttagttctccacaattttttttcctgtttcaaaatttttaaaattgtcaaattcagacctatgggtcccataaatgtttcgtgctgcgttccataagcaaacactaaaatatatcatccgttgaacaaatcgtgcccgtctaactgtcgcgtcaatccgctaactattgtcttgcgatgaacgacaccatggtgtagccaagagaacatcagcattagccaaaccacacagttcccaactcgatccccagagatccatcacccccacaacaagcaggcaaggcgaggtcgtccaacgccaaaaaaaaacaaacttaaaccaacttcacatacacatccggttacgacagcaacatacgtcgtagctgataaacatgagcctgaatcagcacagtggacccggcccgccgtcggagatctgcggattatcggtggaccaggtggactcatcggccgcctcccctttcatctggccgagcacagcgggtatgtgcaccaccgccaccaccgtcacaacatcgaccaatggagacgccaccgcggaagcaccagtgaaacatcagccgctccacaacggcggctggatcggaaatggtcttccgccggcgcccgtgacgcggaccatatcatcggatcgcctggtcaccggcagctcgtgtcgggcgctgcgcactgccgtctcagcattatactccgtggatgacttcgtcaaggagaaaattggatcgggattcttctcggaggtttacaaggtcacacatcgtacaaccggccaggtgatggtgctcaagatgaatcagttgcgggccaatcgaccgaatatgctgcgggaggtgcagctgttgaataaactttcgcatgcgaatatattgagcttcatgggcgtttgcgtgcaggagggccaactgcacgccctgaccgagtacatcaacggcggctccctggagcagctgctggccaacaaggaggtggtgctcagcgccacgcagaagataagactggcgctgggtatagcgcgcggcatgtcctacgttcacgacgcgggcatctttcacagggatctgacgagcaagaatgtacttattcgcaatctggccaacgatcagtacgaagctgtagtgggtgactttggtctagccgcaaagataccagtcaaatccagaaaatcacgccttgagacagtcggctcaccgtattgggtcagtccggagtgcctgaagggccagtggtacgatcagacaagcgatgtcttctcctttggcatcattcaatgcgagatcatagcccgcatcgaagcggacccggatatgatgccgcgcacggcgtcgtttggactggactacctggcatttgtagaattgtgtccgatggacactcctcctgtgtttttacgtctggccttctactgctgtctgtacgatgccaagagccgacccacgttccacgatgccaccaaaaagttgactttgctgctggagaaatacgagcacgagtcgtcggccggagcaagtccactcagttccctggagttgatcaactgctcaccaggaggcagcgattcggagaacgtaacgttgacaccccgagcatcagtacccacggtggccactatttgtactgctcctgctggcactttaacaccgcgccatctacaggaagtggacgaggacggcttccgatttccaagtaaaaagtctgcttcggctgcgcttccgggcacgccaaatggatctgctggaagcagtggctttgatgatcatatactgaagtctagagtgcgacgggctactcagaagttggaggccgagatcttgttgcaccggcgttcgctaagcgagaacatcatccacttccccatgcacacgtcgccaagtgacaaggcgcggtgtcatcagatgcagcgacagcgctcctcaacacactcaccaacgcccccaaggcagctttcctcggttcagttgcccgccacgtctattccagatcccccaccgcttcccaagcccgttccagcggtactcacactgcgcaaagtgggcgatccacagtacaagccgacatctgaaaaggatcacaacggctctaaacccaatccgtttgaagcgctggcgcaactgcgtggtgtcaagaaaatcctggacgccaatccgaaaacctatgcagcaggggtgggagatctattcagctcatgcttcgagatgctagcgccgttcttcaaagaactggccgcaatgcagagcaaagcgggggctcagggcggaggaacgagtacggaggaaacatcaacgggtaacaaggcttcggcagcaacgcccagtgaaccaaagagcctgccagtgtcgccgcatatgacgcgcaaatacagcgccatcgagcttcgacttcctcagcgaatcagcaatgctgctcctccagcagttaccagtgctccaccaccatcaatagcattgccaaccgatgaggatgactgcgatgattgcaattcggaaggtgaggatcccgatggcggtggcaactgtgcagatgcggaatcaagcagcgatgacagcgccgtgcgtccgtccactgtgccaaccgctcgaaaataccgcgcgaattccttgtatgcgcatccgctttttcgcggctccaatggcaccagcatgaaaagtaccagtactggtgaattcgagagtccaactctactgaaggccagcgcatctacaatcacgttgactgcgtcagtgggtgcgaccaattcgtgtgaggatctgactgaaagcgccagaaaatcaaaagagcaagcgagtagcggtgcaacagcggcggtgcaggctttgcccactcccatgtctggctgctccaccaggttggtggaaaccccggtgtccgtttcatcctgcactgatcttgagctcgacgaactgaaaaacacctgcgatctgaacgaattgaagaactcgtgtgagcagcttcccttgaagacaaacctaacgaggcgggactctatagaaagtggcttcttctcgtgctttaacgaagagtccgatgcggcgataaccaacaacagtttcggacggcagctgaacgggattggatcgttggggtttggttgcggcggcgggggcaacagtagcaactgctgctatgagaaattgaagacgcagcttatgctcgatgcatgcgtcagcgcagatagtgaaatcaacgataaactggcgagtttgtgtcgctgctgctactacgccacctcgacatcgaatgccgccgtaactgcagccgctgctgcggcccagcaacaacagcagagccacttgctcaacgatacgtcctcgacctcatcgtcggtgctgctgatcgacaatgatcccgctgtgatcggtggaaatacctcatcatccacagcgttggactcgatggatgacttggacgcggacattgtggcatcgcggcgcacacaccagcgacgatacacttgccaccatgcgttgctcagcgggaatggcagcgaatcccaaatggcggctacggcgagcctgatcaatcgtctggctttagactcggagatacatactctgcttcagcgtagtccttttgcaacgaatcaactattgtactgtaagaaccgcacctcgtccatatacacggatagctccgatgatataagtagcttggccggctctgactccctgctctgggacgaccgctccttcacggcactgcccagtacaagatccgcacagattgccaagatagtggagtattttgagcgaaagcgacaggactcctcgccgccttcggtgcaccatcgcaatgggaacgggacggtagcagctgctgtggctgcctctgccctgggttccaactacctttcgtacgagtcgcgtcgctattcggacttcaagcggcacctgaacgcggatggcctgtgcttcgatctggacaagaagccggcgcagcaaaggatgatggtgtgcgagggtgcggtcaagtcgaagcttcccatattcgataaaaagaagcaacagcaaggcggctagctgtggtggggaccttgtgatgaaaaccccgacctgattcatatttaataacttatttcttcgattctttgagatttttatccccatacacgattcctttatacctggcagtaccacttgataaaaatacaaaaaataatcgcaaataattttgcccacaaaagttggttagtttacgatgcctaaaggtttaatttgtaagtaaatagttatttccttattgtcaagtgtatagagcgcaattgtaagtaagccaaaatgttctactaaaaattatgcacgctcttacaataagaaacccaatttcgtttgtataagttgaaaaattatatataattaccatttataagcatatagataaacataatcatacgtcgtactggttcctagtccttcaaatttacttcgctacatacattatgctaaatagcgagtattcaaaaaccaatcatggaaagtatttattcttaataattatatctgtcgctggtaaactcctatgaaatggcatagctgttctttatgaatacatttacatataattttaagtttatcgcgctatttatttgattttgtctaaactctgtataaaaatattatgtttaaaatacaatacaacaaatatacacacatttatacataaaatggcatattgcaatgtatacattttacctgtaacgattaattaccgcgtaaggtccaatttaaataattacatagacttaccgacttgaggttttaagacttaaagccccctttccctcgaaaattgtacagatgatcccggatcgatttgagaagcaagaacacttatcattggccaatcccgttcggcttaaacacgacttatgactttagttttagattcatacgttacaaatatgtgggtatctgcattacaaataaatacataagtatacatt

SEQ ID NO: 41109 - protein, 1213 aa, DROSOPHILA
MSLNQHSGPGPPSEICGLSVDQVDSSAASPFIWPSTAGMCTTATTVTTSTNGDATAEAPVKHQPLHNGGWIGNGLPPAPVTRTISSDRLVTGSSCRALRTAVSALYSVDDFVKEKIGSGFFSEVYKVTHRTTGQVMVLKMNQLRANRPNMLREVQLLNKLSHANILSFMGVCVQEGQLHALTEYINGGSLEQLLANKEVVLSATQKIRLALGIARGMSYVHDAGIFHRDLTSKNVLIRNLANDQYEAVVGDFGLAAKIPVKSRKSRLETVGSPYWVSPECLKGQWYDQTSDVFSFGIIQCEIIARIEADPDMMPRTASFGLDYLAFVELCPMDTPPVFLRLAFYCCLYDAKSRPTFHDATKKLTLLLEKYEHESSAGASPLSSLELINCSPGGSDSENVTLTPRASVPTVATICTAPAGTLTPRHLQEVDEDGFRFPSKKSASAALPGTPNGSAGSSGFDDHILKSRVRRATQKLEAEILLHRRSLSENIIHFPMHTSPSDKARCHQMQRQRSSTHSPTPPRQLSSVQLPATSIPDPPPLPKPVPAVLTLRKVGDPQYKPTSEKDHNGSKPNPFEALAQLRGVKKILDANPKTYAAGVGDLFSSCFEMLAPFFKELAAMQSKAGAQGGGTSTEETSTGNKASAATPSEPKSLPVSPHMTRKYSAIELRLPQRISNAAPPAVTSAPPPSIALPTDEDDCDDCNSEGEDPDGGGNCADAESSSDDSAVRPSTVPTARKYRANSLYAHPLFRGSNGTSMKSTSTGEFESPTLLKASASTITLTASVGATNSCEDLTESARKSKEQASSGATAAVQALPTPMSGCSTRLVETPVSVSSCTDLELDELKNTCDLNELKNSCEQLPLKTNLTRRDSIESGFFSCFNEESDAAITNNSFGRQLNGIGSLGFGCGGGGNSSNCCYEKLKTQLMLDACVSADSEINDKLASLCRCCYYATSTSNAAVTAAAAAAQQQQQSHLLNDTSSTSSSVLLIDNDPAVIGGNTSSSTALDSMDDLDADIVASRRTHQRRYTCHHALLSGNGSESQMAATASLINRLALDSEIHTLLQRSPFATNQLLYCKNRTSSIYTDSSDDISSLAGSDSLLWDDRSFTALPSTRSAQIAKIVEYFERKRQDSSPPSVHHRNGNGTVAAAVAASALGSNYLSYESRRYSDFKRHLNADGLCFDLDKKPAQQRMMVCEGAVKSKLPIFDKKKQQQGG

SEQ ID NO: 41110 - DNA, 3284 bp, DROSOPHILA
tttgtctaactacgcccatgcaatcggcagctgttattgattagaggagcgataaaagtccagccacctcaaatattgacactaggacaagctcgagggccattaagttatctaacatcaatcaattgctcaaaatcatctggtaggcctgttactatagcgggcaaagacgtctctaaaacctcaaagagttccttaagcatggccaagttggacgaaaagatcggcttcatcgggggcggaaacatggcctacgccataggatccggactggtgcgctgtgggatcgtgaaggctagccaggtgcaggtctccggtccccacattgagaacctgcaacggtggcgggatctgggagctgtgacctgcgacgacaactgcatggtcctggagcactcggacatagttttcatctgcgtaaagccacacatgctaacgccgtgtgccgcccagcttaaatacaagcacgtgccgtcggccaaggatgccagcaagctggtggtgtcggttctggcgggtaccagtctcgaaacgctggaggaggccttcagcttcatgggcagttcggagctgaaggtgatacgcaccatgcccaatacatccatgcaggtgggcgagggctgcactgtttacactggcaacgcacgcgtttcgcatcacgacttggaaaagattcacctaatgctcaacgccctgggactggcgcaacaggtgcccgagtccatgatcgacgccgttaccggggtagctggatgcggtccggcatttgtttacaccatcatagaggcactggccgatggcggcgtcaaacagggcgttccgcgtcagatggctcttcagtttgcggctcagacgcttctgggagcggccaaaacggtgctgctcactggaaaacatccggcggtgctgcgggatgaagtctgttctcccggtggcgccaccatagtaggcgttcatgaactggaaaaggggaacctcaggtgggtagccataaagttgtacattacactgtttttttattgctttctttcgtgctttcaggtctactttaataaacgccgtggaaaagtcgtcacagcgctctgctgaactgggaaagaagtgaaaatgtaatcccccggaacatccccttgctctctacacatacatatagttaaacgcttgatattgttattacaataatgactaacataaagctcaagtttattcccgatccttcttgctgacgtactccacgcacttggagggatcggtgggaaagtactcttggcacttggtcatcagtcgtttgagaccctggatgtacttccgttgtgtttcatcgttcattacgtgggctacgtttttggagaaaatcttttcgcgacccgtacgagcgtggatacccaccatagtgacaccaatgggccaaggcgcgtttccgatggccatttctaggtaggcatcgcttgctgtgatatagttgcggttgagcaggtgcttgcagatgtctcgcagactgtccagaatgtcctctggcagggtgtgatgctttaacttgcgaaacagcggcttaacgtattccttagtctgcgtgtaaatgacgcgggtcattttcacctttgtggacatcttttcgtgcttgctgtagttggcgatctggtcgttccacagcttgagcaggaaggtgagcagcgtgatgatcacatccatgtcgtagtccttgttgcggcccatatttgcagccattgtctgtatgctctcccacgacacggactcgtcgagctcagcgaagtccgacttcttgtcttccttggtggtgggtgtgttggcgaacatctcctgcaggtaggcggcgtccacctgctccatggcctcctggaaatcgttgcggaaaccgcgatttgcctctggctgcgaaatctcgcattgtcgcaatcggtcaaaggcctcgggctccgtctcgccaaatataaggatgggttcgccgcgttcccttagcctccgaatgacctccgtgcgcggcaatatgttctggccatcggccacaaaactgtacgcgccttcggtcgtttgtccttgtgcctcgacggactcctgctttatgtagcccaccttctgcagcacttcctctgtgttcttggcgttcaggtcaccgcgtctgaagtacttcttcttttcgtccaccagctgcctttgctccagcagcttgcgctttcgcgctatttcagctttcagaatatccatgtgattgttatttgtagttaataacaatgtggagtaaccaaaacaaatgccttagattatagtgagaccagactgagaatgtttacatacaagtgcggccactaaaataggtattctattgaatttactaagttttagttatgaaataacttataattagttctataactttaatcaataattagataaatatgtacttcctaatttatttaatttaaatgcatttattagacatttaaattgtatttgagctatatatttttctagtattttttctttggttactctttggtatttccgcagcctggtcacactggctcaaaatcaataaaaaatagacaacattttaggatcggaattcattcataaaggacacaatgccaaagaaaatgggaatcaactcgaaggcggtggaggcccgcgagcgcaaggaggccaccaagaaggccacgcaggagaagaagagcaaggaggcggaggatcgcctgtggcgcgatgacgacaagaatctggccaagaaacaacagcgcaaggacgaggaggagcgcaagcgggcggaggcggccaaacggaaggctgaggccaaagcgctgcttgaccaggaaatgtcatccattaacacgcagcgaaagcagccgctggccaagatcaaccgccagatgattctcgaggagatggagaagaagcagcgcgtaatcgaggcgataaacgaggccaacaagccgatggccgcgcgagtggtggtccaaaaccatatcgaggagaatctgaaccgatccatggccgacacggatgtggcatccaacattgacgaggccatcgtggtgctcaggtgcgttcccttactgaaactttcttatcaatttaaattatcttccattgcatgcaattttagtgtaaatgacagcgaagaggacaagcatcccgagaagcgaatgcgcgccgcctacaagacctttgaagccaacaatctgccccgcattaaggctgagaatccttcccttcgcatgtcccagtggaagcagcttctgatgaaggaatggaacaagtcaccagac

SEQ ID NO: 41111 - DNA, 1284 bp, DROSOPHILA
aatctaaggcatttgttttggttactccacattgttattaactacaaataacaatcacatggatattctgaaagctgaaatagcgcgaaagcgcaagctgctggagcaaaggcagctggtggacgaaaagaagaagtacttcagacgcggtgacctgaacgccaagaacacagaggaagtgctgcagaaggtgggctacataaagcaggagtccgtcgaggcacaaggacaaacgaccgaaggcgcgtacagttttgtggccgatggccagaacatattgccgcgcacggaggtcattcggaggctaagggaacgcggcgaacccatccttatatttggcgagacggagcccgaggcctttgaccgattgcgacaatgcgagatttcgcagccagaggcaaatcgcggtttccgcaacgatttccaggaggccatggagcaggtggacgccgcctacctgcaggagatgttcgccaacacacccaccaccaaggaagacaagaagtcggacttcgctgagctcgacgagtccgtgtcgtgggagagcatacagacaatggctgcaaatatgggccgcaacaaggactacgacatggatgtgatcatcacgctgctcaccttcctgctcaagctgtggaacgaccagatcgccaactacagcaagcacgaaaagatgtccacaaaggtgaaaatgacccgcgtcatttacacgcagactaaggaatacgttaagccgctgtttcgcaagttaaagcatcacaccctgccagaggacattctggacagtctgcgagacatctgcaagcacctgctcaaccgcaactatatcacagcaagcgatgcctacctagaaatggccatcggaaacgcgccttggcccattggtgtcactatggtgggtatccacgctcgtacgggtcgcgaaaagattttctccaaaaacgtagcccacgtaatgaacgatgaaacacaacggaagtacatccagggtctcaaacgactgatgaccaagtgccaagagtactttcccaccgatccctccaagtgcgtggagtacgtcagcaagaaggatcgggaataaacttgagctttatgttagtcattattgtaataacaatatcaagcgtttaactatatgtatgtgtagagagcaaggggatgttccgggggattacattttcacttctttcccagttcagcagagcgctgtgacgacttttccacggcgtttattaaagtagacctgaaagcacgaaagaaagcaataaaaaaacagtgtaatgt

SEQ ID NO: 41112 - protein, 340 aa, DROSOPHILA
MDILKAEIARKRKLLEQRQLVDEKKKYFRRGDLNAKNTEEVLQKVGYIKQESVEAQGQTTEGAYSFVADGQNILPRTEVIRRLRERGEPILIFGETEPEAFDRLRQCEISQPEANRGFRNDFQEAMEQVDAAYLQEMFANTPTTKEDKKSDFAELDESVSWESIQTMAANMGRNKDYDMDVIITLLTFLLKLWNDQIANYSKHEKMSTKVKMTRVIYTQTKEYVKPLFRKLKHHTLPEDILDSLRDICKHLLNRNYITASDAYLEMAIGNAPWPIGVTMVGIHARTGREKIFSKNVAHVMNDETQRKYIQGLKRLMTKCQEYFPTDPSKCVEYVSKKDRE

SEQ ID NO: 41113 - DNA, 4600 bp, DROSOPHILA
agctgttctccggaggcgctgacggtaaaatacgagtgggtatctaccggtttcccacattgctctcttagctaatatatattccccttcagatctggtcaccggaactgcaactattggccactgtaaacgctcacgaggcgtacatatactgcatggccattaatcagcacggaaaggtctactcgagcagctgtgatggccaggttcacttcatgctgcctccctatggagacgagtcagtgcaggaactattccgctgcgacgacgccatccaggccatgtactgcgacggatccgtgctttacacgggcgatgacaagggtgtggtgaccacttggaccaacgatcgcatgctcttcaagtacagcctggtggaggaggtcaagtcactggccggcgagcagaatctcatttacactgttcgcgacctggacgtggtggtgtctcaggtggcggagggcaagtctggaaagtacagcaacaaggcggtgattccaggtaagtctccgctccatcttctcgggcccatggtggatggcaagcggagctatctggcctttcccgatcgctctgggatgggtttgcaactggtcaacaatctttcgcagcaacagtactccaaaatttggcacttgccggtgagtttcctgcatatgtcgatccaagctgtaatatacgacttttgatctaattttaggactgccatgagttgatcataaacgccctttgcggagatgagacctatttgtactccggcggctatgacaaaaaggttaagggatggaccgatctggaagcaggaaagccaaaagccctgggcgaggtggaggtgggcagttgtgtgaacagcatttgctgtggagccaacgacacggtatacatagcaagcagcgacggattcattcgcagtgcgaagttcgtataattttattggccatcttgtcgtctcagagaatagaaaacccttgtaacaattaaacagaatttattaaaagctttacaaactggccttatactgttgcgagtgctctaggctgtcgaattccacctgcgcctctatccatcgtgccactgtgagcagtaactgctcgttgaggctgttgctcatcagctgaaggctcaagggcaatccggcctgggacaggcgaatcggtatagacacggcgggaattccagccatgttggctggctgagtgcaaaagtcctgcacggcacactgatccctgttggtcagggaggcgaagtccttgtacagcggagcctctgtaagagttgtcggcgtgagaaggatgtccacgcgctcctctttggccgaggaatcaaacacccttgcaaagtcctctgcaataaggcggcgcacccgcaaagccttctcaaagtagtgatcatagttctttttcagcagcagaaagtttccagtgagtatgcgtgtcttaaccacatcgttgaatccctcggccctggatagggcatacaattgctccgtgctgcgctcgtctgttgcccgatggccgtactcgattccatcgtaccttgccatgttgctggccacctcgcactgattaagaatggtgtacacgaatatacttgctgccgtattgggcagggaaacctgtctgacggaggcaccgctacactccagcaaatcggccaccttagaccacgtttccagaacttcggcggaaagaccgtggcaatggtattcctttggtattcctatgcgcacagtgctcaggtcaatttgcccaacttccggcagatgtaacctggtaaaaggctgcctgatggttgtggagtccagtttatccggccctgccactgtattcagtaccgccacgcaatcgctgacggagcgggcaaaaatgccgggcacgtccatggaattgaccagcggaataagaccgtggcgggagacgaggccgtaggtgggctttagacccaccacgccgcagtacgaagccgggtttcgggtggagccacccgtgtccgaaccaattgctctggaatatagaagagaaaattaagaatatattttaatatttatttcgagcaaagtttctaggaattcaaattaaaacggttctaggtaaaataccgaaaaaataccgcatcgagtggctaccctctcggccagctgacaaattgcagcaaacgttcacactgcgcagctgtcagaagtccagcgatcaagggaaaactcgattatttacgaaatttgcgactgaaatttcttccccaacgcgatgtctgcgctgttccgtctgaccaaccgcgccgtggcgctgcagcgttccctggtcgccaaccaggcggcagtggtgcgggcaatcaacacgtcgccgaagaaggatgagaccatcacggcccccacttcacttacgaccgaggactttgccaatccgagtcccaagaactggcagagctacggattcgactacaaggaccaggtggaggatcgcaaggccaccaagtcgacgttcttcgttacggtgacactgtgcctggtgtggggcagcttctactgggcctacctgcccgacactcagttccgcaactgggcccagcgtgagggcttcttggagctgcgtcgccgcgaactggccggcgtggatttggtcagccccaactacgtggaccccgccagcattacactgccctcggacgaggatctgggcgacaccgagatcatcatctaaacatttagtgaccctaaacttagtctgttatgtaatgcgaatgcgaagtgcggtcagtgcgagtccgctcataatccgttaataaatctgcaagtctcgccgtggacacagctgctttttagccctcggatgattaattttgatcaaatatgttacattttcaaccatcgcgtttgaggttaggtgttcaaaacataaacaagctagtacgtacgcataacaaagacccgcggctacggcggatgcagagcctccagaactgccgcccgcgatgcgccagtgatccttgttaaggtcctcgctccagatgttcttagtcggcccgtacagggagtccacagtgccggcgcccatggcaaactgatccatattcgtcttgcccagaattacagcgccggcttgtttaagtctggagcacacagtggcatcatagggaggcacaaagtcttgcagcatcctggcaacgaaggctacaaggataatattgctctgatgctgggttctcatggtctcctaccgtgaggcacaggtggtgtgtacatctttggtgcaaaagttgtccttgatggcaatggtgactccatcaagatcactaatcggttgccttagcttatagcgctgctccgcgtcctgggcctgctgccccgcctgttccggcgtgaggcgcacaaaggcattcagtgtcttccaccgcagggcatcttgcagagcatcttcggtcacccggcgaggagacagctgaccatctgagtaactcgctgttagctgttaggtatactgggttaaaagtggtttagatgaatgatgaataagcccacctgcttaatgctccactgtaagtgacgccgcattcttttcagtttgaaagcagctggattttaacttattcacccaattttcggagagcaatccgcggaagaaatcataacaaataaattcaagttgcaggaatggcaaacttatctggtattttagtttttttggcacagaatatctggtcacaccaaagctcagaggagtaacttaagggatttagcttatttagacgctaggcccctcaaaatagttttgtctaactacgcccatgcaatcggcagctgttattgattagaggagcgataaaagtccagccacctcaaatattgacactaggacaagctcgagggccattaagttatctaacatcaatcaattgctcaaaatcatctggtaggcctgttactatagcgggcaaagacgtctctaaaacctcaaagagttccttaagcatggccaagttggacgaaaagatcggcttcatcgggggcggaaacatggcctacgccataggatccggactggtgcgctgtgggatcgtgaaggctagccaggtgcaggtctccggtccccacattgagaacctgcaacggtggcgggatctgggagctgtgacctgcgacgacaactgcatggtcctggagcactcggacatagttttcatctgcgtaaagccacacatgctaacgccgtgtgccgcccagcttaaatacaagcacgtgccgtcggccaaggatgccagcaagctggtggtgtcggttctggcgggtaccagtctcgaaacgctggaggaggccttcagcttcatgggcagttcggagctgaaggtgatacgcaccatgcccaatacatccatgcaggtgggcgagggctgcactgtttacactggcaacgcacgcgtttcgcatcacgacttggaaaagattcacctaatgctcaacgccctgggactggcgcaacaggtgcccgagtccatgatcgacgccgttaccggggtagctggatgcggtccggcatttgtttacaccatcatagaggcactggccgatggcggcgtcaaacagggcgttccgcgtcagatggct

SEQ ID NO: 41114 - DNA, 1577 bp, DROSOPHILA
cgaaaattgggtgaataagttaaaatccagctgctttcaaactgaaaagaatgcggcgtcacttacagtggagcattaagcagctaacagcgagttactcagatggtcagctgtctcctcgccgggtgaccgaagatgctctgcaagatgccctgcggtggaagacactgaatgcctttgtgcgcctcacgccggaacaggcggggcagcaggcccaggacgcggagcagcgctataagctaaggcaaccgattagtgatcttgatggagtcaccattgccatcaaggacaacttttgcaccaaagatgtacacaccacctgtgcctcacggatgctgcaagactttgtgcctccctatgatgccactgtgtgctccagacttaaacaagccggcgctgtaattctgggcaagacgaatatggatcagtttgccatgggcgccggcactgtggactccctgtacgggccgactaagaacatctggagcgaggaccttaacaaggatcactggcgcatcgcgggcggcagttctggaggctctgcatccgccgtagccgcgggtctttgttatgcagcaattggttcggacacgggtggctccacccgaaacccggcttcgtactgcggcgtggtgggtctaaagcccacctacggcctcgtctcccgccacggtcttattccgctggtcaattccatggacgtgcccggcatttttgcccgctccgtcagcgattgcgtggcggtactgaatacagtggcagggccggataaactggactccacaaccatcaggcagccttttaccaggttacatctgccggaagttgggcaaattgacctgagcactgtgcgcataggaataccaaaggaataccattgccacggtctttccgccgaagttctggaaacgtggtctaaggtggccgatttgctggagtgtagcggtgcctccgtcagacaggtttccctgcccaatacggcagcaagtatattcgtgtacaccattcttaatcagtgcgaggtggccagcaacatggcaaggtacgatggaatcgagtacggccatcgggcaacagacgagcgcagcacggagcaattgtatgccctatccagggccgagggattcaacgatgtggttaagacacgcatactcactggaaactttctgctgctgaaaaagaactatgatcactactttgagaaggctttgcgggtgcgccgccttattgcagaggactttgcaagggtgtttgattcctcggccaaagaggagcgcgtggacatccttctcacgccgacaactcttacagaggctccgctgtacaaggacttcgcctccctgaccaacagggatcagtgtgccgtgcaggacttttgcactcagccagccaacatggctggaattcccgccgtgtctataccgattcgcctgtcccaggccggattgcccttgagccttcagctgatgagcaacagcctcaacgagcagttactgctcacagtggcacgatggatagaggcgcaggtggaattcgacagcctagagcactcgcaacagtataaggccagtttgtaa

SEQ ID NO: 41115 - protein, 508 aa, DROSOPHILA
MRRHLQWSIKQLTASYSDGQLSPRRVTEDALQDALRWKTLNAFVRLTPEQAGQQAQDAEQRYKLRQPISDLDGVTIAIKDNFCTKDVHTTCASRMLQDFVPPYDATVCSRLKQAGAVILGKTNMDQFAMGAGTVDSLYGPTKNIWSEDLNKDHWRIAGGSSGGSASAVAAGLCYAAIGSDTGGSTRNPASYCGVVGLKPTYGLVSRHGLIPLVNSMDVPGIFARSVSDCVAVLNTVAGPDKLDSTTIRQPFTRLHLPEVGQIDLSTVRIGIPKEYHCHGLSAEVLETWSKVADLLECSGASVRQVSLPNTAASIFVYTILNQCEVASNMARYDGIEYGHRATDERSTEQLYALSRAEGFNDVVKTRILTGNFLLLKKNYDHYFEKALRVRRLIAEDFARVFDSSAKEERVDILLTPTTLTEAPLYKDFASLTNRDQCAVQDFCTQPANMAGIPAVSIPIRLSQAGLPLSLQLMSNSLNEQLLLTVARWIEAQVEFDSLEHSQQYKASL

SEQ ID NO: 41116 - DNA, 3320 bp, DROSOPHILA
attaatattaaatgaatttcacaaattaaagtaagttaacccattataaataatattcaaaaatagaaacaaaaaaaccaaaattgaaaacaaacgtcacatgaacacttggtgtaggaaaactctctagtcatatatttatcacttagcaagcggaatagattgaattaaaaataaattattattgattatattgatggtatgaaggttccgccaaacttcagacaagaccccctcgactgctttttccgttcctatctaagtccaggtgaccggtaatcaagaaattcctgcacccagaaaataaaaatcgaaaacaaaatcacactaaaatgtaaacagttcatataataaataagtaataataaccttatatacataaaatatgtatataatttattaaatatcaaatttttaaaataatgatattaggttagcgaattgtaactatactttcatctatcttctctagggaatatgtatcgataaaaatgtgatatataattattatttatttttcatttgaattcttcataaaaattatgtaatgtatgttaaaagtgcttacgattctgtaaagtatattttatatattattcataggaataactcgcagagtctagctctcgaaaactataagatctggcaaattaaaataaggtcttctttttagtttatttatttgttttacaaaagtatcttcaattgcaatttaaaagtattttcatttttgcaagatgaagatgttccatgcactaccactaactaagtaaggggtatatgagagtcgattgcaatttcttgttaaatctattaaatctaaaatttttaaactaaacctcaattagaggtaaataagaggtactactaccaattttttaagtgttttaaagtgtagggtatccccataaatcagaggtttaccagggtttcgaccagcagataagaacgggctatataaagaaggccccacgtctagttagccagcaaactctattgcccacaatgaatccaatcttctgcgcactactgttcagcttggtggcgggtctagtcctcgccgagaagtcggactattgtctgagcgagatcgtcaagtcggacgagaggatccgttcgcacggatatcccacggagactcacgaggtgaccacccaggatggctatgtgctgaccctgttccgcatcccgtactcccacaagctgaagaaccagaacgagaagcgaccgccaatcctgctgcagcacggattgttcagtaactcggactgctggctgtcctccggaccggacaactccctggcctacctgctcgcggatgccggatacgatgtgtggctgggcaatgcccgtggtaacatctactcgcggaacaacatcatcatctcgctgaacagccacaagttctggcacttcgactggcacgaaatcggcaccatcgacatccccgccatgatcgactacatcctggcggataccggcttcgatcagatacactacgccggacactcgcaaggaaccaccgtgtacctggtgatgctttccgagcgaccggagtacaatgccctcattaagtccggtcatttgctggctccatgtgccttcttcgagcacggaacctccttcatcttcaatgccctgggtcccctggtgggtacacccggcggcatctggaaccaactgctggtggacaccgaactgattccgaacaacaacctggttaaccgattggtcgacaacagttgccatctatccaacacgatttgcaacaacgccttcataatgtttgccaatggtggatacgttaatgccaatgcggtgagtaggatcgatatgtaattctcactttatttagaacttccattctaaatgtcatatcgtaaaagttactattgaaagaagtcataattggacatttaatatgtactttcagagctccatgagcgtcctgatcgagacccatccggctggatcctctagcaaccagggcatccactacctgcagctatggaagtccctcaagttccgccagtacgactggggcacaaagaagaacaacgagctgtatggccaggatctgcctccagattacgatctcagcaagatcgtcgcacccacccacttgtactccagcaccaacgatgccctttgcggacccgaagacgtcaataccctggtggagaacttcccgcacctgacggaggactaccgtgtgcccgtccagagtttcaaccacttggacttcatcatcgccaagaacatgaaggagctggtcaacgatccgatcatcgaacgcattaactcctacgaaggtcgctagaaatcggccaataaaagaatccgtaatgcaccgattttaacacatagttttcgggctacgtacccgaatttattggggggattcaaatgtccaagtcggcgacaagtcaaagaataaacttaaccttcaaataataaaattagtatagccttcccatggaaaaacacccgaaaataaagtgcatctcgtttgggaatcttatcttgtaaagtggacaagcaaatatgcaagtgccaataaaaagtattgaacaattattcatttgaatttattatatggctttagtcgattagatatcgtaaggcttttctgtcacttactaatcactccttcaactgtctggctcttgtctaaaaatttattttctattagcaactacctttttgtttatacaaaatttgcactccgattaaagcgatttgttcgttaaaataagttcgaagtgatttaaagttcccattaattggcagagtagagaatggacattcgttttaaatcggttgagataagatttcttttttagggtattaaaattttctgtgccaggtgttaaacccaaataaatgccatttaatattggttcttatcgtcgtttgttggagattttaactggtaatcaaatcatggctgttctacactttagattaacgattagtgatactcaaacgtaattacagtgcgcataataagtttacgagcatgcaataacttaattggttaattatttaattgaatttacatattcattagaaatatttgtgtttatttgttttcaagcttctgatacaattaggtatatatcgtcgtctctcgataagctaaacttatagatacatagtacaaaccgtttaaaaaaaaaactcttcaaaaatgctttgatttattttaagctatcatttgttttgtcaatttctttttgcatatcttcatctccatagcttagtaatgggtatatgatagtcgaggacctctcttgctattacataagctcggtggctga

SEQ ID NO: 41117 - DNA, 1205 bp, DROSOPHILA
ccacaatgaatccaatcttctgcgcactactgttcagcttggtggcgggtctagtcctcgccgagaagtcggactattgtctgagcgagatcgtcaagtcggacgagaggatccgttcgcacggatatcccacggagactcacgaggtgaccacccaggatggctatgtgctgaccctgttccgcatcccgtactcccacaagctgaagaaccagaacgagaagcgaccgccaatcctgctgcagcacggattgttcagtaactcggactgctggctgtcctccggaccggacaactccctggcctacctgctcgcggatgccggatacgatgtgtggctgggcaatgcccgtggtaacatctactcgcggaacaacatcatcatctcgctgaacagccacaagttctggcacttcgactggcacgaaatcggcaccatcgacatccccgccatgatcgactacatcctggcggataccggcttcgatcagatacactacgccggacactcgcaaggaaccaccgtgtacctggtgatgctttccgagcgaccggagtacaatgccctcattaagtccggtcatttgctggctccatgtgccttcttcgagcacggaacctccttcatcttcaatgccctgggtcccctggtgggtacacccggcggcatctggaaccaactgctggtggacaccgaactgattccgaacaacaacctggttaaccgattggtcgacaacagttgccatctatccaacacgatttgcaacaacgccttcataatgtttgccaatggtggatacgttaatgccaatgcgagctccatgagcgtcctgatcgagacccatccggctggatcctctagcaaccagggcatccactacctgcagctatggaagtccctcaagttccgccagtacgactggggcacaaagaagaacaacgagctgtatggccaggatctgcctccagattacgatctcagcaagatcgtcgcacccacccacttgtactccagcaccaacgatgccctttgcggacccgaagacgtcaataccctggtggagaacttcccgcacctgacggaggactaccgtgtgcccgtccagagtttcaaccacttggacttcatcatcgccaagaacatgaaggagctggtcaacgatccgatcatcgaacgcattaactcctacgaaggtcgctag

SEQ ID NO: 41118 - protein, 399 aa, DROSOPHILA
MNPIFCALLFSLVAGLVLAEKSDYCLSEIVKSDERIRSHGYPTETHEVTTQDGYVLTLFRIPYSHKLKNQNEKRPPILLQHGLFSNSDCWLSSGPDNSLAYLLADAGYDVWLGNARGNIYSRNNIIISLNSHKFWHFDWHEIGTIDIPAMIDYILADTGFDQIHYAGHSQGTTVYLVMLSERPEYNALIKSGHLLAPCAFFEHGTSFIFNALGPLVGTPGGIWNQLLVDTELIPNNNLVNRLVDNSCHLSNTICNNAFIMFANGGYVNANASSMSVLIETHPAGSSSNQGIHYLQLWKSLKFRQYDWGTKKNNELYGQDLPPDYDLSKIVAPTHLYSSTNDALCGPEDVNTLVENFPHLTEDYRVPVQSFNHLDFIIAKNMKELVNDPIIERINSYEGR

SEQ ID NO: 41119 - DNA, 3155 bp, DROSOPHILA
tctttttgcaaaccgaggagaacaatttcatgcgcggggagctgaagcccagctttgccaggtcaaatggagcagccggaggtggcagcaccgaaggcgtcaacaagtacgtggcagctccggtggcgaatcctccgctgccctcgtttgaaacggcgttgtagagcgggtctaacccactctagctgtcgcaagctataatacatattccataagaaaagatacccataatcagatgagcaattcccttccgtagccaagccgaaactgcatttattgacggacggaaacgagtcagaagcgatgctactttatgcaacatatacatatatcactatatatacacaacacctttatacaataaactgtattttttaaattgtgctgcttgtataaacggagatgttttatacacgaatacgaatcgtctgtacacctacaatatatttatttgtaattttacgttatttattgcaattatgtattacgctacacgcattgctctttgttttgtagtacacttgtacgtctacgaactgatgagaatcgcttattgattaaaagaaaaaacattagataacacttgaaagctactggcgtatcttatttgggtggtttatttgtgactacacaatttggaaagatagtgatagctccaaaagaaatcgtttactttctcaacttatcagaggaatagattattgcctttcagtctcctttaaacaagaatttagattgacatttgtttaaatttctttgacatttatttttagtgtatattatctatatttatgaatattaaatatttgggtatttagcgtttatgattcggttttaaaggggtagacaaaaatgtataatatatggaatgcctacgaattaactaattttaaaactaaaggactaaattttgatctcgaagctatcaactttctaatacacacttgcgattaccttttggaaaatacttttgggtttgtttagttacatacgtgggttcctaaatccaactgcgtcccagactgccagacctgcgtttggtggacttttctcccagagaactggctgtctggtccttgcgccccatcacaggcgagctgcccgatccaatattacggattaactgcttaaggctgcgcgcctgtgcgtcgctggcctggctcacgctgttcgcctcggaagcaatgatgcagaaatcatcgactatgtgtccgggaggactgatgtcgaaaggcagaatgtcgctcaggctctgctgctggcgatacacgctgcgtctgcgggctccattgtcgaccccaccgccaagtgaacttccgcttgcggccgcagttcctgattgttgctgggtcatctggttcagctcctgctgcaagttgagtacccgagtgcgtagcccagcgttgtcttcgctgagacgctgcatgtgggccgcttcctgctccgcccgcacgaatgtgggctgcggcaggcactggtatacggtggtcaggaagttgcgcagcgacagaagcaacgtatcctgccattgcttggtgaagaacagggcaaaagtgggcgactcctcggcattcttgcaaaacggaaagtctaaagagattcaggggttattgaaagaggttattggtaagtattcttaaacgatatttacagaaccaatccttccactcgctttgctgctgcagatcgcccgccaacttgttaaagaactcggacaccttctcaggtcgattgctgctgtaggcggtcaccaggtagtattttaggaggctgttttccagtttcttgacagctggatgtcaaatagtaattaaattgaaggcatcatgtgggagaaaaagaacttaccaacggcatacgtatgctccagcttggaaaatatgttgttgtccaggtgaaaccacaaactcctgagagcctgaaggtcagacgcttgcacagcattattgaattgctccagaattcgttccgcacggaagtgctggtccttctcagtgcgctgctccaagtcgagggccttcaaggtgctggagaaacctcgaaaaactaggtactccctaagcaggttgtccagaaaagcgacttgtgccatcgtttgattctttatttaataacttattaatttttatacaagtttcacaataaagtttgaagaaagaagaagacgaacagctggtggggcagagttgccagactgaagatttcggtgtcaggaaaatatcgagaggcacagcttttcatgttcatctctaactgtcgaagagcacattttgtaaacattacattttttaaccatgcacaaacgaagaaccgccaaatcgattaataagccaccgccaatccagggagcaatcaagaagcccacgccggtggcagaacctccgtccatcgacgccgaccttgtcacccagttcgaagtggagctctgctggtgtgtgcagcagttgcaaactgctctcgacagcggaaaactggcgcaaaaagtggccgaagatactgccaagaacataaaggtactaaccagttcaacagcgccgctcatcaggaagcggcaggtgatgaagctagccctgggcgactaccgagcgaagatgcagcaggaggagcagaagttgctactagcctccaggcaaatcaaattcacacctacggctgaatcatccaaaaagtctagctttgtaaagaagtcggcgcttctgtcatctggaaaggacttccgcttcaactttccctcgcccgccgaagacaccagctcaaaagagcctcaaccagtccaggacttcgatcccagcagccttcaaccagctgaagccggaagtccgttcaagttcaacttcaccatcgcggaggattcggccaatgacattagtttcagcggtctgaacttgaataagtaatcaatcacaaaagcctgaatgatcttagattttctaattcctactctttatacaaataaaaagcatttaaataaaaactcgtaggcataaatttatggccattcaaaactatcaacaatttcagtgacaacggtcatgattattgattttaaaatatttatattcactgtattactttctatttgttgcatatttaaggagatatattttaaaaagaagctaagtgagcacttatttttaccacgcagtgtgatcttt

SEQ ID NO: 41120 - DNA, 783 bp, DROSOPHILA
tcttcaaactttattgtgaaacttgtataaaaattaataagttattaaataaagaatcaaacgatggcacaagtcgcttttctggacaacctgcttagggagtacctagtttttcgaggtttctccagcaccttgaaggccctcgacttggagcagcgcactgagaaggaccagcacttccgtgcggaacgaattctggagcaattcaataatgctgtgcaagcgtctgaccttcaggctctcaggagtttgtggtttcacctggacaacaacatattttccaagctggagcatacgtatgccgttgctgtcaagaaactggaaaacagcctcctaaaatactacctggtgaccgcctacagcagcaatcgacctgagaaggtgtccgagttctttaacaagttggcgggcgatctgcagcagcaaagcgagtggaaggattggttctgaactgcggccgcaagcggaagttcacttggcggtggggtcgacaatggagcccgcagacgcagcgtgtatcgccagcagcagagcctgagcgacattctgcctttcgacatcagtcctcccggacacatagtcgatgatttctgcatcattgcttccgaggcgaacagcgtgagccaggccagcgacgcacaggcgcgcagccttaagcagttaatccgtaatattggatcgggcagctcgcctgtgatggggcgcaaggaccagacagccagttctctgggagaaaagtccaccaaacgcaggtctggcagtctgggacgcagttggatttag

SEQ ID NO: 41121 - protein, 128 aa, DROSOPHILA
MAQVAFLDNLLREYLVFRGFSSTLKALDLEQRTEKDQHFRAERILEQFNNAVQASDLQALRSLWFHLDNNIFSKLEHTYAVAVKKLENSLLKYYLVTAYSSNRPEKVSEFFNKLAGDLQQQSEWKDWF

SEQ ID NO: 41122 - DNA, 3433 bp, DROSOPHILA
gctatctgccttagatctaattgccctgactctgctttgtgtcctcgtcccgtgggaatcgaactttagtcgagtcaaatcaacaggtccatgggcccctattttgtactccgattaccagcagatttcatcgtatatccctttccccatatggttgtaaaaactgattttaaaaggggaagcgggagggttatctggggttaggttagacgggtcccccgcctccagaaagctccactcgtcctcccccatcatcaaagcggtggactcaaacatggcgacttcctgctgtgcgaaatataatggcagaatgtcaaaaacaggtgaaggaagcacaaagcgaatggagctggatcttaaaggggagtggctgcaatggtattgtttcggctagcgagactttaagctgtcctacaatcaacgaaccaattttgtgcattaaggaaaattataaataaatcgggatatatattttaaaacacaataaaattacttattaacttttcttaaaataactttaagccaaaaaatttaataaggatggcttgtataaaacatgtttctgaacaaatatcaaagtcattctgatttctaagtagacgggcaaatcaactaccataattaacttgaaatccagatctacgcccagcaattgaagggtagccagaggcgaataagtccaacgaatttcccacagcatccgctccatttgcaggggcaaacaccctgtacttggcaagctccgcccatctcgtagacggctcacggtaactggctgcaaggacgtttaggggtggaaaggtcctggccagagttgtggcatttccaattggatctgcggcactataaaaggctcgcaattcccgggagatggactcactaaagtttttaacttattggacagcggaagtgcgtaaaagtgtcggaaaagttaatagtcgttctagattttaattggattaatattgtttagtgaaaaaataacacatttgataagaaaatgtcgcgaaatcaattgccggattcgtcgtcttcaccgcccattaggtacggatgttatataaatatatataaaataataaatatactataataaatacgtaaattattctctgattataatgataaaattcgaaaatgttttaatgtacgacataaacgaaaaacgtatgcatatttatttaatcaaataactgaataattgctcatatatacagttttatttaataaaaaataaatctatttatttacataagtatgcgcgcagaagtggagtcgcgcccagaatctgaactgactttcgtcagtgccgtcggtatctcgatttgattaaatacacggatacaaaattaattactttagactttacaatacagtcctaatcatcaaatgttcaattcttacctttaacagccatttacccttccacaatttcgacgatgatctgattaacgatttgccctcctgcatttatgcgggtcagcatcaaggcggaggcgccaccggtggaggtggtggatcgggaggtggcggtggcagttctgggctgcgtctgagctccaacaacctgcgtcacatccagcagcattatatgcaacatagcggaggtatgacggagaataaatatatttacgtcaagacaccttgaatatctttctgaaatccctcagaaaatctgctcgactcctctaccaatccaatgggggtgcacaattccgggggaggagcacccttaatgtgcaacagccccagtgccagcagcagtggaggagggtgcggcaacgcaggatctgctactcctggcggtgcaggtggtcccaatcctggatatggatccgtgggagctgcaactgcgtccagctacaaaatgcagcgacaggcggccaatgtgcgggaaaggaaacgcatccagaggtccgccccaactgggtacaccaaatggtcttttccattttacaacttactatcccacgatctcttaaccagaaattataactaacaagctttccttttttttttgtatttttgcgctttgcagtagcatcaattcggctttcgatgagctaagggtccatgtacccacctttccgtacgagaaacgtctgagcaagatcgacactctgcggcttgccatcgcctatatatctctgctccgtgaggtactacaaaccgactacgatcccctaacctatgtggagaagtgtctgcgcggagagatcaaagcggatagggctaattggaatacgagtggtgagtagagaatttggtcggaatatcaatggtcaataaatggttcgcttcgcagatctcacagctcgtctgtcgtggatcaactgggagaacctcggagtacatcctggtaggcgaaccctgcttacctcgttggctctctcctcggaacccatgtgcggagctcattgcggaatgccgtagattcgctctatatatttgaggcttagcctatcaactgctgaaagcacttaccacttaagcttctgatcttccccaaagattacaaagtcttccctttaggttttgatatcccaaaatagtttaaggctggacatatttctacagttactaacagttagcaatagtattttatttgaaaagcgtctcggctgcacgaaatacaagacccatctgccattgaagcccactactgtgtttaataaatagttattggtttcaaaggctcgcaggataatgcatttacaaatcaattcctcaaattatatttcaggataaatcttttgtaaatagtattgagtattgggcaaccgatctgacaaaccgacaaaccagttgcagctaacagacgttttacagttagtcaactatgtaacaactttaaaagcatttatatatataaaagtaaatacatgttttaactagacgtagacattaacatagctccctatcaaagtacacatactcgaaaataaatacttctttgatcaacaagataacttagaacacaaaatgtttgttgttgggtaaaaggagggctaaatgcgctgccgatggttaggcatgtatgtaatttgtataatatttatgtacttgctctatttggactacatgcggaagatatcaactagaaacttttggctactactcctacggcatacgtacgtaggtacatatgcgcttaaactaatctgttcaactctgttaaatttcaaatttcgctttgataactcgaccagatttcgttggctaatactcaaattgtgttgaccttggctacaatggtaatacaaatgcgcgcacataagtatgtactaaatagaaacgattacataatgcacactcacaataatgaacataaacacaatgacacggctgaactacgctcctaataattgaattttcgattgcttctccaatttgtttttggttttgttgctgttgtttgatctattggtcatag

SEQ ID NO: 41123 - DNA, 840 bp, DROSOPHILA
atgtcgcgaaatcaattgccggattcgtcgtcttcaccgcccattagccatttacccttccacaatttcgacgatgatctgattaacgatttgccctcctgcatttatgcgggtcagcatcaaggcggaggcgccaccggtggaggtggtggatcgggaggtggcggtggcagttctgggctgcgtctgagctccaacaacctgcgtcacatccagcagcattatatgcaacatagcggagaaaatctgctcgactcctctaccaatccaatgggggtgcacaattccgggggaggagcacccttaatgtgcaacagccccagtgccagcagcagtggaggagggtgcggcaacgcaggatctgctactcctggcggtgcaggtggtcccaatcctggatatggatccgtgggagctgcaactgcgtccagctacaaaatgcagcgacaggcggccaatgtgcgggaaaggaaacgcatccagaggtccgccccaactggtagcatcaattcggctttcgatgagctaagggtccatgtacccacctttccgtacgagaaacgtctgagcaagatcgacactctgcggcttgccatcgcctatatatctctgctccgtgaggtactacaaaccgactacgatcccctaacctatgtggagaagtgtctgcgcggagagatcaaagcggatagggctaattggaatacgagtgatctcacagctcgtctgtcgtggatcaactgggagaacctcggagtacatcctggtaggcgaaccctgcttacctcgttggctctctcctcggaacccatgtgcggagctcattgcggaatgccgtag

SEQ ID NO: 41124 - protein, 279 aa, DROSOPHILA
MSRNQLPDSSSSPPISHLPFHNFDDDLINDLPSCIYAGQHQGGGATGGGGGSGGGGGSSGLRLSSNNLRHIQQHYMQHSGENLLDSSTNPMGVHNSGGGAPLMCNSPSASSSGGGCGNAGSATPGGAGGPNPGYGSVGAATASSYKMQRQAANVRERKRIQRSAPTGSINSAFDELRVHVPTFPYEKRLSKIDTLRLAIAYISLLREVLQTDYDPLTYVEKCLRGEIKADRANWNTSDLTARLSWINWENLGVHPGRRTLLTSLALSSEPMCGAHCGMP

SEQ ID NO: 41125 - DNA, 3339 bp, DROSOPHILA
aggcgcagaaaaggtcgaagaagaccgaggaaagtgcggctgaaagtgtcgatagtaaagatcccaaggataagccaaacgaaaagtagttgtgccatatccaaacaaaattatctgttccaaatcatttaatttaattttgtacataacgcacctattaccagtttcaaactgatccattcgacctttctaacttattcaaatacatttccgtaaacggatcaaatgtaaatgactttaatcttatattacattgaaaatatgtaatggagtggcttacttattattttctgaatttgttctatatattaattattcataatccctcaagatttatgactttcaactgccgcttaaagttatttcactaaaatgtacataaaaaatgcataaatttcggttaaacaaatttctttgttcatccctttacatactagtgtatgtgcaagtataacgacatcgttattcgttcttggaccgatcctaagcgattccgactcggaaccacttcgatataaagaatgtcttatgagtttacagggacttaggttaatctaaagcaaatatgataatttgatataacattgttgctaccagaaatatttcaattttacaattttcattagcatttttattcaagagctcgccagctatctacgactgaaaaggttcttcaggttcggcctattttaatattgctgatctggggtcaattgtaattatggttgcttctggttgttaaaggcgaaccaaagtcaagttgctattacgtgagcttatatgtttaagcttcagtgattccaatggcagtaaaaatagagaaatcgtgagattcggtcgggccaagaaccaagattgcatcgtgcaaggatatcaatcaaattattcgagaaaggataaggaccgttccctgaacattaaaattgataaggactgttaacttaaatacgataaggataatagtgctaagtggttgagtgcagtgaaagaaagtgacgatatggcgccctactcaaggatataccatcaggataagtcctccagagaaacgggtgtccttttcgaggacgatgcgcaaacagtcgacggtgacctgaccaccgacagattccagttgaaacgagctgagaagcgtcggctacccctagtctggcggaatataatcctgttcgcattggtccacctggctgctctatatggcctgcactccatattcacaagggcgaaactggcaaccacacttttcggttagctgaatgtccctttagtcatagattatttgccttctaattggttcctttggtgcccaaaagctgccggattgtatatcattggcatgctgggcgttacagccggtgcccatcgtctatgggcgcatcgcacctacaaggccaagtggcccctgcgcctgctcctggtcatcttcaatacgatcgcctttcaggatgccgtctaccattgggcccgtgaccatcgcgtccaccacaaatactcggaaactgatgcagatcctcacaacgccaccaggggatttttcttctcgcatgtgggctggctgctctgcaaaaagcatccggatattaaggaaaagggaaggggactggatctctccgacctgcgcgccgatcccatcttgatgttccaacgaaagtaattatttaatagcttttcatggatcaaaagaatctaaatgcaaattacaagaggggggacccctggagggttcaagtagaggactcatttaataagatataaaaataatttataggcactattatatcctcatgccgctggcctgcttcgttctgcccaccgttattccaatggtttactggaatgagacgctggcctcctcttggtttgtggccaccatgttcaggtggtgcttccagctaaacatgacctggctggtgaacagcgcggcccataaattcggaaatcgcccatacgacaagtaggtaatcactatttctggtagtgagtactttcataattattatgttgttgctatctatctatccaggaccatgaatcctacccagaatgcctttgtatcggccttcacctttggcgaggggtggcacaactaccatcacgcgtttccgtgggactacaagacggccgaatggggttgctactccctgaatataacgacggccttcatcgacttgttcgccaagatcggctgggcctacgacctgaagacggtggctcccgacgtgatccagcgacgagtgctccgcactggcgacggtagccacgaactgtggggctggggcgataaggacctgacagcggaggatgccaggaacgtgctccttgtggataaaagtagatgacgattgatctagtactcttaaatgaaaaacttattaagtacaaactttaagcgatttcggctaagattaaatatattgatcggtaatattctaaaaggaaacttctattgccaatttatcttgcccgtctgaaaattgaaatccaagcacaatgggtagctggtctcttatcatatatttatgacggttgctaatagtgtgtgcgaattataactgatattgcttatcaaaaaagggatttctgcgagtgatcacgaccaggcttgaggcttgagttgatcaggtcgtacgtgataagactaatcagcaggtgtctgtaggaaagtttcaattttatggtgtctaagaataaatcatttcgcatcattcttgcagttcagtatgtacaggactatgtccgccaaggccttcgacttgacacccgcctccatcaattccagacagagatcgaatgcgttcttcgacaaacgcgtgtgggtgagggccgacatgccgtgcagggcgatgtggaggggcggcgatgtgtgcaggcaaaaaaaatcggcagtgatggttggctcatatttcagctccggtacgagacttggttccggatcggtttcttgcgacatcatatataggggtgttgtttctgaatggactgacagtttaaaacatgatatgcagatgtccattcacgacaataaagataaatccgccagccacggatactttgtgccagaaactttccctcgaggccaaagaaggatcatccaagatttgcatgcccacatgctgtaggcccatcagtcccacggggtcctttttctgatgacccaaaagctgctccccgaaattataaaagacgagccacaaatgccgctccatatccttccagttcacgaaggtaagcagcaggaacgcgacaacggcggtgcgtcgagacctcagcattatgaccatcaaggcactgatcacattgcacacctggaagtacttggcgaggtttcgctgcgtcgga

SEQ ID NO: 41126 - DNA, 1009 bp, DROSOPHILA
atggcgccctactcaaggatataccatcaggataagtcctccagagaaacgggtgtccttttcgaggacgatgcgcaaacagtcgacggtgacctgaccaccgacagattccagttgaaacgagctgagaagcgtcggctacccctagtctggcggaatataatcctgttcgcattggtccacctggctgctctatatggcctgcactccatattcacaagggcgaaactggcaaccacacttttcgctgccggattgtatatcattggcatgctgggcgttacagccggtgcccatcgtctatgggcgcatcgcacctacaaggccaagtggcccctgcgcctgctcctggtcatcttcaatacgatcgcctttcaggatgccgggatttttcttctcgcatgtgggctggctgctctgcaaaaagcatccggatattaaggaaaagggaaggggactggatctctccgacctgcgcgccgatcccatcttgatgttccaacgaaagcactattatatcctcatgccgctggcctgcttcgttctgcccaccgttattccaatggtttactggaatgagacgctggcctcctcttggtttgtggccaccatgttcaggtggtgcttccagctaaacatgacctggctggtgaacagcgcggcccataaattcggaaatcgcccatacgacaagaccatgaatcctacccagaatgcctttgtatcggccttcacctttggcgaggggtggcacaactaccatcacgcgtttccgtgggactacaagacggccgaatggggttgctactccctgaatataacgacggccttcatcgacttgttcgccaagatcggctgggcctacgacctgaagacggtggctcccgacgtgatccagcgacgagtgctccgcactggcgacggtagccacgaactgtggggctggggcgataaggacctgacagcggaggatgccaggaacgtgctccttgtggataaaagtagatga

SEQ ID NO: 41127 - protein, 146 aa, DROSOPHILA
MAPYSRIYHQDKSSRETGVLFEDDAQTVDGDLTTDRFQLKRAEKRRLPLVWRNIILFALVHLAALYGLHSIFTRAKLATTLFAAGLYIIGMLGVTAGAHRLWAHRTYKAKWPLRLLLVIFNTIAFQDAGIFLLACGLAALQKASGY

SEQ ID NO: 41128 - DNA, 17157 bp, DROSOPHILA
aagataaagtgtcccaaagtggtctgtctggaccaattttggactatggccaccttggttaacatatccaccattttgagcttgggaattggccaaaggcgaatcgtagttgcgggccagatgtcaggctcagatctccacggttcagctcgattcaaaaataaatgtccattaagattagttgattttgctttcgatagtttgtttttcaccttttttttattttttggacgctctttgctggtctctaagcaaatgcggtaaataatcgagaaactcccgaaaagctcactcccaatggtggcacctcttaccagtaaagagaccgtcgtagacccccactttacccccattttccacttggcatttcatgtaacacgaaaccttccccaaccagaagcattccaattggaaacgcccatcatgagactcgttgtttagagtgaaatggctatggtggcttagtagctactccgtttatctcgctcgcactcccacgcaacacctgctctggttgaccgccctgcctctgcattctgcatccctttctgtctgacattttttatctctgttgctctcgtcttttttttcctgacgtcgcagttcttggatttttttttattctttccttcacgaaatgtcacctggtcgttgggcctctctctcaccaatacaacgatatttttgctctcaattttgaatttgttgtggatgtagtttctttataaacaggcttataaaaaacatttaacaaaccaataagaaagaaagctctcggaaaaagtattaatccagagcgagagagaacacaagcttttgcagagaggatttgctgagtatgtgtgtgtgtgcttctgtggagcgatactgttacatagcagctgtctcaccgccccacctgccacgccccccgccccattcggtgactgaaagactcgttttttggctcgtgtgtttttgaagagagcgcgcgccaagtttttagttacgcgtcggaacggatccgttgaatagccgccaaagcgcgcttagatgcagcaacagccaacttggccaagaagagccgatcagccaacagctagcgacggttttagccccctcacaagaaacgccaagaaacaaccgatattcgcaaaaaaaaaatacaaaggataatactaaaaacataaacaaactgttctcggtaaatatcccaaagtaaaagtgaatcctaaacaaaccaaacttttctttcccatttaactaaataataaaacacaaaccaattcaaaaaacagtgctcatatgatatcaactttcaacgctcgtaaagtgctcatagaaatgaaacaaaatacaaatccaaataaagcaaagcgatttaaaagtctcataaagttttgaaatcctaagctacttatttatcttgcaaacttcaaatcaaacaagctccattctttgtagcatcaaaacattggatgcaccataagtatcttatcgatgaatggaaagcaaacaacacacgtcaacataaactagtgatatccattggaaaagtgttcgtcaaacagattctgttacgaaacagctcaagaccataaaagtcaacaaattcaacattttatggcagttcggaaagtggaattcataagcgacaaaaacaaaccataaacacatattatccaaataattcggtagtatattccgcatatatgctgccatcgaatatttgattccaatcgccggaaaacgggaaatttaaaggaaatgcagaactcttcgaggtaacttcattgaagccaaaacattatggattctttagttagttgtttaacttagctgctttgattttaattagcaaaactacatataaacacatttacttacatttttttagtaaaagtaaaatatgatctatgataaagtctgatcccatagaactgagcataagtcttaaaattgttttccaagttaattgaaattacttcaagtcagaaagcaggtaaaaaatcaattaaaaatccctttaaccctttacaaatttcatttaattcaccgccgttcagaacgcaatttgaacaacttttcttgaccatcaattaggtaaacacggagagagctccacataatgagtctgagtgcgtcagatacaaggggaatcaacagattttattgtttggataatttcaggattttcctcttttcattttctgcgaaatcattgtcggaatctttatgccccactcgaggtgtgtttacttttgctttcgatcttccacttgaattaaagcaagctcgttttctttctctgaggggcattcaaagttgtttggttaacttaatttcgaaatataaatgaaaaccgactcaaggtatgtgaaaagccgcaatgaaaagagagtcaaaagcaccagagaatttgaaatgacgcaattagagcaaataatagtaaaagaaatagggaaaaacaacgtatgtttattaatatatttacacaaaatgtgacaacaattgaatttaatgtgacgcgcccccatcatatagaaatcgactttggaccagcacacaaaaaacccaattgtgcaaacagagttttctgaaattattttgcgcaccagatgtcaatcgaatatttttacgccattcttttggccattgtgttcgctttataaatttgctcaaaaaaacaggcataatccaaagaagagtatgaaaaaattctaattaatacccggctgtatcagcacacatatggttagctgactttgtatcggttctttttcttttcgatagccctttggatagcccttggcacaaacttgacactaaaccttggaggagcagggtatgtggttatcgagacactggcacgtttacgaggcgattgttgcgagtgtgaaagttcttaattacaaacattagggggcccagcgacttagggccctgagaagatccgatcgcagcgggcgggcaagacgacacttttgaatggagggtctgctgggaccgaaaacccggtgcgtatccgcgatacatttcaacacaaagtggagacacttaaagctctacctgtgttgaagacgaggtggaagactgcagaccgcgagactcctcttcgccgctaaagaatgagcagaagaatatggctgggggagagatctcgggctcagcatgtggctaagccgatcataattcttgtttgacataccaacaaacggatgaacaaatgaacgcgaagcagcaacaacacggccaacttggtcgggggttacgagtggatctatatggcccccgaaactcaagtggccagcgggttaattttactcctactgcgatacgatacgaagtccgaaacagaagaacggcttcagcactcgatttccatgagaaagagtcggacataaggtgcctctggtgggttatctattaaggctactagattaacaccctgagaagacccacgcttttgggtttaacggttacatttccgttacaaataaatatcggagctgcatttcggtctgcgtggaggtgcagcgaatcaaaaggaggagctggcatattcacagcaaataaaaatatctggagtgcaatttgtgcacagctggtggtgcaaccgtcgattcggatggtggccctgtggtgcaactgatactgcaactgcgacactgcaccacatcggaacaagtgttatgtccacatagtcattttcggttttattgccatttcaattactagaataatcacaaaattaaattagttcgaaaataaaaatccaaacataaatgcaacttcatatcaattgatatatgcgtagtgttttcaaaatatgaaatttagcgtataccttgagtggaggcacaaataaacataatcaattcatttttctcagtgtattctgccaattcgcaacataaaaaggaggagcaaaaatatggagagcaacttgacaacacagaaatttgtttgcactccataaggattacaaatatgcgtgtccctttgctaaccgctccccgttcccagctcccccttttcttttaatataaatttcatgcttaatacgcatgcttgggcaatttttactttaacaccaagtggtaatgcccggaagcagtacagatgtcgcctcgcatagcccaacgcaagttattgaccacgatgcgttgcatggccagaaatgccaatgaacagggccaaaaagagagactgcggaatatggcagcagagaaaaaacagtcgaattggacagataaagataaatagtttcgaaccacagttggccacttcataaacccaaggatattccaaaattattgagtacacgtaacgatccagaaatagttttatgttttagatttatgagtctcaacaactttttagtagctttttatctactataggctgtaaatcctaaaaaattatattttctaaataatttaataagtctttagctttaataaaagcaagcaactaatagtttatcttgtacaagccctattatacatatacattttgcaatacgtacaatatgggatcgcacttacctccttaagtaaacaaagaatgctaaatgtatgctacttaaataatttcttggtgattattttaagaagcttagctatttataaaacagatgatttaaacataaagatcaagaaatgtgtcaacggcattgtttcttttgaaaatattaccacgttttagtgatacaaaatatttgaattatcccaactgaaaacaacaaccactttatttatcttttaataagaacgcttaagtgtcctccctaattaaaatgattagcaatgatcatgattattcagatgtaatactgataaactttaactagaaagtgaattaacctgataagtttttacatgaattttaaaggaatccaattcaattcatactgcaagcagtccactttaattagctgactagccactcagatataattatattatgaattattcccgtttgcgttcgccaacaactcgcagtcgtttccctcccctacgccttgtgacccctcaatgctcattggggcattgttaatcaattaactaattgatttcagctcttaaaagtatgtcgtctgaggcccattcttcggggacaaaaagaaaacaatgccgagtggagtcgtggacttttgggccaaaaaacccacttgcgagccgcgctggcggttgccacctcaactcgtccagaatcggactcactccttttcagcgcccattgtgtgggccaaatgtcaacccttaaaaccgaccgggatgcacaataacacaacaacaaatgagacgactacgacgacgtcgtcgtccatcctttccattatgcgacggggcacttgaaacccatttctttcccattttacatttttgtgtactctatttgcacccgagccgcttgttttggacacgctggaatgagctggtcatgtggcggttcatgggcttcaattatgggtcctttcgatcccacatgtgcgtgcattataagcgggatttacgtggtccacttgatgccccagctccttccgcagaacgtgttaaatacggcaaggcaaggggaacggggaaaagggtcaagaagccagcgtccggctaaacgctttcaatttgtttaatggtccctttcggattcgcattcgggctcggatttcctcgtcctcctcatcaggatctcgaggacaatcgagtgcgggtgtgccagggacatatgcctcaactgagtgcgaatccccattctacatgcacatatatggcctgctatttggctggcattatcctcggtaaatgtgtcatctgcagtggatatttgcatggattggacgttggtcttatctcgagaagttttgctgcccattttttggagagctagagttccgagccattaggtcacccaggagcttagacacataaaaggatattatttagggtatgaggacacgtgtttttattaggcaaacacaattcaagaggaaaattcaatacgcaaagtaacctcaaaaaatcttagacctacaaaaaatgcatataaaaacatttcgctttgatgcataacatttatggtttattgttgactaataaattaattaagttatcactaatacgtgtctgatcatttcccattagctcaacgcatcaaaatcttctcaccaccaccagttccagcaccaatagttccagcaccacccagtccgcccgccggctcgagggccacagattgaggcgccaaggaagcccgactccatctacgatatgatggaacgtctgtccacgcacctgtcgctcaccggcctatcgctagctcatcccctgcaaactcacctgggttccggcggcggaacgcaccaccttggtcaactggcggcggcggtgcatcagcagcaacagcagcagcaacaatctgaccagggtctcggccactcgcaccacctgcacggccagcagttgtcgctgaaccaccagcaccaccatccccaccagtcgccacagcatcagcagcagcatcagcaccacccgtgcagtagcaacagcagcaacggatcccccaacggctccaccggcctgggcctgcatccccactcggcgctccacctggcacaccatcactcgcagctgcatcagcaccacccggcgggtcagcagcagcagcacagccaaccgccggtttcctcctcctcgacctcgcaccacagccagtcgcaggcgctgagccatcagacgcacagcaacggcagctcccagctgggcggtggttcggccagtggtgcgggatcagtggccggcggtgcagccaacagccaccacagtgctccagcctccagcagcgtgatggcggccgcagcagccgcccacctgcatcacaactcgcaggcatcgcccatcagcaatctgcaccaaaacatgggcagtctcatgaacagcggaagcagcgcgaggtgagtaatttcaaatgaactaactgtttttaaaattatgtggcgtgatttataagattattttacatgcatacaagttttgtatgtcatcttgtaaagatttaattaaattcacacgtttctatcctattatttctcagcgatgtcttctttagtctgatgatccagaacacaacaaagcgccaaaacgaggagcacataaaacgtccaatgaacgctttcatggtctggtcgagacttcagcggcgcaagatagctcaggataatcctaagatgcacaattcagagatatccaaaaggctgggtaagttttcaaagatcgttaatatatatatatgtatactacattacattaaagttgactttatatcataatgtatttattcttgggcttttggatggttggcttcaaatagaatgccttcagcacgttttcagaaatctttgccaccatgagtgcctcaattgcctcttcaagctgttattcacagaacaaacaaactatttaaatcccaaccaagctcacttaagcttctctttttgtgtaacgcaagacacgaaagcctcggttatctggtggcaacgtttctttcgaaatgtgtataatctgcgcacaaaggatggggcaatacaaaacgaaattaaaatgcggcacacgacctgccaatctctcgcacccactcactcctcccaatctccagttccatctctgtcttacgcttatgcaagttaaactaatcaacgtaataccctactgtacaatgacaatgacaaaccaaaaacacccgccactcaacgcaactgtcaaaaatgacaagcggctgtcaaacaatgagcaggaagagcagcgcaggaaactgttgattacgctcgaagaaggggtttggtcttggcatcgaccttgcccgcagagcaccacccacccgattaagtttgattcgccaaatcacggccggctttgtctctcgcccgcttaactagttgcaaagttaagtagtttatttttgggagggctcagagcgtcgccagataatcccacgcaagtcttatcggatctttgggtctgagatcttttgggcgtgcagttttcgagctcgcacactgaaaaaaattttcaataatattaaaaaaaagatcttgaaaaaaattaaataacgaaataaaaaagcacttttaattagtgcacatttcatttcgctataattattagaaattgaaaagcattgataaatttgattgatttgcattatatatctacatatatgataaatatctagcaggcatcacaaaacacaaaaattgcaactaggttttttgatcgacaaagtcctaaatcgttttctctctgcattcagcgtagtaaattcaatttcaattcaagttgcaagcactcgacacgtggcagctgacagccaagttctttagcataacaatgccagttcttaggactaccttttcgatcagctcatgcatattgtatgagagtcctcttttatagattgggtaactcaactaatcagtagctgctgtcataacagtgataacaaaaaaaaatcaaattcaaaacccaactgaaaaccaaaagacaaactcatcttggccagtatcgatctgaactttgaggatttgcctggcgttttgtgcaattttttaataatactcaccggggtttcccctgggtaagcaatccatccagagctcccccagtcaagcactcgttaaatgactttttcttgcatttttatttagccattgttggcgtggaaacaaaggcaaattaaatgcgactcacttgccatccagttgagcgaaccaaagagcaacaacaggcaaactcactgcatctgaaggatgcgaacgacgaaaaaaggggtttctctgcttctgggggctgtttttcgcccaactcccttgaggaaccccattctccttataagccatccagtattgtagatccatttagctttctcttccaatgccaagagttcaagtaaacatatcgatgggatccagcaaacttaaatacaatttagaagcaaacttgaatttcgaattattttctttcgatttttttccagcgccgttgttgttgatattgtcgagctgaaagcttttgttcgcctttcacattttcctttttagtccgctttttggcaaatccattatgcgaattgacagctcctctcgctcgtcctctcgttttcagtaatatttgctgtcagttgcagtctttgttaagtttgtttagagcgggtggaatatcgagggggcggtggaggggcaggagctcggaaaattcttttgtcgcaaaggtggaactgggacagagtgggccaaaactgaactgtcagccacctggttgatagaaagtatgaccgcgagaccaaggattgtcctttacatgctatgtatttaaccatttcgggttttcttttcaagaataaatattttcctttaactcgtaaaagcaattgtgttattggcaggctaaaccaagacttggaaaagcaattttcgtaatattttaaaatagaactattacagcgaaataaaaaagttgttttactcaccctttattgagacatggttatttatgaaacgatttgaaccaccggcttagtgtcaataaaattagcattattctacgactggcttcttaaaaatcgtttaaaaaattagaaaatagttagttgttgaaatattcatttatgccagctatcaccgtacttatcacttcatctatcccatttataatctggaggacaattttcaaaactttaattacaccacaagcgaacaaaaacgatttatttaaataaacaatgcaaacaaaatgaaaatgagagaaaagaaacagggggctataaaaaggaaagcaaaagcaagcatttgccacatttacacaaaatgtcaaagttttttgcacttgaaaaagttaagccaacattcaattaaatgaataattcaacaacaacaacaacgacaaaggcaacgctcattatgaggaattgtcaaacagaaaaggcacaaaaagccacaagatgatggccgaggaagaggaggaaaaataactgtggcataaacaaaggcgccacaaaaaatggcggcgcgaaagctactttttcaccacagtgcgatagagatggtccgagtgcgacagaaagagacggtgcgtgcgtgtgcgagcgagagggccccatacaccggctacagtggagtggctcttcagcttcagacgccgttgccgctggcgttgccatttattttatacgccaaacaaaaaacaaaaaaagcccacaaaaggctgaaaaaaattgtatatatgagtgggtaaaataaaatagaataaaataaaataaaagtgaatgttatagaaaacaattcagaactgcgcgtgggcttaattgaaattgtaactgtcattaattactgtctggaaatttgaattaccaacaaccagagcggtggcacaaacaaaaggcgacagcagcaacaacaacaccgctcatgcctttcgtggaaaagtctttcctatcgtgttttgtatattcgcaaataattgaaaaacctgtcgattcgccaatgttctttatttttaatcaaagctcctgccactccaccgggaatatttaataatggcagacaaagctgaggagagttggatgaatgagccgttggacccggcggaacaaaaggtccaaggagcaggaacaggcacaggaaaaaagcaaacaatcacaaaaggtcgaactcaagccttttcccacccccacgatcaccttttgttgcttaataaaatgcgaacaattgattagtttgcaattggaaaaagctttcgaggaggcgtttacgtgggcgggaggccgttgggtgggcgtgaaggttacgacgctgcctgccagttgcatctgacaggtgggaaacgagtgtttaatgggcggaaacaaaaaattcacggagattttaagaaattgtaaacaaagcttactcgttaggtaaggggtgtatcatatgacaataccgcggaaaattgcttagtactttctggatcaccttagtcaacctactggatctacccttcactaacataattttacaatggacattatctttatttagatgaagatttgttaaaccccttttaagtatgctacgaatttcaccatagcgagacctattttaagtttttagttgttttaatacattcgaaactgatattacaagaatacagagattcaaagttgttaataggtttgggtgatcaatatgtattctttcgaaaattatatcacacatgtctgcagacacaatgcactgtcttcaaattttatttgaagagtatccctggacaaattaagggcgctgctgtcaataaatttctaaattattaaataactatgcctaacttcgatattcagacctaaccagctttgaaaaacaatatatcgtataggtcccagtgtgagaagtttttttcttactcataagtagtcccgtcagaacttaggacttattctcacgattcccgcaacaaagaatgagcaaataagccagatttcgagtggccaaacggagggcaaagaaaatggagaaaactcccaacgctccaactaaagccattaaattgctgggcaaacaagttaatcggtggtcgcgttatgagtggggcccccaaatataacccaccagcagaagagaagctaagtaatcccataagtagcccgattgtccgggtgagtggaaagtgtaactgcagaccccaaaacgaagaatccacaaaaactggaaactgcaactggtgatggtcaaatatttgatctgtgggttaggcgaacgaaacgtgcaacgtttccaggccggaaaaacttgttaattgtaacagaaagagtctcggaaatatctcgcaactgccaactgctggcttgtttttcgtatcaattattaagctggtcagccagccggtgaggagaaaattctcggactgccttgcagtgctagagtgctgaagtgccggagtgctctgtttggccaaggggcgccaacatcatagacattgggcaaacatagacattgtcattgtcatccttttgtgggtctagtttattcaactgctcaacttgtatctacaagtatgcccccatctatgtccaccggctgctggtcttgtttattattatgtccagggcgcctttgcaccacctctcttcccaccttcacatccacatccacagcccccagacaatccattctctcgaaggtgtcgtccccagaaggagagttgctcatttgatggccagttgggcccttggcactgtcaatgtatctataaattagtattttaccattatgagtgggtgtagatgggatggggagtgggagtatggagtttcgggaggcctttcagcttttgtattggccttattgttatagttttcgttgcctgtgtgggcctcagtccaagtctggctctgacactcgattcgtttcctcctcgaccaagaagagacttccagttggccctgtcatcgttgtctgtcataacaatgcatccggtgtgttagtgactggctttgtgggcaagtgtgtatgtgacattattctggctttgtgtccgcatgacaagccactaaaattacacgttataactaattagcgacttgccccccacacacaccaagcgattcccaaccaatttatcaactaattcacttacaatatgtcaaaattttcctcggttttctttgctgattatggaattacaatagtttacttgggagtctattatgtgataaataagagacttggaatataccttctatgtgttacatacattttttaaagaatatgccaaaataattcgtattgaagtgaccacatgaaatcaagaaccttaaagaggtgcttagtttccgttaattaagtccacaacattactatctagtcactttgtagaaatggttacgatgctcagccaaccaaattcagaatcatctttaaacgctccaactcgttaactggttagaaggtccttgttattgtgataactccagtactgccgagctcatcgactctttttctccttgacaccatgtcccctcatcagacgtcgtatgacacatgtcattataacgttttacattaacttaaaaacatttgcaatttccaaacacacaatggacgaaccagagccagaatggaagacctgattctccgaaagcaaccccatgtgccacttataggatgtgtccttacattcaaagtatctgtgtggcacgtgtatctgtgtgggtgtgtaccttgtacacatcctggccaacgccctcaagaacgttcctatgtttctcctgcgacccctacccgaaattagaacctgaaaccacctgctggggtaagcacagaactcgtctggatcgaaaaggggaaccccgaacaatggcgggtcagaaagagatggatagtggactacagagtgagacaacagacaaccactgacaacgacattgtttgctgttatccttcgtgcacagacaagacaagtttttgggggattgggtggtgaccccaaccaaacattatgtttatgtgcgacagcttttctagagtgcactccaattgttgtagccagattttcgacaagagcttcaagagcaaatgtatctaatggattaatgagaaaatattttaatttctaggtgccgagtggaagttgctcaccgaggaggagaagcgtccgttcatcgatgaggccaaacgattgaggtgagcttattcgggattatacatctggattactaactcaggaattacttttcgatagggccatgcacatgaaggaacatccggactataaatacagaccgcgacgaaagccaaaagctctgagacgcgatggctatccttatccaatgccatatccatctgtgcccgtggaggcgttaagagcgggtgagcattccacacattaaaattattaattaaattatatgaaattcgcttttccaaagcgaaaaccaaagcacacaaatcgctttaagaaaactctattcataattgaaaaacccgcgaattatgtcaaaaactaccgcattaagagcccctgaaaatccataaagcaaagcgctaggcataataataagtgagtaatatgcaaactagcggctgaagcacaagacaaatgcaaatttgacacgaaataaataggatttgggggtatgagtcaatggaaaactattcccccaatcctttataaccgcaatatgggaccaccacccatctggctgacaaactgtgaagtcatcatcctggcttagcaactcattcgagtgactggagaggatcggggaaaaggaaaaccagacagacagggaagagccatgtgacatgagccataagcaggagcataagtttccattcatgattttctatggtcatgaaacggggagtggaagtgggtgggttgtatgtagttttggtcgctggttggaggttttaaattagcatttgtcacgttttttgtctttcaccccgagcagttgttatcccggtcatgagcctgggccctcaatttaacgcaagttttctcggtttaagttagtcccgagtcctttgcctttccccttcgcggggctggatgatttatgcccagcggaaatgataataaaaatgctaggaaatgcgtaataaataaagcgaattagtctatttagttggctcgtggcttccccatcagtgcactttgtgtaaagaaagggatttggaaagcagaaagtgcagtcaactgtggaattattttaacataaatatatctaaggaatttgtgtgaagaattaatacaatctacatataggtatatacaaaattacatgaaatatgtttttttttttgccctgttttgagatgtctaacagttcttaagacaattattcttataagatgggatacagtccattgaaaaccgcttctataaaattccaaacaacagagcttccgtttgtttactgcaaccggtcattacaaaaagatcgacaacaatggatcaacaacctaatccgctattatcataataacaatgatgatggcatcgaaaaccgtcgctacttgaaattgccaaagagttgaaaaggaagaaatctttcagataaatacattgtgtttcttgcggttgatggaaactttgttgtctaagcgaatttaattgctcggtggaagatcccaattcggctggactctcaatcaaatccatagcgccatcaatgaaataaatgctgaagactttcaataagcggcgcctgtaattatcaacttggccacaaaaggccagaagagcagatggacgactaccgtttagggcaattgataatgacttccaggcatctcatctaccagatacgtagatactctctctctacggatctgacacactcatttccaagtgaaatagctgattcagcgcccaattaaacggcgatggcgaccccgaaagaaaaattattatttaaacgaaatgaaagagttgaccgaacaaagaacgcaaatatttcgagtggcaattattttaaacacacaccatggcaacctcaaactgagccgaaacgaagctgcattttgagtccatgtcaagatgtacagtggttccagattcagtttattatgtggtaaatgaatattaacagaatatttgaaaattattataaggaacaatgtttcgagcagcgaatgaaaaactaagtaaacatatattagttgaaatacatctttactaaaccattaaatttcaacggagaacaattgaacaagcttccactgcctccaaaatttgtttatgtttcttatttctttaaaatataaaccttaaatattctagatataataatttattgactgaagttggtatgtgtagtaatatacttaacaccttaagtagttgcatcacggtgataattgatgaaaccctttttccttgaccccttcccatccataaccccactgaaaactgaattcatctccgatgttgttcgcttcacttgcaggcataacgcccggttactttgcgcccggtcccacagcggctgcctatcacctgggcagccatctcggccagacatcgacgccaaccacgacgcaggtgagtcccgctgcccaacactctttccaccttgccctgtccacccttcgaccccttctctatgggcccctcaagtgccagcgtgtccatcaaaacggctgaacggtagcggagaccaattacagacatgtaatatagtgtgtgcacatgggcggaggttactacggggttgccttaataacataattacaaactcctacggaagacgcccactttaaaaggcggaaaacacgccgtccgatgcaccgagagaaatacgataaataagaaggtttatttgcagaagaatggaaaccacaatcatcttaaagtgattaagttggaaaaaataacttatttcatataattgttcactttgtttgatatattacttactatgaatcaaacaagttctagaaatgtagatactatggatactatttgaatctagtgcttgagtaactacgttttttttaacagagaaaacatatttttctcggtgcatctgtgactaggcaggcgaaaaagcggtagatcctggcccaattgagttttctgacatgtcatgccaaaggatttggccggcaagttgtcattacatgtttagcggttccaggtagtgggggttccccctctccaaccagatcgagttgataaacaagggccagacatgccctcaaaaacaaacaaaactcagacaggtgagacgtgtgatcgggaatcgaaatgtcctcaaaagtggaacagctgccccgagaaaagctgcaaggaatcccgagaatggttgaactatagccaaagttcgggcctttgttcctccatcaggtggtcagctacccatgcccaacttcaattgattaacaaagcccattaaaagccatgactctcggttagcgaccattgtccattctcttcaggggcatgtaattctcggggcgatgcctatttcaatccgtgattgatgtagcgttgcagatgcggtgcgggtgttgaaggtctggcattaccatttgctggataataacacacatcgttccttcgccataataatagactaagtttaagccaaacaaatctcgattttgagtgatggaatgaaggagcattggtgtccgcgggaaaa

SEQ ID NO: 41129 - DNA, 1290 bp, DROSOPHILA
gatccgttgaatagccgccaaagcgcgcttagatgcagcaacagccaacttggccaagaagagccgatcagccaacagctagcgacggttttagccccctcacaagaaacgccaagaaacaaccgatattcgcaaaaaaaaaatacaaaggataatactaaaaacataaacaaactgttctcgctcaacgcatcaaaatcttctcaccaccaccagttccagcaccaatagttccagcaccacccagtccgcccgccggctcgagggccacagattgaggcgccaaggaagcccgactccatctacgatatgatggaacgtctgtccacgcacctgtcgctcaccggcctatcgctagctcatcccctgcaaactcacctgggttccggcggcggaacgcaccaccttggtcaactggcggcggcggtgcatcagcagcaacagcagcagcaacaatctgaccagggtctcggccactcgcaccacctgcacggccagcagttgtcgctgaaccaccagcaccaccatccccaccagtcgccacagcatcagcagcagcatcagcaccacccgtgcagtagcaacagcagcaacggatcccccaacggctccaccggcctgggcctgcatccccactcggcgctccacctggcacaccatcactcgcagctgcatcagcaccacccggcgggtcagcagcagcagcacagccaaccgccggtttcctcctcctcgacctcgcaccacagccagtcgcaggcgctgagccatcagacgcacagcaacggcagctcccagctgggcggtggttcggccagtggtgcgggatcagtggccggcgacgaggagcacataaaacgtccaatgaacgctttcatggtctggtcgagacttcagcggcgcaagatagctcaggataatcctaagatgcacaattcagagatatccaaaaggctggaatgagaaaatattttaatttctaggtgccgagtggaagttgctcaccgaggaggagaagcgtccgttcatcgatgaggccaaacgattgagggccatgcacatgaaggaacatccggactataaatacagaccggcataacgcccggttactttgcgcccggtcccacagcggctgcctatcacctgggcagccatctcggccagacatcgacgccaaccacgacgcaggtgagtcccgctgcccaacactctttccaccttgccctgtccacccttcgaccccttctctatgggcccctcaagtgccagcgtgtccatcaaaacggctga

SEQ ID NO: 41130 - protein, 217 aa, DROSOPHILA
MMERLSTHLSLTGLSLAHPLQTHLGSGGGTHHLGQLAAAVHQQQQQQQQSDQGLGHSHHLHGQQLSLNHQHHHPHQSPQHQQQHQHHPCSSNSSNGSPNGSTGLGLHPHSALHLAHHHSQLHQHHPAGQQQQHSQPPVSSSSTSHHSQSQALSHQTHSNGSSQLGGGSASGAGSVAGDEEHIKRPMNAFMVWSRLQRRKIAQDNPKMHNSEISKRLE

SEQ ID NO: 41131 - DNA, 3680 bp, DROSOPHILA
agggtcccgaaacggatctggtgctggtcgacacgcccaagaagccggaacgcgacctgattgccttgttgaagcacacctcgggtgcgctgtcgcagatcaaggacctaacgctaaagtcttactatattgccgtcgatgtagagaacaagacccaggcggaggagtacgaaaacttcggaggcgctttgtccatggaccacattcgtgatttgtatcaggagtacaagctgagagaccagaatccgggtcagtcaccgaccggcggtgcatctggaccaggagagcagggcgatgagaacgagtcctacgagaaggcattgccagcccatggcgatttggtgtttcacaactttatcactaccatccatcagaatccgggccagctgttgaggtaaacattgtacttctatcctcattaactttcctcttacccaagttgttctgcttcagatattcgcgggatacgatcccgctgttggtggccccgttcacggaacctctgcccaagtgccagaattgcaggggagagaccatctgcgaggtgcagctgctgcccacactgattcccaagctgcggttccaggtgaacggttgcaatgcaccaatcgagtttggcaacgtgctggtcttcacctgcctcaagagctgctgggacacacccgacctgatgcgctacgaacatattgtggttcagtctgaaacttaaggtgccgtacacggccatttcccaaagccattagagtcattcgctgtagccgctacgattgcagactggtgcaacgaattttaaacgcaaactgcagagataaagctaagcttctcgattgtcctaggaagattttatgctctagttgttaagaacgttgtaagcttttagacactccaaaaatggatagttgctaataatatctcgttatttccactccccctctaaaagggtttcaaaacatattgttttatttccaacttgcagaaatccattctaattctaattaacctaagccaatggtgcatcagcatcaagatggtagctctttacggttgagaacctcagcgccggatatttggcctcggtcaaatcgaactcggagctgatgtccaccttgttgcgcttctgcacgagcgtgtaatgtgaccaaaccaactgggcgcatcggcgcttggtggtgcctgcgatgcgcagctcgatcaggaactgtgaggagtcctcatccactggcatgatactccctcgcctctgccgcacgttagccggccctcgctgctgcgacttttgcagcaccagagtgactgtgctcccgaagagacgatagcgaccccgaagcatttccgcccgtacgttgttcacgtgcttcagtttggatacaccttgcgccggctcatcggcagtcgtcatcatcagcaccttgccatcgggcagaaagcgaatgtagcgatagtactccaccagttgcacaggacggtagaactgatcctggaagctgttctcgcccattctcaggtacgtagtcttgctgatgtagcagccgttgaaaagaactcggtctcggcggatgaacatgtctcgccaggagtggaacacgttgcttacatccgaatcctgggcctctagagttccaacgttgtggccccatactctatacagaaaattacgataggttcattgaatcttaggcgttatttgaaagagtaacttacttgacacaagctagcctccagagctcctcatcccgcgcgtagacatagaaacctttgcaaacagcagcgcactgctctagcgagcgcatgtccagttgggcggaaaccacccagcgcaggatgcgcatcacaatctcgggcggcaggtcggcaaagtgcagaccggtggtcaggacattggcatcacggctggatgctatcatcttgccattgtaaatgtttttctgacgcaaatcatgctggaacttttcgtacaggttgtccacgacctcctccccatccgactgacctagatccaattgcttggccaaatcgttagccagattgaggtacttcttgctgacatcgttgctgagcttttgcttctgctgctcgtagaacctgaactcaatatccggaacgatttgggtggccttcctgtagaagggtagtgcgtcgtagaccttgccacgctgctccagctgcacagcggtccgatagagactctccgccttggcctgcagtagatcagcctcgctgagattggaattggccgccgtgaggcgatctccagcctcggaatggctcctggatccagtgtttgttgtgtgttcctgcagctcccgctgccagttctcccggaactcatccagtgcattggtgcccgttttccgggttggctcctcgccatccgagtccacatccgacatgattagagctagaaactagtctgcgaatgccaatcagatcgtagattataaacatctgcgcatttatctaacgcaatttctaacctgaaagattttagtattcgatgtggaaaggtacggaagttggtaacaaaatagaacttataataaagggccgcgcgtattgctgattttgggcgcgggcttcaccccagaatttcgtagttgtatgcaactgggagcaacatgtggccattggtaagaccccaagattaagagtattcaaatacgcaaacgagaacacttctacactaatgttattgtttacagtgtgcacgcatttgcttaagaagtaattcttataaacgctcttctttaaacattgacttactgatttcgtcaatttcaaaaaggttatatttaagcgaaattctcccaaaatgtgcttctaattagtattctataaagatatttacaattactaaagatcaatttgaaaatcgatatcatatcatatgcatattcgataaatatttaaaaacagctgacttcaacgcggttctgttttgttttggttgctcatttgctgattcgcactatcagcaggtaaaaagtgatattaaaaattaaagtggtttattaaaatggaattttaggaaccatgtcagccgactactcccatctgagctccgccatcctggagcagtgctttggcaaggtggtgcaggcggtggccgactgcctcttttcggccaccacgaggaccctgggacagatcaccagtgccaccaagttgtcgaggaaggaagtggcatttgcgctggcggtgctggtcaagttcaggctggtggactttgccgcctccaaggcaaaccccttcctggcggagtacgccctccggcgcgaggatgttctctgcctcctaaggtatcctcggtatgtaaaatcgtacataaaagatatacgaagtttcatgttttaaaatctattcggtaactttctcagttacgttcacctggtgcaaaccaagtacggaaatgtgggtgcttccatttcggaggagttgattaattctggatccgatacggcaactggaattctgctaaaatgcctagccgagaatgaaaacaaggcagaaagtccggagtcctaccgcaacacctttctcgaaatgatcaccgatcactatatcatcaagagaccagaactgctggtgggcgacgaccaggatgagaatgtgccaaagtttgagaccaacgagtgcgatttctttaggcatcccaatattgatcttcagttgctggccaagat

SEQ ID NO: 41132 - DNA, 1555 bp, DROSOPHILA
tgtagaagtgttctcgtttgcgtatttgaatactcttaatcttggggtcttaccaatggccacatgttgctcccagttgcatacaactacgaaattctggggtgaagcccgcgcccaaaatcagcaatacgcgcggccctttattataagttctattttgttaccaacttccgtacctttccacatcgaatactaaaatctttcagactagtttctagctctaatcatgtcggatgtggactcggatggcgaggagccaacccggaaaacgggcaccaatgcactggatgagttccgggagaactggcagcgggagctgcaggaacacacaacaaacactggatccaggagccattccgaggctggagatcgcctcacggcggccaattccaatctcagcgaggctgatctactgcaggccaaggcggagagtctctatcggaccgctgtgcagctggagcagcgtggcaaggtctacgacgcactacccttctacaggaaggccacccaaatcgttccggatattgagttcaggttctacgagcagcagaagcaaaagctcagcaacgatgtcagcaagaagtacctcaatctggctaacgatttggccaagcaattggatctaggtcagtcggatggggaggaggtcgtggacaacctgtacgaaaagttccagcatgatttgcgtcagaaaaacatttacaatggcaagatgatagcatccagccgtgatgccaatgtcctgaccaccggtctgcactttgccgacctgccgcccgagattgtgatgcgcatcctgcgctgggtggtttccgcccaactggacatgcgctcgctagagcagtgcgctgctgtttgcaaaggtttctatgtctacgcgcgggatgaggagctctggaggctagcttgtgtcaaagtatggggccacaacgttggaactctagaggcccaggattcggatgtaagcaacgtgttccactcctggcgagacatgttcatccgccgagaccgagttcttttcaacggctgctacatcagcaagactacgtacctgagaatgggcgagaacagcttccaggatcagttctaccgtcctgtgcaactggtggagtactatcgctacattcgctttctgcccgatggcaaggtgctgatgatgacgactgccgatgagccggcgcaaggtgtatccaaactgaagcacgtgaacaacgtacgggcggaaatgcttcggggtcgctatcgtctcttcgggagcacagtcactctggtgctgcaaaagtcgcagcagcgagggccggctaacgtgcggcagaggcgagggagtatcatgccagtggatgaggactcctcacagttcctgatcgagctgcgcatcgcaggcaccaccaagcgccgatgcgcccagttggtttggtcacattacacgctcgtgcagaagcgcaacaaggtggacatcagctccgagttcgatttgaccgaggccaaatatccggcgctgaggttctcaaccgtaaagagctaccatcttgatgctgatgcaccattggcttag

SEQ ID NO: 41133 - protein, 442 aa, DROSOPHILA
MSDVDSDGEEPTRKTGTNALDEFRENWQRELQEHTTNTGSRSHSEAGDRLTAANSNLSEADLLQAKAESLYRTAVQLEQRGKVYDALPFYRKATQIVPDIEFRFYEQQKQKLSNDVSKKYLNLANDLAKQLDLGQSDGEEVVDNLYEKFQHDLRQKNIYNGKMIASSRDANVLTTGLHFADLPPEIVMRILRWVVSAQLDMRSLEQCAAVCKGFYVYARDEELWRLACVKVWGHNVGTLEAQDSDVSNVFHSWRDMFIRRDRVLFNGCYISKTTYLRMGENSFQDQFYRPVQLVEYYRYIRFLPDGKVLMMTTADEPAQGVSKLKHVNNVRAEMLRGRYRLFGSTVTLVLQKSQQRGPANVRQRRGSIMPVDEDSSQFLIELRIAGTTKRRCAQLVWSHYTLVQKRNKVDISSEFDLTEAKYPALRFSTVKSYHLDADAPLA

SEQ ID NO: 41134 - DNA, 6161 bp, DROSOPHILA
tacggaaactagtcggtcatctcgtcgattgccggattcattgcactttactatctggacactccacgtgttctattcaaattcggactgacacccgcccagggatttcagttcactgtcagcgaaactgaaatttgcactggattccatccaaggttaattcgatttgcggcacatgaagggatcgtttatcattaagatcggacgatgttctttctgaatggtgtgatgttaggttttaggatagacaatacatggtatgttgggactagttaacactgttttggttgatcaagttctacgattcgtttgctggagtgcttaacaagtaattacttcttctaatttagttcgagtaatctatgaagttctgttttaaactattacctactagaaagacttccttgggttagagtggctttatgttatagcagttcgattgatgggtaaagagaattcgagtggtcgcacacacacaccgcatggattggccccctagaaaagaggggcctgtccgagaacccagctaaagagcaccctgtagattacataaccgcccgtcaaccgagacatatgtacatatatgatgtatttgcacagatttagacatgccccgccgcagaaaaggaaagccacccaactgagttgttgttgtcaattggcgggcctcctccatataatttgctttcgtttttattgaatcttgccggggccccaaacaaaatcggtgcgccatggcgacaagtcccacttccatagccatacccatacccattcctgatctcataatgaatttgactggctgccaactgacactcactaacccaattgactaagtaactaagcgaccagacgagacgattggagccgacgggatccgagtgctcaggcgatatatatatgtatgtacatatgtatatagcggaaacaaggcgctaatgttgagggactggtggaaaacatttcgcaaatttcgaaatcagttcaaaatcgcagctcgctggcagcgctcgtcgcgaatcgaaaaagtccagttcgcaaaatgtttcgcaaatgcctcgccagcctggctttggccccagttgccagtcccattccgctgcccaggatcaccccgatcgccagccagcttgtccagcgtcgcgcgttccaccaggttcctcgcgagagtaggccacccaaaattctgatcacaggtcagttgccgcgccacgtggatctgctaaatttaaccgcgtccaaggccgatcggaacaaatttatcatattttagcatatagtggacacgtttaactgaaagacatcccacagtttatacatgcttttgaatattttttgacatttttggaagttttacatcccttgtgaacttacaagttatagttatagtgatggtgtcagcaaatagaacagcaagaatataatataatattgaaatgataacttttttactttagtgtaagatctaagtgctgcgaagcactagatacattaaacaatctattctatataactaggatatataaagaaagaaatggtaatctggtgattttagctccaaatattatatgtaaattccctatacctgtgcatggaaaaactaattttcctattttaattcgtttatacacgttttatttctcaaaatgctggcccgttaagtgtgaagcctgaaagaatgctacaatatgtattgtagattcactttcaataaaatctgagtgcaacaatcgttttgatttctttcaggtggcttgggccagttgggcatcgagtgcgccaaactcctgcggacgcagtatggcagccaaaacgtgatcctctcggacattataaagcccagtcagtcggtactggagaatggtccctacatttttgccgacatcctggacttcaagggtctccagaagatcgttgtggaccatcgcattgactggctgatccatttctcggccctgctgagtgcggtgggagagcaaaatgttccactggctgtgaggtaggatatcttagttatctctagttgcaatcattatagcaaaccctatcctacattcctttccaagtaactaaagtcaagtaactactcccacgtaactattgcataatgactcttgtgccattttaatcgtaagtaatatgaatcctccatcgcagggtcaacatcgagggtgtccacaacgtcatcgagctggcgaagcagtataagctccgcatcttcgtaccaagcacaatcggagccttcggtcccgacagtcctcgcaatcccacgccgaatgttacggtaggtccaccactttcaaagccagaagtttgttcgatactgaggacccatttccgcagatccaacggccgcgcaccatttacggcgtttccaaggtgcacgccgagctgattggcgaatactactaccacaagtttggactggacttcagatgcctgcgcttcccaggagtgatttccagtgatccgccgggcggcggcaccacaggtatttaagcaccgtacatttctgtggagactcaagcacatcaatctgcgtggaaatatctgcgagatactcttcccgctgaagtcatgtcgtcgagcgcacttcaagctttatttaatccaatttcgtatcataaatgctccaattgaagatagtttatgataatcaaagagcatgacaatggccataattcgtacaaaatgcagagggttttgttggggagccgcaaacctggtgacccatattaacttatctttgattgaactgattaacttaaagattgtctaagtctcaactactctgcattgctttcactcatgaatggaataataatgcttattacactttggggaaagctaatttgttttaatgccattgcattcttatgaaatcacgtatacgcaccgtgaatcgaatcatttctgcagctttatacaaatttataatgtaccaaaaacaagtcctgctttaacatttcacatttgttatttgtttcaacttttagattacgctgtggccgtgttccatgaagcgctgcgcaatggaaagtacacctgctacctgcgtcctgacacaagactgcccatgatgtacattgaagattgtttgcggtgagtaataagtgcattgtaacaaactatttctttgttactaatgacccatctaactagggctctcctcgagttcatgcgtgctcccaacgaacagctgaagcgccgcgtctacaacgtgaccgccatgtccttcactcccgaggagctgttcgcccagctgggcaagcacgtgcccaatctgcacgtgacctacaagccagatagccgccagttgatcgcagacgcctggccgcaggtattcgatgactccgatgcgcggcgcgactggcactggcagcacaagtacgacctgtccaacctggtggacttcatgatcaaggacgtgcaggataactacattaatgttcagccggagcagcagactctgcagatctaagacgtggatcgaacaaccgcatctagtattgctaagtaatgaaatccaatcgcatttaacactgcatttatctagtgaatagcaacacaaaccactgtaacattttaccttttaaaatacagtaaggcatttattggaaaggaaaactattggttcatttcatcttgaagaattgtgatcttaaagttcttcagcacatggaaatactttcgattattgatgtgagtttcgcacgatagcttttggtttattcgaactcaaatactattggtaagcacctttagtttgcgacagcttatattacaacttaggctaggatgtacaattcttgctcggagttactttatcatatatcagactcctctagctccgatccgccgagcccacaaaagtggtgcagactgccgccgtgtgtggctatatacaagtccgcttcggcttcgctgcctatggactttaatttgattttcccaatagaattattagattttcttgacttttgctgcggggacggcactcgttgctctgcggattctgtaaacgagcagattggagatttgtctatcaatttgggtcactaacttggcctttcgcgtttgctgtttggatcttccacaaagtgctctttaaaagttggctgacttcattaacttaaacttcgaataaaatagaaaaaataaagtatataaaaaaaatttaagtataacagaatttatataaagatcggtggtagctgttaagtttattgcaaatatatgtgagtgtaaaaattgatacaaaagatataagcactcaccgcggtcttaagctactaagtcatcaatatacctaaagcatatgttgataacgatttgaactaatggtaaagtataccttagaaataaatttacgactatggttgcgtatcagccaacttcacatattaaattcactttgtgaaggctcccagcaatcgctccaggctgattgaacatttcacttaacatatattgcttgcttttttgtgattgcaatgtttcgcaggtctaactattactttttgaaattaattacgtatttcaattctttaggtagttaagtacagtttatgttcgatgttcgacttagctgttgtttgtacaatagttcgtgagtttaacaatttatacagaatacttattggctgagtcgttagctgattgttttttttttttacaaaatttgaatttttggtatatggtaggtatgtgcattgcggatattttcaattcaattgctcctttgcgttaatttgctttctgagtgatatgcgaacatttttcgatacattgtcggctgtttagcaaataaagagagacgcgtcgctcggtgaactgttgcatgtgtttcttgtgcgcttttctcagctacagtacatgttttgggttatatatgtacattttgagttttgtgtgaacgagggcccctaaatcatgtgcgacatcatgcaacgactcacatcacggttggcgcgatgcaaatgaccttgataatgctgatgaatgcgctgatattgatgtggctgctgtggatgttgctgttgctcttgatgttgctgctgctgcgctggaaaactcgtctccgattccatcatcatcatgccgccggtggcctgcatctcgtaatccatcaaagaggcctgcgttccaattatttgtgtggcaggcaaggaaaagaaatctgcaaggcaataaaccgatcattaagttacattaacttatataaaataatttacaatttattataattgtatgtacaaactgaagtctattccgatttttctcagtgcaacggcaatgcaacgcaacacgttgacactatcgatgcttggcccaattaccgatcgtttatttataaccaattcggagcagagcagtgtgttgtcatttcttatctacgagttagtttctttttttctgctttttgtttgtgctgataaccttatcaacgcaatcggaaactataaggtaacgaaggcaaaacggagtgcacagattaacaacaactaattaagtgtagtcatagttgcaaaaatacatatgtatatttattccaatagaaaacatttaaaattgtatttctattattttgtaccccttttaaaaatattaatatagatcaaaaaaattgagatatatatttaagtaaatcgtggacaaaactaaatgaaatattcgtacatatcattgaaatcacttaaaaacatttaagaagcgtttataccctcagaaagagtatagattattgattcactcccgcagatatacacatttcttttaccggctgtatatatttacgcccacactgccttccccctttgttttcttctattgttggaacacttttgcgaatgcagattgattaaactggcggtgtaagaagaatcgtaacactctgttgacccagtgtacatagtcatctccgcagtacctccagttaatccccactacttgtgtgttttgtttagtaggccaaacacaccgatatacatatatgcatatgtatgtctataaagactgagtcaagccggtttttctttgctaaatttaagcggctgtcaagtgctatcgtttcgagtccggtaccctctgtatgccacagatagtccggatcccaccgaataactgaacagtgataacacaggtcgctgggagagccaatg

SEQ ID NO: 41135 - DNA, 1624 bp, DROSOPHILA
ctggcagcgctcgtcgcgaatcgaaaaagtccagttcgcaaaatgtttcgcaaatgcctcgccagcctggctttggccccagttgccagtcccattccgctgcccaggatcaccccgatcgccagccagcttgtccagcgtcgcgcgttccaccaggttcctcgcgagagtaggccacccaaaattctgatcacaggtggcttgggccagttgggcatcgagtgcgccaaactcctgcggacgcagtatggcagccaaaacgtgatcctctcggacattataaagcccagtcagtcggtactggagaatggtccctacatttttgccgacatcctggacttcaagggtctccagaagatcgttgtggaccatcgcattgactggctgatccatttctcggccctgctgagtgcggtgggagagcaaaatgttccactggctgtgagggtcaacatcgagggtgtccacaacgtcatcgagctggcgaagcagtataagctccgcatcttcgtaccaagcacaatcggagccttcggtcccgacagtcctcgcaatcccacgccgaatgttacgatccaacggccgcgcaccatttacggcgtttccaaggtgcacgccgagctgattggcgaatactactaccacaagtttggactggacttcagatgcctgcgcttcccaggagtgatttccagtgatccgccgggcggcggcaccacagattacgctgtggccgtgttccatgaagcgctgcgcaatggaaagtacacctgctacctgcgtcctgacacaagactgcccatgatgtacattgaagattgtttgcgggctctcctcgagttcatgcgtgctcccaacgaacagctgaagcgccgcgtctacaacgtgaccgccatgtccttcactcccgaggagctgttcgcccagctgggcaagcacgtgcccaatctgcacgtgacctacaagccagatagccgccagttgatcgcagacgcctggccgcaggtattcgatgactccgatgcgcggcgcgactggcactggcagcacaagtacgacctgtccaacctggtggacttcatgatcaaggacgtgcaggataactacattaatgttcagccggagcagcagactctgcagatctaagaatttttggtatatggtaggtatgtgcattgcggatattttcaattcaattgctcctttgcgttaatttgctttctgagtgatatgcgaacatttttcgatacattgtcggctgtttagcaaataaagagagacgcgtcgctcggtgaactgttgcatgtgtttcttgtgcgcttttctcagctacagtacatgttttgggttatatatgtacattttgagttttgtgtgaacgagggcccctaaatcatgtgcgacatcatgcaacgactcacatcacggttggcgcgatgcaaatgaccttgataatgctgatgaatgcgctgatattgatgtggctgctgtggatgttgctgttgctcttgatgttgctgctgctgcgctggaaaactcgtctccgattccatcatcatcatgccgccggtggcctgcatctcgtaatccatcaaagaggcctgcgttccaattatttgtgtgg

SEQ ID NO: 41136 - protein, 367 aa, DROSOPHILA
MFRKCLASLALAPVASPIPLPRITPIASQLVQRRAFHQVPRESRPPKILITGGLGQLGIECAKLLRTQYGSQNVILSDIIKPSQSVLENGPYIFADILDFKGLQKIVVDHRIDWLIHFSALLSAVGEQNVPLAVRVNIEGVHNVIELAKQYKLRIFVPSTIGAFGPDSPRNPTPNVTIQRPRTIYGVSKVHAELIGEYYYHKFGLDFRCLRFPGVISSDPPGGGTTDYAVAVFHEALRNGKYTCYLRPDTRLPMMYIEDCLRALLEFMRAPNEQLKRRVYNVTAMSFTPEELFAQLGKHVPNLHVTYKPDSRQLIADAWPQVFDDSDARRDWHWQHKYDLSNLVDFMIKDVQDNYINVQPEQQTLQI

SEQ ID NO: 41137 - DNA, 3595 bp, DROSOPHILA
tgtcgaatccgcagtattttgacaaggtggcttcgttctcctctctgtacagggatcgcccgatgagcgctagggaatcggtgatctactggacggagtacgtcatccggcaccatggagctgcccatcttcagagtcctctggtgcacatgagcttcatagccgccaataatatcgatatatatgctctaattgcagtcgttctagtaattctagtactgcttctcaaattgctgctgcaatttatctataggaaaattttcgcaaaaccaaagaaggagaagaagcactaaaagttttgttagatttctatacatgtactcgtagtaaaaattctcttccagtcgcatataagtttattgaaaataaagaaattatttttataagcctaaaagcttattattttcccttcatttgaaaataataaaatgctcacgatttaaatagatacaatttagttggtgttccattgtgaatggaggatctaaacagaacaaaatccattgtttcgtttcattaaacaaacaaacttcacaaccatttcaaatggtttttatacaggcaatgcattgccatggttggtggtatattatcgtaccaaatactatagcctttggattacaatggaaggcaagcataacctactatctaatcaattgtctcaatacaagtcacacaggcaaaatgattgcagtttgtttaaaccaataataatcacatttagttaattatcgatttttttaatgtaatcaacaaaagccaaagaaaaattattaaagactagtttttctcagccatcttcagatttatttctggttttctgtaatacgactaaaactaaactaaaactaaaaattaactattcacatatattaaatatatttctttcactttattactacaaacaaatcatatgttaagtttggttttattttttatttatatatatttgagcttaaagcttttattttcaataattaattagtttttatgaaaaattttaatgggttttctccttctttggcttcgagatgaatcttctataaataaactgaaccagaaatttaataagtaccaaaactgaaactagtatgacaaatattaggaaacaaatatcgatattattggcggctatgaagctcatgtgcaccagaggactctgaagatgggcagctccatggtgccggatgacgtactccgtccagtagaggaatgattccctagcggtcatcgggcgatcgcggtagagagttgaaaaggacttcaccctttctgcatactgcggattagacaagatctccaggatggcctcttgaaacggcttctcctccaaagtgagcaggctcagagtgaggccaaaaccgcttttgaccatggcatttgcgttacgtggctggtcagcaaagactggcagcgaaagcatgggctttccatggtactgggactcagtaatgccaccttttccggcgtggttgatgaatagcttgatgtttgggtgggccagaatatcgtcctgcggaagccacttcgagtaaagaatattagctgatttccctggcgtattctcttggtcctcccacttccaaatcaccctttctttcagttttgaaaggacgttgaacatcttggcaactgtgtctgggtttagatgctttccctggacattagaacccagggagaggagaatagctccatctgtagcattgcccaaaaactccgcaatgttttggggaaggggatccggcttgtccttaatctgaattccaccgatttctatggcagaaggaacattaggtctaataggtccttcactggccgcgtgcgaactgaagaaaaccaacgatgtgttcttgagcatttccgagtactcaggcattttgggatcgttgccataaacttccctggacaggaatatgttaaaaaaaagtgatcgtatttgggtcagccttctacttacttgtaccaatttcgattacgccgctcggaaagatgagaaaagacaccgaaaccgaggctttgcatatagctggataaacgccgttggaaggttacggctttactgccctctgcaggattactgattccggcataggaaacctccaggggattaccgatcagggggttcaatagatgattgggaggcattgtggccaatacgatgacgggtgcgttgactttccttgcgaatccgagctggaaatcgttcataaagtatccagaaataaccaggtcgaacttgtttccacggttcaggtacagatccctcactcgatcgttcatcagggtctcggcattctttctgatcatgaaatccatttgatccgacatccggagcagggataaggccatgttgctattgtcgttcttggacatcgctccaatcgtatcgctcatttgctgggcttcttccttactaagcggcacttggatcacggttatgtttttatggttaaccactggcttcagcacggtgaccaccgtcacattgtgcccattctcggccagaactttggccgcggacatttggatgatcaagtgcgagggactcaggctcgggaagagtcctagaatattagctccctgggagctgcccattacggcgccaatagctatcgctagcagtagaaatttttccacccgaagaaccatttcgctggatggctaacagtagactaattacttgtactatctagccgggtttttatatttaaatgcacatggacgccgtttcactgttgtgaccgataagcttcagtgtttgtagacacacatttcaacaatttggtaaaacttttcagtataccgattgtgtcttatcgctgtaagcattacttttggcctgcaaacacatacgggaatccttatctatgcgaatttttgatttttttttgggtgataacaggtaagcaaatgcttgcaatttttataataatttttaaacgtcgttacggtgctgattaggtgcattaaatttcgcaactttatgtaaatgtttatatttgcaaggcttgagaaaaattgcataagccaaatatctataatatgaataaaaccataatttaaattgttcttttgtgtaactttaattttacccatcctaaatatccagtctgcgccttttgtacgtgttttggcagagcctgaggtcaaacgagtgtgttgcttcagcgaaaatcggtggaaaaccatctggctggcaaaggaaaagcgagggaaaatgtgagccaagaagcataaccacggtgacactttgtggcgcacgacttgggaaacggaacccacacctaaactgaaaaccccggatggggcaatttacagttacgcggccacgtgacttactaaatcaacttggactgcggcatccgaaaaataaagcaataagaagcgagaataaaaaacacctcaaatccaattcccgaccagggtgatgtcgccggaaatgtcgggctgacaaatcgcgtgcaaaaatctgtgaaatcttcgtttgctgccatctctatctgtgcattgcggagatggagtccttgtgcactgaggaaattaagtataacatttgtattaaatatgtacttagcaactactgaatgtaaaaata

SEQ ID NO: 41138 - DNA, 1539 bp, DROSOPHILA
atgggcagctcccagggagctaatattctaggactcttcccgagcctgagtccctcgcacttgatcatccaaatgtccgcggccaaagttctggccgagaatgggcacaatgtgacggtggtcaccgtgctgaagccagtggttaaccataaaaacataaccgtgatccaagtgccgcttagtaaggaagaagcccagcaaatgagcgatacgattggagcgatgtccaagaacgacaatagcaacatggccttatccctgctccggatgtcggatcaaatggatttcatgatcagaaagaatgccgagaccctgatgaacgatcgagtgagggatctgtacctgaaccgtggaaacaagttcgacctggttatttctggatactttatgaacgatttccagctcggattcgcaaggaaagtcaacgcacccgtcatcgtattggccacaatgcctcccaatcatctattgaaccccctgatcggtaatcccctggaggtttcctatgccggaatcagtaatcctgcagagggcagtaaagccgtaaccttccaacggcgtttatccagctatatgcaaagcctcggtttcggtgtcttttctcatctttccgagcggcgtaatcgaaattggtacaaggaagtttatggcaacgatcccaaaatgcctgagtactcggaaatgctcaagaacacatcgttggttttcttcagttcgcacgcggccagtgaaggacctattagacctaatgttccttctgccatagaaatcggtggaattcagattaaggacaagccggatccccttccccaaaacattgcggagtttttgggcaatgctacagatggagctattctcctctccctgggttctaatgtccagggaaagcatctaaacccagacacagttgccaagatgttcaacgtcctttcaaaactgaaagaaagggtgatttggaagtgggaggaccaagagaatacgccagggaaatcagctaatattctttactcgaagtggcttccgcaggacgatattctggcccacccaaacatcaagctattcatcaaccacgccggaaaaggtggcattactgagtcccagtaccatggaaagcccatgctttcgctgccagtctttgctgaccagccacgtaacgcaaatgccatggtcaaaagcggttttggcctcactctgagcctgctcactttggaggagaagccgtttcaagaggccatcctggagatcttgtctaatccgcagtatgcagaaagggtgaagtccttttcaactctctaccgcgatcgcccgatgaccgctagggaatcattcctctactggacggagtacgtcatccggcaccatggagctgcccatcttcagagtcctctggtgcacatgagcttcatagccgccaataatatcgatatttgtttcctaatatttgtcatactagtttcagttttggtacttattaaatttctggttcagtttatttatagaagattcatctcgaagccaaagaaggagaaaacccattaa

SEQ ID NO: 41139 - protein, 512 aa, DROSOPHILA
MGSSQGANILGLFPSLSPSHLIIQMSAAKVLAENGHNVTVVTVLKPVVNHKNITVIQVPLSKEEAQQMSDTIGAMSKNDNSNMALSLLRMSDQMDFMIRKNAETLMNDRVRDLYLNRGNKFDLVISGYFMNDFQLGFARKVNAPVIVLATMPPNHLLNPLIGNPLEVSYAGISNPAEGSKAVTFQRRLSSYMQSLGFGVFSHLSERRNRNWYKEVYGNDPKMPEYSEMLKNTSLVFFSSHAASEGPIRPNVPSAIEIGGIQIKDKPDPLPQNIAEFLGNATDGAILLSLGSNVQGKHLNPDTVAKMFNVLSKLKERVIWKWEDQENTPGKSANILYSKWLPQDDILAHPNIKLFINHAGKGGITESQYHGKPMLSLPVFADQPRNANAMVKSGFGLTLSLLTLEEKPFQEAILEILSNPQYAERVKSFSTLYRDRPMTARESFLYWTEYVIRHHGAAHLQSPLVHMSFIAANNIDICFLIFVILVSVLVLIKFLVQFIYRRFISKPKKEKTH

SEQ ID NO: 41140 - DNA, 2456 bp, DROSOPHILA
gttgttgttgttgttgttggcgtcggtcatgaaggtgacggcgcgtggattgaacggatccatcgaaggacgcagcgctccagtttcgaaagtggcggccgccgacgacgacggatcaccatgtgcccagcactcgaagttcgtcaaaaccatcgcgcgccagctgcagtggaatttccccaaaaaaaccgaaaagcaagtacagtaaattcggaaaaaacgctcctctgcgtccgtactgtactgtacgaaatcgtgcggcgaactgcaggcgcgtatttttcccctaattgaaatcgtatttgtatgcagtatggattttgatggctctgtcggcttaataagcgccgaaaatacgcagcagttgctaaaatggatgaaataattcaattaacacacgcaagcggggcgcgcgagcattcggccgaaatgcgactgtaaatgcggtgacggcaactgttaaaaataaaccaataagcaagttttacattttgccgcgtgcgcctttcgattcacgattgctcttttgttttcctttcgctccagtgtgaccacactgctggtgtcgcaataaggcgtgcgaccctggagaaaaataccgaagaagttgcgaaaagacagctgtggttgcaaaaatagtgcagatcttatgaatctcattggaagtcatggaaacttataatttatatatatttatatttataattatcgaaaatcgcgaaacagcgtacaatatgttacttgaacaaatatgacacttcattttgtatacctaaagaaatagcttcaatacttctcttttattttgatataattttaactttttactcaattaaaatgaattaaaaaatgagaatttagttgaaaatatttcgatagcaacgataccaacgattaatcgactagtcgcagtattttctggtatattttgaatgctggcacggtactaccactttatcatgtgatttgtgatttgtcaaatatttctgataaccgaatggcagaccaaagcaaaactagaaattgagagaaattgctgatttttcaattaagctgcattctatttaactgaaaagatgtcgaccaagaacaagaaagccgccggaggcaacggagttgcgccgaaacaaacccgccagcagtcgcacgtatgtaacatgacggctccgattgccggctagctaatcccttgtttattttggatgcccaggactcgcaggactacagctccttcaagacagtgctcttctactgcatgcttatcgttttcctgcccgtgctgaccttctttgtgctgaagggcttcgttctggaccagttcctcgacatttccgaagtcaaagtgaacatagcatccgccgtgggagcggtcgttgcattgcacatcgccctgggactctatatatacagggcctactttggggcacccggttccaagggctccaaaacggactaatcctcatctaccccggactgttaccctatttccattaactttaagtcggtagagcactcttgtacatacatacatgctacatatatagatacaattgtttacatgccagcgagggaggagaaagtcgcctgtaaaccgtgtgtaatcgcttttcattgcataagtttcgataacagcgtggaaaacgtgttgtgttgtgtagtgttctgtgtgcataatttgtattaaaaatatacatgcataagtgaaatgcgtctgctactcagaaattattccctaatggaggccgtcaaaagattgctgccgagaccgcgcaaaaaaatctacaatctaggcgcttgcttcgaactggtggatattcctaaggttaactaaaacatacatttatttgtactctctgcttgaaaggggagttctgtataaagtatactgacttcggggattttattatattgataaattaattttatgtttttgaattttatattatatgttttctttttgattgaagcacaaattagtcattttattattttgtaagaagagaatggctagtgaactgaatatttcgtgtaaccattgcttaagacccctgctcattaaatctagacacgcccgtgacctgtttttatgggggtgccacctgttcgggactggtgctgccacctgatacaaatggcaagcagctgtttaaataatacgcgtaaacaaaacgattttggttgaattagtaaacaaggaaattaaatgatttttgagaggagtgcaataaattactgatgggaaacaaatagacacccacaacgagcgttacctatagacagtgttattttcgttagcattttgaccccctttgcgacgcccatttttgttattttgtgccttacaagtcggccgtaaaaactggccaaaatgataatttaatagactcgccaaagggtcttaagtacaagccggagtgtgccgcaaaatagttgcgcagccggatgaccaatcttta

SEQ ID NO: 41141 - DNA, 394 bp, DROSOPHILA
gcagaccaaagcaaaactagaaattgagagaaattgctgatttttcaattaagctgcattctatttaactgaaaagatgtcgaccaagaacaagaaagccgccggaggcaacggagttgcgccgaaacaaacccgccagcagtcgcacgactcgcaggactacagctccttcaagacagtgctcttctactgcatgcttatcgttttcctgcccgtgctgaccttctttgtgctgaagggcttcgttctggaccagttcctcgacatttccgaagtcaaagtgaacatagcatccgccgtgggagcggtcgttgcattgcacatcgccctgggactctatatatacagggcctactttggggcacccggttccaagggctccaaaacggactaa

SEQ ID NO: 41142 - protein, 105 aa, DROSOPHILA
MSTKNKKAAGGNGVAPKQTRQQSHDSQDYSSFKTVLFYCMLIVFLPVLTFFVLKGFVLDQFLDISEVKVNIASAVGAVVALHIALGLYIYRAYFGAPGSKGSKTD

SEQ ID NO: 41143 - DNA, 12495 bp, DROSOPHILA
tcttgacggcacttaaattgcattattatatacggctcgacatttatgtgcaaatattttatcgttcaaagttggacacatttgcttcgcttcgtccattgatggaaaaagagccgcaaaaaagaatttggctggctgctgctctcaaaagaaaggagaaagagccaaagcccagactcattgtcggattcaggcatttctttatggcctaaactgcctcactttggccattggaaatctagctcaagtgtgtttttatgtagattttccatggtgtgggtgggtgtaattttcgaaattttttgggggatgaaaaactgctgagttggggcacaatgtaagctagctcctccatccacagttatttttcaattgttacaattgatacaagcaatcgaatcgaaaatcaaatgaaacgattgcgcttttttcttatttttttatgagcgtaattcactttagaccagcagacaatccgaatctggggaatgtggtgtgtgtcaaaagcaaatagaaaaaaacaaccattttaaataattgtactgcctaattgtttgtattcatgttggtatttgtaaaataaaatgttttgggttttcgaatcctctgtttgtttggacaactagaattcagtagataccaatattggttttgtaactagaccaaagctgttatggcatcgaccatctaccgaaaatggtttccctttattgtttttaattaatctgattgattttcgctttcgtaacaaagtgtaggacgcgtgttacatttttgtcagatttcaaaatcgcgtgacttgtcccagtttgcggaaagcattagagaatgtctgcgcaaacatagcaaacacacatttgccataaagggatatgggatatattcgtgacaggctgctctcttgtgcggctaattaaggacctgtccgccggaacatgaagcatacatacgtggatcataaaacattaattttgcatgccaactgcctctaattatggcgatgtttcaactctttcctccctccttgcatccctttcagcccgctgccattgaggatttgcggaagtggacgtccagcgaggcgctgggtgatgtcaccgtcacgccggattgcatgcatcacgtggacacctcggtgagcacatcgctggccatcggcgagaatggcatcctgaccccggcgctgtcaccgtccgtcctatccgccgatgccgtcgatgccctctacgcccagaatctgagccaggcggcggacagctcccggcacaaccaccacacgcaagccctcatcccgaacgatattaataaagacgtgcctttgaatcatcgattgccttcacccgaagaacagaccaagcagattgccttaaagtgagtaatttaaataataacctaaaatttggatatatatacacattaagcaaaatacgcttaaaaactaggtagaacaactactgtgaaattcaggaatctcaaagtataaaattcgtaataattattctcctaaacttaacgtgcaacagtttgagattcactgtgccttacttcacgtacagttttatgagatctggcacattgttttttcctctttttttttccaattttaaacatgattttaatgggttttttatgcaaatttcgcggcaactattgtttgttttctgtttcatgacgcacaaaaaagaatagctattaacagcatggctcgcatagctatacatttttccaacgttcaattgtctgcgtttggagcacgagatgtttgctcatcgagcgcatcggtcgaaaacaaaaaatgcttaaataaattaattcaattacgtatgaatatttacaatgcggccacacaattatgcaagtgtcgccgacccggccccactctccttcgctcaaccattggatccattggatccacggacacacccctccaccgatttccatcgccatctccatcccggccatggctcatttgttcggctttttaaactccgaaatggagcagccacatacgagccgtattcacgctccaccgatttggagcacaaaaaatgtggttggctgggctggttggtattaaagcgtaaacaaattgttgtttggattaccacaaaagtgcacttcaaactgcgcgaggttcccattccgccatcagatcgatcacaacaacatctgcaggcactcagaaaaatatctgcaccgctttgcataactcaaaaacgtgctaaatattataatgaaacatattcttcattaaaagtataggaattattttcaataaattatgtttttaaactcattataagtatttcaaatccagtttttttcggtaaacagactaacacagaagccagaagatttaaagaacataaatatgtatttaatgctcaaaatgctttgaccttctaagccttatatttatgatatgcgaatgatttttaagcgaaattacagttaaaacttattatctttttgagaatatttcaattcaaatccaactagtggtgctgaaaccacattgcacaactgcatttttcgtaccagagagtttttagggcagatcttatggattatataatcctctaccatatatcattttcaaagcatgattgattgagtttctaaacgatctacacattcttccgcccacaacagataccccgccgaagtgatttcggtgaacaccagcggtaagcacttccagcggatgtgtgcggctcgcaagtcgaccagtggaggatacgcaggtggcgccaccgccggatcctcgagcagcacatcgccggagaacgccggccaaacggagggcaacaacctggacgacaatgtgcagacggtgagccggaggtcaagatcgcgcaaggtgcgcggaaagcggcggaacacgatagccggaatcgatcagaaggagatccaggatgcggctaatgggtatgtaatcgtgtctatctaccgatctatctgtctatatgtgctcccacatggacaggtgtcacctgttccctcctttcccaccttcgttcgcctatcgaactgtacaaagggcatactaaactcgtataaccatgtgtacatacaccctggagagattcttgcggatctgtccagagattcttcccatatactcgtattatccgacctattctcaattgcattttcttatgagattattgtgatcagcccagttagctgaacgatttgttatgctgtttagttttcttcgtttgcctaatttcgtgtactttaattgcgcccttttattgtttaaacaaatgcctggccgagtgtacaaatcgatgttttgcgccattaactattagcgtatatatattgtttacccaattagcagcacaaattgcatgccaccaactgaatgtctctaaatcacgattaaaaactaaaaaaaaaaaactgaatgttgtacaaagaaaattgtaaataaattgtgttattagctagctatacgtaattagaaactctagccaaattcaaattttcagccgccttttttgcgaaattaagttcgaaaccgattcggcagcggaaactaaagcctttttggatgattttcaaaagcgaatttgcaaaacagcctaacaaattaaacaattttcagcagccacaaaaatacaataatattctcttaacacacacatacacacagtcatacatttcatgatccatccgagacacccaccctttcgccgcccccgcattgttatcctggtcgcgaaccacccacacacgtcggcaacatttgttgccagcaacatgcgacatgcagcatgcagcactcgactctaggttgttggcccattctgtcagtcaggcggcccactctcggccatttctggtgcatcatcagcataaatcatgcgagaggctggttccgtaggatttgctctgccaagacccaaaggctaaccgtgccccccccggcaacaccagcaacatacgaaatgttttgggtttgttttacttgggctcactgcttttctgcttttcctgtgcttttcaaatggcacacacgacgccttttgctaaaagtttcataaatcttattttgttttgttggcccgactttcggttggcgtctgcccaccaactccaactcaaactcagtccccaactcggcgacggcgtcattccatttgactgcgttctacatactatatagagtatatgtgcaacttgaaaccccaactcactacatacatatatgtatgtatgtatgtacgggtgccccattatgtcaatgctgttcgatatctgtgcgatcagcagtcgaaaaagcggagcacagcgaaaacgttgagccctgtccagtggctgccaaactgtaagtgcatttcgtgattgtttatttctgtttgtacacaaagagaaatgctctaaattatagaaaaacaattgttgaacccccaattttcttatatatcagaaacgccttgatttaaacttgctttcgattacctctaaagatgtaagttactcaaataatattaaatatttttaataaattcaaaaggggtttctttctgtttactgagatacagtggaaatgttttagcaatgactgcactttgggcacccgcccctctttaaatcaccgaaatccccctgattcaagttgtttgctggcccagaatcttatcgccaatatagtgcctctccacttcccgatcgctcccagcatgcaacacacttttgtggggaaagaattccgggagaatttacccactcgaaaacttagatgttgtaatcgcctttaataatccactgaacagccgcagcagcgtgggggaagatgaaaatggaaaaatataaatgtatttgggaaaattaaactttgaactgcgccattaattagttctcagtctgttgttgttattgttgtttttagccccaggcacgtcgtgtattttgcatctgtgtgtgcgtgcgtgaaattaaccagaaccataaattaaaacccaaatcaaaatcgaaatcaaacatcatgtctgaaaattgctcacaataattttcacgaggaaggcaaatctgtactactcactctctctctctctccctctctctgtcactcactctctgtctctatcgctctgcccctcttcatctcttcactggcacatgtccatccatcattaccaaaaatgctaaccaaataccaaacatattttctcttttatgttctctcctaaacacaatacatatttgcacaaacgaacaaacaaatattccacaaaaaaaaattccaccatgtaaacagcaatggggagtccaagaatgcctcaaatgccacatctccggtggctccagctcagcaggcggagaccacctcgtcggatgccaagaagtccaagaagttcggacgcagcaagtccagtgacatattaaaaaaggaatctgctgccttgccctacgacaagggaaagagcaccctcacccggctgaattccctgaagcagtggggtcgcaaccgcttcaagttcatgcatcgtaccggcgaactgggcgaccagttggacaccagcggctgcagctcccagaacagttccgcggagaaggcggacagccatcatggttcgccggcgggcgacaattccaaacgcgacatcgacgacgaatgcgtggtgcatcatctggtggcccagaagagtgaatctcggttttcgcacgaacgaaagccctcgtattcctcctcggagaagagcattagtgtgtccagcagtggccagctcaggggcagactgcaattatcatccggaccgatggcagcggcccatgtaaagatgcgggaaacagccactctgaacaggcagcgacgaaacggtctacatgcactggctggcaaggaggagcagccgcattcctcaagcggcaactggagtgccagctcggaatcgggacgcgcctccattggcagcgagatcaccatgcagccgaagtcgagtgcctcgagtacatcgttaaatgtatccagttttcagccaggaggagcgggcagtggcccaccatcctccatgctgagcagaaggagattcctgaacacctccgcctccagcagtgtgacgagtgagggcactgccacgccggaactgcaggcggaggcaggtgcctatccaggtcacctagatgatgagacaagttccgcttacagctgcgacacagagggctactacacatccttccacatggacagcggtcttcgaacgctgaaggaagaggagccatccgtgatgcccggtaccccgctccagacgagcctgcacaccagcagctactccttcggtagccagtccaatcaaacagtgctcaatgcggagagcgagtatgagctgttcggcagaggatccacctccacgacaacgagctccgcgggcaccgtgtgcacagctctgatgagcggtgccgcctctgggccggatgtgcccgagcggagtagctcgctgggcaagcacagtggtcagagccggagccagagcaccagtgccagcagcagcacgctggagaggagctacagcagcagtaccatcggaagcactctggagcgcacgggaactatcaagaggaatgtcaagatgtcgccaaccaaggcaggtggtgaagtgacggagaaggatgaccagcaggaccaggatcagcaacagcagcttgagttctccgagagctccgatctggagggcgtggaacgcatagagcggatcaagcagaagacggccctcacctccaagagaataccctcgatgtgcatcattacgcccacaacgagtgacgacgatgagcaccagaccaatgatccgaatcgcacgctcaccagtctcaccatcgatgtggagcacggggagcaggacgaggatgaggcggagcaaaagacgcccacgaatagcaaggaccacaacctaaacgaactgaagcagacgcccacgaaagcgctgagcgggatgttcgagaaactgagggtgaaactggttccgggcaaaagctctccggccaagaatcaaatgcaacccaagcccgccaactcgagtgccgtgaatgacgatgagctttacgatttggccggcgagtacgtcaccatagcagacatcagcaacaacaacaacaacaacaagaacattgggcgacgtaacacgggaatgggtatatactattccaatgacatagtttccaagagggttgaaccatcgacgtctgccgtttccgagtacgtttcgctaaacgagctgccacagcacttgcgtcggcacgcggtctcgtcgagatccgctcctgcagcggagagcgagtcctgcgcacaacaacagctgcccgtcgagccggcagctgcgacgtcccaaccaccaccactacccctcggcggcaggacgcagggggtgggcgatggggtgcccatgtacgcggaaatcggcgaattgagcgaagagaagccgctcgcatcggcggcaaatcgtcgactgcgcccgaatgccgaggggaaattggtctacgactccgacagtctgaagcggcgcaagggtgcacacaccaccttcgcacctgggccgtacgtgaaggaaaccgaaagtgcgctccacagtgctgaaagtgcagcggcggcaatagcatcgtcacaggatccatcagcagcatcaggagccattagcagtaccaagagcgccaagctcctactgctcaccagcggcggattaatctctggcaatcgcaaggtggccaacgtgaggcccattgtggccaaatccccgctcagcaggaacgtcagcgaaatggcaacctaccaggcaaccagctaccaggaccagaaacaactgctggccaaccgaacaaatcccttctacgagaccattgccgcacccgtggccaatctgatgatgccctcgccgtcgggcaagtccaattcttcgacgggctccacagccaccagttcctcctcatcggcatcgggtcaatccggtgaagaaggtaagccagagcggctcccgtcagccagcagccgcccctcagcttgcttacccacaactaaatctcaatccgaatccctatccttatctgcatccggtttccctgtaaataacactgccaccactgaaacgtctgccaagagcacccttaatcaccacatagccaccaagtcagcgggcagcatatcaagtgtaagggagcatcagccccagcatccaaatcagaaccccaaagatggcgagtcgaaagtgagggttgttgaaatggaaactaccaccctgggggatgcgttcgaaatgggggaacagcaagggccaccccttccgccgagggcgaaagttaacgacaaacagcaccccaccaagcccctatcgattgacccaattgcgctgcacttttccatcgctggcaatcccggccagccgcgcaccgcactcaagcggaacaacagctaccggttggccaacgatgagctcaaactggagatgaacaaggagaatctctccgtgtccttcggctccgagagagcacctagttcgggtgcaatgcccctaagttccgtgcatcagcagcacgcaacaagttcccttaggctgcgcaacctgagcaaccacctgcccaccaacacccactcacctggcggggagcggcggatagccaagtcctttgagcgcctggtggacgagttctcgctgtcgttaaccacgggtaacgattcctcctatctgaagaacaagtcgctcgagaactttgatgactcaccagccctgttgtccgtagcttcgcctgaacaaaggccagacaagaacgcctcaaactcctcagattccgaatcggaggatgacgaggaggagttggccccgcctctgtcccagtccctgccagccccaaagtaccacaagtcctttgtggacagtgtgctgctgcgcccgttcaaaatcatcctgcccagcgatgagaacggcaaccgtcgccagcgcattctacagaaattcgaggttaccgagatatggtagttagaccgtcctggtcgactcttgagcaaacactaccacccacacaaaaccctaattgccgagattggcacggctcaaaggagcgccggaccctttagccacccatgtagtgatgtagtgtgtgggcctcattaaagttgcatgcacttggccagaactgtgcgtgttcaatgggccaagatatggcgggggatctgatggtcctgtcctggggttcaatgttcacacttgatatgctccaagctgggctcctatttaaaagttaatttccctgaaatacacacatgcataattatacttacatacatataaaccagctggctttcgaaatttaataacctgcgctgtttatacagtttgtactccaataacgttatacggaactgaaatatacactaaacatattcttactcacaaggttttgtttttaaatcccagcgtgtgtataaacaaagtattattgcctttcgtttttaattttctccaccgacttatgctcgtttaattagttatgtgttttgttcttaacattagaattagtgaataatacgtgttaattgtttacccataagtatgtttgtaactaattataattaacataaaccaacacatgattattgtaaattttgtaaagttttttgcaccgttcacgtcttgtacatccacataaagctcaactataacgaatattacttaagtttaagttccacgactatgatgctaatttttcgagtttttaatttcaaaattgcctactcatttttctaaattatacggagtgtgaggcgtgcaaaagacttctattgcattttcttaaccaaattgcttgtgtgtgtttgtatatgttatagagtagtagtagttgttttttgcacaccccgtccgactaacgaatgataagttgtagttgcacgagtagctgaaagattagcacatggcccaaacaagttaagttcttggctaagttcaaccacattccataaacgaaatccaatttaccaacgatcgtaagtaatgtttaaaatacgagaataaaaacgaaaaaaagaaacgaaacgaaaattcggcattgacattatcattggcatttggttcgcggtaaaaggaagccccatacttacagtcgaaccatcccatccaaaagcatttaagcatccaccaccaccacactcgcaaatatacatcccagcacccatgcaccaattggtatttgtaaatattcgctcagttcattggaacttgggattgggacaccaaggtaatgtcatccgaaagacccaggtacgtatggaactgcttgccccgaacgcttgttatatttgatagccctaacgatctgcacttgaaaccgcttactaatctcaagaggaatattggttacgaaaatgagaatggactctaatccgcgcaatcattcttctatccgcagggtatcaacgtttctctaatatctatgagcaagtgcagccagcaccgagcacccagccacaggaagatgcgactgccacgcccttccagcgcagtgcgcccatctattggacactgcagaatcgccgcagccagccaaggccacagcccgctggcaacgtgacctgccgggatgacctctacgccacgcccattcgacgggccgaccgactgccacgcccagtggctgctgctgcggcaacagcagcggaaggcaacaggagcaacatatcgccaattgtgccaaggaatcgttcgggagccttcctcacctccacgcccacgaggagcggagagggtgaacgcgattcggagaacacacaacttccccccatgaagcagccatcccgcaactggaccgatgacgcacccgaacgcctcaacacctgtgcggatcgcattggccaaagcaagaccacgctaatggactttaagaagctgctgctggccaagtccgccaaggcgagtccggtccaaaggaaggtatccgccgtggagctgctgaagaagccagcccaagccaccgcaacgccgcccgttgtaaagcccagtggccctggacagaaggtagcatcagctggaagcaaaccaacgatcaacaccagcctaaagctgctagatctgagcggctcacccaagactttcgccaaccggaggatgcttcggcaaggccagtttggatcgccctccaagacctttgctccaaagatgcgaggacccgtgaatatggtggctgctgcagcggctccaccgcgaactgacatcatgtccaccacgattccggaggcgaatagcgaggaggatcactccaacaccagcggaggatcgcgagccagttccgaggcgggcgaaacggtgccctccagcttcgacttgaagcggaacttctttttgcaaaccgaggagaacaatttcatgcgcggggagctgaagcccagctttgccaggtcaaatggagcagccggaggtggcagcaccgaaggcgtcaacaagtacgtggcagctccggtggcgaatcctccgctgccctcgtttgaaacggcgttgtagagcgggtctaacccactctagctgtcgcaagctataatacatattccataagaaaagatacccataatcagatgagcaattcccttccgtagccaagccgaaactgcatttattgacggacggaaacgagtcagaagcgatgctactttatgcaacatatacatatatcactatatatacacaacacctttatacaataaactgtattttttaaattgtgctgcttgtataaacggagatgttttatacacgaatacgaatcgtctgtacacctacaatatatttatttgtaattttacgttatttattgcaattatgtattacgctacacgcattgctctttgttttgtagtacacttgtacgtctacgaactgatgagaatcgcttattgattaaaagaaaaaacattagataacacttgaaagctactggcgtatcttatttgggtggtttatttgtgactacacaatttggaaagatagtgatagctccaaaagaaatcgtttactttctcaacttatcagaggaatagattattgcctttcagtctcctttaaacaagaatttagattgacatttgtttaaatttctttgacatttatttttagtgtatattatctatatttatgaatattaaatatttgggtatttagcgtttatgattcggttttaaaggggtagacaaaaatgtataatatatggaatgcctacgaattaactaattttaaaactaaaggactaaattttgatctcgaagctatcaactttctaatacacacttgcgattaccttttggaaaatacttttgggtttgtttagttacatacgtgggttcctaaatccaactgcgtcccagactgccagacctgcgtttggtggacttttctcccagagaactggctgtctggtccttgcgccccatcacaggcgagctgcccgatccaatattacggattaactgcttaaggctgcgcgcctgtgcgtcgctggcctggctca

SEQ ID NO: 41144 - DNA, 4428 bp, DROSOPHILA
atgtttcaactctttcctccctccttgcatccctttcagcccgctgccattgaggatttgcggaagtggacgtccagcgaggcgctgggtgatgtcaccgtcacgccggattgcatgcatcacgtggacacctcggtgagcacatcgctggccatcggcgagaatggcatcctgaccccggcgctgtcaccgtccgtcctatccgccgatgccgtcgatgccctctacgcccagaatctgagccaggcggcggacagctcccggcacaaccaccacacgcaagccctcatcccgaacgatattaataaagacgtgcctttgaatcatcgattgccttcacccgaagaacagaccaagcagattgccttaaaataccccgccgaagtgatttcggtgaacaccagcggtaagcacttccagcggatgtgtgcggctcgcaagtcgaccagtggaggatacgcaggtggcgccaccgccggatcctcgagcagcacatcgccggagaacgccggccaaacggagggcaacaacctggacgacaatgtgcagacggtgagccggaggtcaagatcgcgcaaggtgcgcggaaagcggcggaacacgatagccggaatcgatcagaaggagatccaggatgcggctaatggcaatggggagtccaagaatgcctcaaatgccacatctccggtggctccagctcagcaggcggagaccacctcgtcggatgccaagaagtccaagaagttcggacgcagcaagtccagtgacatattaaaaaaggaatctgctgccttgccctacgacaagggaaagagcaccctcacccggctgaattccctgaagcagtggggtcgcaaccgcttcaagttcatgcatcgtaccggcgaactgggcgaccagttggacaccagcggctgcagctcccagaacagttccgcggagaaggcggacagccatcatggttcgccggcgggcgacaattccaaacgcgacatcgacgacgaatgcgtggtgcatcatctggtggcccagaagagtgaatctcggttttcgcacgaacgaaagccctcgtattcctcctcggagaagagcattagtgtgtccagcagtggccagctcaggggcagactgcaattatcatccggaccgatggcagcggcccatgtaaagatgcgggaaacagccactctgaacaggcagcgacgaaacggtctacatgcactggctggcaaggaggagcagccgcattcctcaagcggcaactggagtgccagctcggaatcgggacgcgcctccattggcagcgagatcaccatgcagccgaagtcgagtgcctcgagtacatcgttaaatgtatccagttttcagccaggaggagcgggcagtggcccaccatcctccatgctgagcagaaggagattcctgaacacctccgcctccagcagtgtgacgagtgagggcactgccacgccggaactgcaggcggaggcaggtgcctatccaggtcacctagatgatgagacaagttccgcttacagctgcgacacagagggctactacacatccttccacatggacagcggtcttcgaacgctgaaggaagaggagccatccgtgatgcccggtaccccgctccagacgagcctgcacaccagcagctactccttcggtagccagtccaatcaaacagtgctcaatgcggagagcgagtatgagctgttcggcagaggatccacctccacgacaacgagctccgcgggcaccgtgtgcacagctctgatgagcggtgccgcctctgggccggatgtgcccgagcggagtagctcgctgggcaagcacagtggtcagagccggagccagagcaccagtgccagcagcagcacgctggagaggagctacagcagcagtaccatcggaagcactctggagcgcacgggaactatcaagaggaatgtcaagatgtcgccaaccaaggcaggtggtgaagtgacggagaaggatgaccagcaggaccaggatcagcaacagcagcttgagttctccgagagctccgatctggagggcgtggaacgcatagagcggatcaagcagaagacggccctcacctccaagagaataccctcgatgtgcatcattacgcccacaacgagtgacgacgatgagcaccagaccaatgatccgaatcgcacgctcaccagtctcaccatcgatgtggagcacggggagcaggacgaggatgaggcggagcaaaagacgcccacgaatagcaaggaccacaacctaaacgaactgaagcagacgcccacgaaagcgctgagcgggatgttcgagaaactgagggtgaaactggttccgggcaaaagctctccggccaagaatcaaatgcaacccaagcccgccaactcgagtgccgtgaatgacgatgagctttacgatttggccggcgagtacgtcaccatagcagacatcagcaacaacaacaacaacaacaagaacattgggcgacgtaacacgggaatgggtatatactattccaatgacatagtttccaagagggttgaaccatcgacgtctgccgtttccgagtacgtttcgctaaacgagctgccacagcacttgcgtcggcacgcggtctcgtcgagatccgctcctgcagcggagagcgagtcctgcgcacaacaacagctgcccgtcgagccggcagctgcgacgtcccaaccaccaccactacccctcggcggcaggacgcagggggtgggcgatggggtgcccatgtacgcggaaatcggcgaattgagcgaagagaagccgctcgcatcggcggcaaatcgtcgactgcgcccgaatgccgaggggaaattggtctacgactccgacagtctgaagcggcgcaagggtgcacacaccaccttcgcacctgggccgtacgtgaaggaaaccgaaagtgcgctccacagtgctgaaagtgcagcggcggcaatagcatcgtcacaggatccatcagcagcatcaggagccattagcagtaccaagagcgccaagctcctactgctcaccagcggcggattaatctctggcaatcgcaaggtggccaacgtgaggcccattgtggccaaatccccgctcagcaggaacgtcagcgaaatggcaacctaccaggcaaccagctaccaggaccagaaacaactgctggccaaccgaacaaatcccttctacgagaccattgccgcacccgtggccaatctgatgatgccctcgccgtcgggcaagtccaattcttcgacgggctccacagccaccagttcctcctcatcggcatcgggtcaatccggtgaagaagggtatcaacgtttctctaatatctatgagcaagtgcagccagcaccgagcacccagccacaggaagatgcgactgccacgcccttccagcgcagtgcgcccatctattggacactgcagaatcgccgcagccagccaaggccacagcccgctggcaacgtgacctgccgggatgacctctacgccacgcccattcgacgggccgaccgactgccacgcccagtggctgctgctgcggcaacagcagcggaaggcaacaggagcaacatatcgccaattgtgccaaggaatcgttcgggagccttcctcacctccacgcccacgaggagcggagagggtgaacgcgattcggagaacacacaacttccccccatgaagcagccatcccgcaactggaccgatgacgcacccgaacgcctcaacacctgtgcggatcgcattggccaaagcaagaccacgctaatggactttaagaagctgctgctggccaagtccgccaaggcgagtccggtccaaaggaaggtatccgccgtggagctgctgaagaagccagcccaagccaccgcaacgccgcccgttgtaaagcccagtggccctggacagaaggtagcatcagctggaagcaaaccaacgatcaacaccagcctaaagctgctagatctgagcggctcacccaagactttcgccaaccggaggatgcttcggcaaggccagtttggatcgccctccaagacctttgctccaaagatgcgaggacccgtgaatatggtggctgctgcagcggctccaccgcgaactgacatcatgtccaccacgattccggaggcgaatagcgaggaggatcactccaacaccagcggaggatcgcgagccagttccgaggcgggcgaaacggtgccctccagcttcgacttgaagcggaacttctttttgcaaaccgaggagaacaatttcatgcgcggggagctgaagcccagctttgccaggtcaaatggagcagccggaggtggcagcaccgaaggcgtcaacaagtacgtggcagctccggtggcgaatcctccgctgccctcgtttgaaacggcgttgtag

SEQ ID NO: 41145 - protein, 1475 aa, DROSOPHILA
MFQLFPPSLHPFQPAAIEDLRKWTSSEALGDVTVTPDCMHHVDTSVSTSLAIGENGILTPALSPSVLSADAVDALYAQNLSQAADSSRHNHHTQALIPNDINKDVPLNHRLPSPEEQTKQIALKYPAEVISVNTSGKHFQRMCAARKSTSGGYAGGATAGSSSSTSPENAGQTEGNNLDDNVQTVSRRSRSRKVRGKRRNTIAGIDQKEIQDAANGNGESKNASNATSPVAPAQQAETTSSDAKKSKKFGRSKSSDILKKESAALPYDKGKSTLTRLNSLKQWGRNRFKFMHRTGELGDQLDTSGCSSQNSSAEKADSHHGSPAGDNSKRDIDDECVVHHLVAQKSESRFSHERKPSYSSSEKSISVSSSGQLRGRLQLSSGPMAAAHVKMRETATLNRQRRNGLHALAGKEEQPHSSSGNWSASSESGRASIGSEITMQPKSSASSTSLNVSSFQPGGAGSGPPSSMLSRRRFLNTSASSSVTSEGTATPELQAEAGAYPGHLDDETSSAYSCDTEGYYTSFHMDSGLRTLKEEEPSVMPGTPLQTSLHTSSYSFGSQSNQTVLNAESEYELFGRGSTSTTTSSAGTVCTALMSGAASGPDVPERSSSLGKHSGQSRSQSTSASSSTLERSYSSSTIGSTLERTGTIKRNVKMSPTKAGGEVTEKDDQQDQDQQQQLEFSESSDLEGVERIERIKQKTALTSKRIPSMCIITPTTSDDDEHQTNDPNRTLTSLTIDVEHGEQDEDEAEQKTPTNSKDHNLNELKQTPTKALSGMFEKLRVKLVPGKSSPAKNQMQPKPANSSAVNDDELYDLAGEYVTIADISNNNNNNKNIGRRNTGMGIYYSNDIVSKRVEPSTSAVSEYVSLNELPQHLRRHAVSSRSAPAAESESCAQQQLPVEPAAATSQPPPLPLGGRTQGVGDGVPMYAEIGELSEEKPLASAANRRLRPNAEGKLVYDSDSLKRRKGAHTTFAPGPYVKETESALHSAESAAAAIASSQDPSAASGAISSTKSAKLLLLTSGGLISGNRKVANVRPIVAKSPLSRNVSEMATYQATSYQDQKQLLANRTNPFYETIAAPVANLMMPSPSGKSNSSTGSTATSSSSSASGQSGEEGYQRFSNIYEQVQPAPSTQPQEDATATPFQRSAPIYWTLQNRRSQPRPQPAGNVTCRDDLYATPIRRADRLPRPVAAAAATAAEGNRSNISPIVPRNRSGAFLTSTPTRSGEGERDSENTQLPPMKQPSRNWTDDAPERLNTCADRIGQSKTTLMDFKKLLLAKSAKASPVQRKVSAVELLKKPAQATATPPVVKPSGPGQKVASAGSKPTINTSLKLLDLSGSPKTFANRRMLRQGQFGSPSKTFAPKMRGPVNMVAAAAAPPRTDIMSTTIPEANSEEDHSNTSGGSRASSEAGETVPSSFDLKRNFFLQTEENNFMRGELKPSFARSNGAAGGGSTEGVNKYVAAPVANPPLPSFETAL

SEQ ID NO: 41146 - DNA, 2910 bp, DROSOPHILA
cgagggaggagaaagtcgcctgtaaaccgtgtgtaatcgcttttcattgcataagtttcgataacagcgtggaaaacgtgttgtgttgtgtagtgttctgtgtgcataatttgtattaaaaatatacatgcataagtgaaatgcgtctgctactcagaaattattccctaatggaggccgtcaaaagattgctgccgagaccgcgcaaaaaaatctacaatctaggcgcttgcttcgaactggtggatattcctaaggttaactaaaacatacatttatttgtactctctgcttgaaaggggagttctgtataaagtatactgacttcggggattttattatattgataaattaattttatgtttttgaattttatattatatgttttctttttgattgaagcacaaattagtcattttattattttgtaagaagagaatggctagtgaactgaatatttcgtgtaaccattgcttaagacccctgctcattaaatctagacacgcccgtgacctgtttttatgggggtgccacctgttcgggactggtgctgccacctgatacaaatggcaagcagctgtttaaataatacgcgtaaacaaaacgattttggttgaattagtaaacaaggaaattaaatgatttttgagaggagtgcaataaattactgatgggaaacaaatagacacccacaacgagcgttacctatagacagtgttattttcgttagcattttgaccccctttgcgacgcccatttttgttattttgtgccttacaagtcggccgtaaaaactggccaaaatgataatttaatagactcgccaaagggtcttaagtacaagccggagtgtgccgcaaaatagttgcgcagccggatgaccaatctttaaacttcttacgaacctgccgctattgattgcaaccacctgttgggacacaacactcccaccgccgaacaaaaacactcagccacgtagtcttaagtcagtcggttaaatatgctacatcgaacagctagaatgtggacgctgtgcgtgcagacagctttgatagccaccttggtgaggggatccacttcccagaaggataatctcgtaggaagaacacaggtcaatggagggtaatgcagctaaaccaaccgcctgcttaatatgtgctttcttttaattcaaacagatatcctacaatcccagcgagctctccgagccccgattcctggagtacagcaatctatccgataagctacacctaagggaagccattgacaaaatccttatacctcgagttgtgggcacaacaaatcatagcatcgttcgcgaatacatcgtccagagtttgagggatctagactgggatgtggaagtaaacagctttcatgatcacgctcccatcaaaggcaaattgcatttccacaacatcatcgccaccctgaatccaaatgctgagagatatctggtgctgtcctgccattatgatagcaaatacatgcctggagtggaattcctgggggccaccgactcggcagtgccctgtgccatgctcctcaacctggcccaggtgcttcaggagcagttgaaacccctcaagaagagcaaactgagtttgatgctcttgttcttcgatggcgaggaggcttttgaggagtggggacccaaggactccatctatggagcacgacacctggccaaaaagtggcaccatgaaggaaaacttgatagaatagatatgctggtgctcctggatctgttgggagcccccgatccggcattctacagcttcttcgaaaacaccgagtcctggtacatgcgtatccagtccgtggagacacgtcttgccaagttgcagctcctggagcgctatgccagcagtggagttgcccagcgcgaccccacccgctacttccagtcgcaggccatgcgatcctctttcatcgaggacgatcacatacccttcctgcggcgaaatgtgccgatcttgcacctcattccggtgccctttcccagtgtatggcatacgcccgacgataacgccagcgtgatcgattatgcgacgacggacaacctggcactgattatacggctcttcgctttggagtatctgctggccggaaccgaggccaagtagtcaagtgggcttccgtgtgaatcacaaatgacaaatgttgtatctacttcaggccttatctaattgacctgttccagtatcggagcattgttggaagttcttatgcccgccggaagatccctagaaaaccttgttgtaaccgactgcgtgctttaaaactaataagggaagatctgcaacacgcgtactccaaatatttttatacacatgtatttatagaaaatgcttagctaatgacacgtcaggtttatatattttttgtaatctttcggttgtaaattgtttcacttatgtaagttaactaagttaaccggactgattgtccgcacaccagcaccggtcaaattgctgaccaagcatttggccggaagctcatgcatagccggcagaagctctgcgcattggcagaggccgctatgatgtttttccctttgttagcttatagtcagtttgattttgtattcaataaagagcgcatcgcgccttcaatcaactccagctactgctgttatcattgaattggttggctagccttaagggcagtcaacaacggagagacgttctcccaccatatctcccaatctaggagaagaggtctgcggcaaccgccctgcctcccagtgacagaggaaccccccgttacctgcaacctacgccggagaccgcggcgagggacctgcaccttatatttaattaattggcacccaactccaggaacccacaccactaccctgaatcattgtaagtgggattctcaacttaaacactactccaaactgcgtct

SEQ ID NO: 41147 - DNA, 1059 bp, DROSOPHILA
atgctacatcgaacagctagaatgtggacgctgtgcgtgcagacagctttgatagccaccttggtgaggggatccacttcccagaaggataatctcgtaggaagaacacagatatcctacaatcccagcgagctctccgagccccgattcctggagtacagcaatctatccgataagctacacctaagggaagccattgacaaaatccttatacctcgagttgtgggcacaacaaatcatagcatcgttcgcgaatacatcgtccagagtttgagggatctagactgggatgtggaagtaaacagctttcatgatcacgctcccatcaaaggcaaattgcatttccacaacatcatcgccaccctgaatccaaatgctgagagatatctggtgctgtcctgccattatgatagcaaatacatgcctggagtggaattcctgggggccaccgactcggcagtgccctgtgccatgctcctcaacctggcccaggtgcttcaggagcagttgaaacccctcaagaagagcaaactgagtttgatgctcttgttcttcgatggcgaggaggcttttgaggagtggggacccaaggactccatctatggagcacgacacctggccaaaaagtggcaccatgaaggaaaacttgatagaatagatatgctggtgctcctggatctgttgggagcccccgatccggcattctacagcttcttcgaaaacaccgagtcctggtacatgcgtatccagtccgtggagacacgtcttgccaagttgcagctcctggagcgctatgccagcagtggagttgcccagcgcgaccccacccgctacttccagtcgcaggccatgcgatcctctttcatcgaggacgatcacatacccttcctgcggcgaaatgtgccgatcttgcacctcattccggtgccctttcccagtgtatggcatacgcccgacgataacgccagcgtgatcgattatgcgacgacggacaacctggcactgattatacggctcttcgctttggagtatctgctggccggaaccgaggccaagtag

SEQ ID NO: 41148 - protein, 352 aa, DROSOPHILA
MLHRTARMWTLCVQTALIATLVRGSTSQKDNLVGRTQISYNPSELSEPRFLEYSNLSDKLHLREAIDKILIPRVVGTTNHSIVREYIVQSLRDLDWDVEVNSFHDHAPIKGKLHFHNIIATLNPNAERYLVLSCHYDSKYMPGVEFLGATDSAVPCAMLLNLAQVLQEQLKPLKKSKLSLMLLFFDGEEAFEEWGPKDSIYGARHLAKKWHHEGKLDRIDMLVLLDLLGAPDPAFYSFFENTESWYMRIQSVETRLAKLQLLERYASSGVAQRDPTRYFQSQAMRSSFIEDDHIPFLRRNVPILHLIPVPFPSVWHTPDDNASVIDYATTDNLALIIRLFALEYLLAGTEAK

SEQ ID NO: 41149 - DNA, 2639 bp, DROSOPHILA
tccagccatgttggctggctgagtgcaaaagtcctgcacggcacactgatccctgttggtcagggaggcgaagtccttgtacagcggagcctctgtaagagttgtcggcgtgagaaggatgtccacgcgctcctctttggccgaggaatcaaacacccttgcaaagtcctctgcaataaggcggcgcacccgcaaagccttctcaaagtagtgatcatagttctttttcagcagcagaaagtttccagtgagtatgcgtgtcttaaccacatcgttgaatccctcggccctggatagggcatacaattgctccgtgctgcgctcgtctgttgcccgatggccgtactcgattccatcgtaccttgccatgttgctggccacctcgcactgattaagaatggtgtacacgaatatacttgctgccgtattgggcagggaaacctgtctgacggaggcaccgctacactccagcaaatcggccaccttagaccacgtttccagaacttcggcggaaagaccgtggcaatggtattcctttggtattcctatgcgcacagtgctcaggtcaatttgcccaacttccggcagatgtaacctggtaaaaggctgcctgatggttgtggagtccagtttatccggccctgccactgtattcagtaccgccacgcaatcgctgacggagcgggcaaaaatgccgggcacgtccatggaattgaccagcggaataagaccgtggcgggagacgaggccgtaggtgggctttagacccaccacgccgcagtacgaagccgggtttcgggtggagccacccgtgtccgaaccaattgctctggaatatagaagagaaaattaagaatatattttaatatttatttcgagcaaagtttctaggaattcaaattaaaacggttctaggtaaaataccgaaaaaataccgcatcgagtggctaccctctcggccagctgacaaattgcagcaaacgttcacactgcgcagctgtcagaagtccagcgatcaagggaaaactcgattatttacgaaatttgcgactgaaatttcttccccaacgcgatgtctgcgctgttccgtctgaccaaccgcgccgtggcgctgcagcgttccctggtcgccaaccaggcggcagtggtgcgggcaatcaacacgtcgccgaagaaggatgagaccatcacggcccccacttcacttacgaccgaggactttgccaatccgagtcccaagaactggcagagctacggattcgactacaaggaccaggtggaggatcgcaaggccaccaagtcgacgttcttcgttacggtgacactgtgcctggtgtggggcagcttctactgggcctacctgcccgacactcagttccgcaactgggcccagcgtgagggcttcttggagctgcgtcgccgcgaactggccggcgtggatttggtcagccccaactacgtggaccccgccagcattacactgccctcggacgaggatctgggcgacaccgagatcatcatctaaacatttagtgaccctaaacttagtctgttatgtaatgcgaatgcgaagtgcggtcagtgcgagtccgctcataatccgttaataaatctgcaagtctcgccgtggacacagctgctttttagccctcggatgattaattttgatcaaatatgttacattttcaaccatcgcgtttgaggttaggtgttcaaaacataaacaagctagtacgtacgcataacaaagacccgcggctacggcggatgcagagcctccagaactgccgcccgcgatgcgccagtgatccttgttaaggtcctcgctccagatgttcttagtcggcccgtacagggagtccacagtgccggcgcccatggcaaactgatccatattcgtcttgcccagaattacagcgccggcttgtttaagtctggagcacacagtggcatcatagggaggcacaaagtcttgcagcatcctggcaacgaaggctacaaggataatattgctctgatgctgggttctcatggtctcctaccgtgaggcacaggtggtgtgtacatctttggtgcaaaagttgtccttgatggcaatggtgactccatcaagatcactaatcggttgccttagcttatagcgctgctccgcgtcctgggcctgctgccccgcctgttccggcgtgaggcgcacaaaggcattcagtgtcttccaccgcagggcatcttgcagagcatcttcggtcacccggcgaggagacagctgaccatctgagtaactcgctgttagctgttaggtatactgggttaaaagtggtttagatgaatgatgaataagcccacctgcttaatgctccactgtaagtgacgccgcattcttttcagtttgaaagcagctggattttaacttattcacccaattttcggagagcaatccgcggaagaaatcataacaaataaattcaagttgcaggaatggcaaacttatctggtattttagtttttttggcacagaatatctggtcacaccaaagctcagaggagtaacttaagggatttagcttatttagacgctaggcccctcaaaatagttttgtctaactacgcccatgcaatcggcagctgttattgattagagg

SEQ ID NO: 41150 - DNA, 639 bp, DROSOPHILA
tcagaagtccagcgatcaagggaaaactcgattatttacgaaatttgcgactgaaatttcttccccaacgcgatgtctgcgctgttccgtctgaccaaccgcgccgtggcgctgcagcgttccctggtcgccaaccaggcggcagtggtgcgggcaatcaacacgtcgccgaagaaggatgagaccatcacggcccccacttcacttacgaccgaggactttgccaatccgagtcccaagaactggcagagctacggattcgactacaaggaccaggtggaggatcgcaaggccaccaagtcgacgttcttcgttacggtgacactgtgcctggtgtggggcagcttctactgggcctacctgcccgacactcagttccgcaactgggcccagcgtgagggcttcttggagctgcgtcgccgcgaactggccggcgtggatttggtcagccccaactacgtggaccccgccagcattacactgccctcggacgaggatctgggcgacaccgagatcatcatctaaacatttagtgaccctaaacttagtctgttatgtaatgcgaatgcgaagtgcggtcagtgcgagtccgctcataatccgttaataaatctgcaagtctcgccgtggacacagctg

SEQ ID NO: 41151 - protein, 150 aa, DROSOPHILA
MSALFRLTNRAVALQRSLVANQAAVVRAINTSPKKDETITAPTSLTTEDFANPSPKNWQSYGFDYKDQVEDRKATKSTFFVTVTLCLVWGSFYWAYLPDTQFRNWAQREGFLELRRRELAGVDLVSPNYVDPASITLPSDEDLGDTEIII

SEQ ID NO: 41152 - DNA, 3244 bp, DROSOPHILA
gcgaatgcgaagtgcggtcagtgcgagtccgctcataatccgttaataaatctgcaagtctcgccgtggacacagctgctttttagccctcggatgattaattttgatcaaatatgttacattttcaaccatcgcgtttgaggttaggtgttcaaaacataaacaagctagtacgtacgcataacaaagacccgcggctacggcggatgcagagcctccagaactgccgcccgcgatgcgccagtgatccttgttaaggtcctcgctccagatgttcttagtcggcccgtacagggagtccacagtgccggcgcccatggcaaactgatccatattcgtcttgcccagaattacagcgccggcttgtttaagtctggagcacacagtggcatcatagggaggcacaaagtcttgcagcatcctggcaacgaaggctacaaggataatattgctctgatgctgggttctcatggtctcctaccgtgaggcacaggtggtgtgtacatctttggtgcaaaagttgtccttgatggcaatggtgactccatcaagatcactaatcggttgccttagcttatagcgctgctccgcgtcctgggcctgctgccccgcctgttccggcgtgaggcgcacaaaggcattcagtgtcttccaccgcagggcatcttgcagagcatcttcggtcacccggcgaggagacagctgaccatctgagtaactcgctgttagctgttaggtatactgggttaaaagtggtttagatgaatgatgaataagcccacctgcttaatgctccactgtaagtgacgccgcattcttttcagtttgaaagcagctggattttaacttattcacccaattttcggagagcaatccgcggaagaaatcataacaaataaattcaagttgcaggaatggcaaacttatctggtattttagtttttttggcacagaatatctggtcacaccaaagctcagaggagtaacttaagggatttagcttatttagacgctaggcccctcaaaatagttttgtctaactacgcccatgcaatcggcagctgttattgattagaggagcgataaaagtccagccacctcaaatattgacactaggacaagctcgagggccattaagttatctaacatcaatcaattgctcaaaatcatctggtaggcctgttactatagcgggcaaagacgtctctaaaacctcaaagagttccttaagcatggccaagttggacgaaaagatcggcttcatcgggggcggaaacatggcctacgccataggatccggactggtgcgctgtgggatcgtgaaggctagccaggtgcaggtctccggtccccacattgagaacctgcaacggtggcgggatctgggagctgtgacctgcgacgacaactgcatggtcctggagcactcggacatagttttcatctgcgtaaagccacacatgctaacgccgtgtgccgcccagcttaaatacaagcacgtgccgtcggccaaggatgccagcaagctggtggtgtcggttctggcgggtaccagtctcgaaacgctggaggaggccttcagcttcatgggcagttcggagctgaaggtgatacgcaccatgcccaatacatccatgcaggtgggcgagggctgcactgtttacactggcaacgcacgcgtttcgcatcacgacttggaaaagattcacctaatgctcaacgccctgggactggcgcaacaggtgcccgagtccatgatcgacgccgttaccggggtagctggatgcggtccggcatttgtttacaccatcatagaggcactggccgatggcggcgtcaaacagggcgttccgcgtcagatggctcttcagtttgcggctcagacgcttctgggagcggccaaaacggtgctgctcactggaaaacatccggcggtgctgcgggatgaagtctgttctcccggtggcgccaccatagtaggcgttcatgaactggaaaaggggaacctcaggtgggtagccataaagttgtacattacactgtttttttattgctttctttcgtgctttcaggtctactttaataaacgccgtggaaaagtcgtcacagcgctctgctgaactgggaaagaagtgaaaatgtaatcccccggaacatccccttgctctctacacatacatatagttaaacgcttgatattgttattacaataatgactaacataaagctcaagtttattcccgatccttcttgctgacgtactccacgcacttggagggatcggtgggaaagtactcttggcacttggtcatcagtcgtttgagaccctggatgtacttccgttgtgtttcatcgttcattacgtgggctacgtttttggagaaaatcttttcgcgacccgtacgagcgtggatacccaccatagtgacaccaatgggccaaggcgcgtttccgatggccatttctaggtaggcatcgcttgctgtgatatagttgcggttgagcaggtgcttgcagatgtctcgcagactgtccagaatgtcctctggcagggtgtgatgctttaacttgcgaaacagcggcttaacgtattccttagtctgcgtgtaaatgacgcgggtcattttcacctttgtggacatcttttcgtgcttgctgtagttggcgatctggtcgttccacagcttgagcaggaaggtgagcagcgtgatgatcacatccatgtcgtagtccttgttgcggcccatatttgcagccattgtctgtatgctctcccacgacacggactcgtcgagctcagcgaagtccgacttcttgtcttccttggtggtgggtgtgttggcgaacatctcctgcaggtaggcggcgtccacctgctccatggcctcctggaaatcgttgcggaaaccgcgatttgcctctggctgcgaaatctcgcattgtcgcaatcggtcaaaggcctcgggctccgtctcgccaaatataaggatgggttcgccgcgttcccttagcctccgaatgacctccgtgcgcggcaatatgttctggccatcggccacaaaactgtacgcgccttcggtcgtttgtccttgtgcctcgacggactcctgctttatgtagcccaccttctgcagcacttcctctgtgttcttggcgttcaggtcaccgcgtctgaagtacttcttcttttcgtccaccagctgcctttgctccagcagcttgcgctttcgcgctatttcagctt

SEQ ID NO: 41153 - DNA, 1183 bp, DROSOPHILA
cttatttagacgctaggcccctcaaaatagttttgtctaactacgcccatgcaatcggcagctgttattgattagaggagcgataaaagtccagccacctcaaatattgacactaggacaagctcgagggccattaagttatctaacatcaatcaattgctcaaaatcatctggtaggcctgttactatagcgggcaaagacgtctctaaaacctcaaagagttccttaagcatggccaagttggacgaaaagatcggcttcatcgggggcggaaacatggcctacgccataggatccggactggtgcgctgtgggatcgtgaaggctagccaggtgcaggtctccggtccccacattgagaacctgcaacggtggcgggatctgggagctgtgacctgcgacgacaactgcatggtcctggagcactcggacatagttttcatctgcgtaaagccacacatgctaacgccgtgtgccgcccagcttaaatacaagcacgtgccgtcggccaaggatgccagcaagctggtggtgtcggttctggcgggtaccagtctcgaaacgctggaggaggccttcagcttcatgggcagttcggagctgaaggtgatacgcaccatgcccaatacatccatgcaggtgggcgagggctgcactgtttacactggcaacgcacgcgtttcgcatcacgacttggaaaagattcacctaatgctcaacgccctgggactggcgcaacaggtgcccgagtccatgatcgacgccgttaccggggtagctggatgcggtccggcatttgtttacaccatcatagaggcactggccgatggcggcgtcaaacagggcgttccgcgtcagatggctcttcagtttgcggctcagacgcttctgggagcggccaaaacggtgctgctcactggaaaacatccggcggtgctgcgggatgaagtctgttctcccggtggcgccaccatagtaggcgttcatgaactggaaaaggggaacctcaggtctactttaataaacgccgtggaaaagtcgtcacagcgctctgctgaactgggaaagaagtgaaaatgtaatcccccggaacatccccttgctctctacacatacatatagttaaacgcttgatattgttattacaataatgactaacataaagctcaagtttattcccga

SEQ ID NO: 41154 - protein, 280 aa, DROSOPHILA
MAKLDEKIGFIGGGNMAYAIGSGLVRCGIVKASQVQVSGPHIENLQRWRDLGAVTCDDNCMVLEHSDIVFICVKPHMLTPCAAQLKYKHVPSAKDASKLVVSVLAGTSLETLEEAFSFMGSSELKVIRTMPNTSMQVGEGCTVYTGNARVSHHDLEKIHLMLNALGLAQQVPESMIDAVTGVAGCGPAFVYTIIEALADGGVKQGVPRQMALQFAAQTLLGAAKTVLLTGKHPAVLRDEVCSPGGATIVGVHELEKGNLRSTLINAVEKSSQRSAELGKK

SEQ ID NO: 41155 - DNA, 2869 bp, DROSOPHILA
gtgtaaatgacgcgggtcattttcacctttgtggacatcttttcgtgcttgctgtagttggcgatctggtcgttccacagcttgagcaggaaggtgagcagcgtgatgatcacatccatgtcgtagtccttgttgcggcccatatttgcagccattgtctgtatgctctcccacgacacggactcgtcgagctcagcgaagtccgacttcttgtcttccttggtggtgggtgtgttggcgaacatctcctgcaggtaggcggcgtccacctgctccatggcctcctggaaatcgttgcggaaaccgcgatttgcctctggctgcgaaatctcgcattgtcgcaatcggtcaaaggcctcgggctccgtctcgccaaatataaggatgggttcgccgcgttcccttagcctccgaatgacctccgtgcgcggcaatatgttctggccatcggccacaaaactgtacgcgccttcggtcgtttgtccttgtgcctcgacggactcctgctttatgtagcccaccttctgcagcacttcctctgtgttcttggcgttcaggtcaccgcgtctgaagtacttcttcttttcgtccaccagctgcctttgctccagcagcttgcgctttcgcgctatttcagctttcagaatatccatgtgattgttatttgtagttaataacaatgtggagtaaccaaaacaaatgccttagattatagtgagaccagactgagaatgtttacatacaagtgcggccactaaaataggtattctattgaatttactaagttttagttatgaaataacttataattagttctataactttaatcaataattagataaatatgtacttcctaatttatttaatttaaatgcatttattagacatttaaattgtatttgagctatatatttttctagtattttttctttggttactctttggtatttccgcagcctggtcacactggctcaaaatcaataaaaaatagacaacattttaggatcggaattcattcataaaggacacaatgccaaagaaaatgggaatcaactcgaaggcggtggaggcccgcgagcgcaaggaggccaccaagaaggccacgcaggagaagaagagcaaggaggcggaggatcgcctgtggcgcgatgacgacaagaatctggccaagaaacaacagcgcaaggacgaggaggagcgcaagcgggcggaggcggccaaacggaaggctgaggccaaagcgctgcttgaccaggaaatgtcatccattaacacgcagcgaaagcagccgctggccaagatcaaccgccagatgattctcgaggagatggagaagaagcagcgcgtaatcgaggcgataaacgaggccaacaagccgatggccgcgcgagtggtggtccaaaaccatatcgaggagaatctgaaccgatccatggccgacacggatgtggcatccaacattgacgaggccatcgtggtgctcaggtgcgttcccttactgaaactttcttatcaatttaaattatcttccattgcatgcaattttagtgtaaatgacagcgaagaggacaagcatcccgagaagcgaatgcgcgccgcctacaagacctttgaagccaacaatctgccccgcattaaggctgagaatccttcccttcgcatgtcccagtggaagcagcttctgatgaaggaatggaacaagtcaccagacaacccattcaaccaggcgcgctaagtgatccaaggaccaagactgtttgctgcctagcagcaaagaaataatcaaaacgttctgtagcacctttgaactgtacgcagaatgtagtatataaaaaaaaaagtggacggaataaatttatttatttatttaagcccagtgagttgaatttgtgttaattgcaaaagtggttagctattatccttcataaagcatcccatgcaaaaggatacgaaagacaaaaaacaataataagattaacatattcatattagaataaaatcttgctatataggtacttattataagaactggatacaaattcaacacatatttttctatattgtacacaatttggttgtaataatttcgctcttacaaaagaaatatttaattatgcaagagtcaataaaattatagaaaatcgggcgaataaacataggattggataactcagatccgaaagtgataacggacagcttttctccgcttattgaatgccgaatttttatttgccaccggctgaaaaactttgtggccctgaatccgattccggttgcgtttctgaatgaagtaattatatgtattgctttgattgctgttgtcgttccagcgttttgtccatcactttttttttagtggtgcaaaatacggagaataataagtgcttccgctttcactacttgctgcttggaagtttggtggcgttttttggaccagagccacccaaatattttgctggtccgtcgaacaaatgcacgtaacatcggccagttaagtatgagctttaagtcgttaggcacctctttttgcgcattaaatgcgattttatataagatattagggcttaattgtccgattttccaaataaaaagtttctgtcttaatagctgtgcttggccagctagtcagctttcgtttgcaaacacgaattgaatgggccaaactattgaagtggaagtacgcaattatgttctgggaagaaactttcttgatcaattaagacattaggctctgaaatgtttttatctaactttcttatcactagaaccgaaacagtttcgctcttattataggggtaacctcggaagcggttcgtaaaatctttgattgcagtcaacaattaaaatgttccactgcagtagatttgat

SEQ ID NO: 41156 - DNA, 806 bp, DROSOPHILA
taggatcggaattcattcataaaggacacaatgccaaagaaaatgggaatcaactcgaaggcggtggaggcccgcgagcgcaaggaggccaccaagaaggccacgcaggagaagaagagcaaggaggcggaggatcgcctgtggcgcgatgacgacaagaatctggccaagaaacaacagcgcaaggacgaggaggagcgcaagcgggcggaggcggccaaacggaaggctgaggccaaagcgctgcttgaccaggaaatgtcatccattaacacgcagcgaaagcagccgctggccaagatcaaccgccagatgattctcgaggagatggagaagaagcagcgcgtaatcgaggcgataaacgaggccaacaagccgatggccgcgcgagtggtggtccaaaaccatatcgaggagaatctgaaccgatccatggccgacacggatgtggcatccaacattgacgaggccatcgtggtgctcagtgtaaatgacagcgaagaggacaagcatcccgagaagcgaatgcgcgccgcctacaagacctttgaagccaacaatctgccccgcattaaggctgagaatccttcccttcgcatgtcccagtggaagcagcttctgatgaaggaatggaacaagtcaccagacaacccattcaaccaggcgcgctaagtgatccaaggaccaagactgtttgctgcctagcagcaaagaaataatcaaaacgttctgtagcacctttgaactgtacgcagaatgtagtatataaaaaaaaaagtggacggaataaatttatttatttattt

SEQ ID NO: 41157 - protein, 213 aa, DROSOPHILA
MPKKMGINSKAVEARERKEATKKATQEKKSKEAEDRLWRDDDKNLAKKQQRKDEEERKRAEAAKRKAEAKALLDQEMSSINTQRKQPLAKINRQMILEEMEKKQRVIEAINEANKPMAARVVVQNHIEENLNRSMADTDVASNIDEAIVVLSVNDSEEDKHPEKRMRAAYKTFEANNLPRIKAENPSLRMSQWKQLLMKEWNKSPDNPFNQAR

SEQ ID NO: 41158 - DNA, 6693 bp, DROSOPHILA
gcataatgagcctcgctcctggctgaatgaatttgacattgatgctcttatggctgcgctctccgccgctgagtcagtcataattagcgctgggtatttcggctgggtgacattatcgatgtagtatttgattgaatgaaagttgaactgtgtttttgaaagtgaatttcttgtcacgacagaagaagcggcaaatcgaaagcactggcggcggcccaatcgatttcggatcttttggctctttcggctcattttctgtggttctgcagccatcgtagagcattagacaatagcaaacgtgtgttggttaggccagcggcggctggcatttggctcgtttgacataaccaccacaatgagcgaccaccacaacaagccacaactcccagacgggttttccactcgctgcaaaaactggctgctcacatttggtaaaatttcactttttccttttatttgcttgctggtcgcaactattgcaacagctttttatgaaaatcaaagcaatcccatccagtcacttgtggaccagagtcagtgccaaattgggagtgcaccagttgtgttgttaattgtaaacgacactgccagccgatgttttgatctgcaatcataacccatccgaaggccacaaacgaatagtactgggctctttgttttgtccaaaacacttctcgcaaagaagcagacacggtcatgtctcaattaagccaacctacgacggcgcttggtctgctgacaaattgccgagtgtcgggactcggagaagcaacaccagcaatctcagccgactggctgcaattttcgcaccataaatgtggaagcggtccgttgtcaaagcgtttgaagtgacagcggccttgtgcagactctgaaatcaagagtggtttcggcttgggcggaaggtctgcgattcaaacaaaaagttttaatttcgtttctctcattgcagccaatcgaaatgggaggcagtagcaactctttgttgctgctagcactaatgttgctactgagcacagcagcaacatcgagcggggagtccaccaccgagaccccatcggccctgttgcccttggaagccaggagtgctgatgtctccggcgaggaagatgtcatctctacaagctatgtgctgccgaatcagatttttaacgagggaaaaccgtactatgcgcgccaggatcccgtgtctggtcagctggacttcagtgccaagaaaccggcgggaattcagccggaggccaatgaggtgctagatcccaacgagaagatcgtgctgagtggcggcagttcgcccaacatacacgacttcttgaacctgccggtgaagtattcctcatcgaagtttgtttatccgctggtctccagttcgtatgccaacttgaagtaccagggcagtaacaagaattacattaccaacaagaaacccacttcggtggtggctcccgttacacccccaccgcccaactatcatagttcgaacttctttacggtgccaactactaagctaactgcagtgacacccacggcaggagcttactatcctagtagtccctccacaagcaccagcaccaccacgtctacgtcaacgacaaccacgacaacaaccacaactcgcggaactttgcctccttcgaggaaaccagttaccaccactacaactacggctccaacaagcccggcggccaagtacaccaccacgtcaagacgccccattccattgcagacagtttccacgacaccacagcctccgcgcaccagtaccacccgtaagaagtttgtgccgaccaagaagtacagtcccacagtgcccagcaccagtggcaggccaacggttggtcacgaggatcagcgcccggtgaagtcatcgcccagaccaactcccagcagcagcgatgtggccctcaccacccaccatgccacgccgcaggcagctatcttccctacggaacctgtcacaaccaccaagatgtacaccacatcgagcacaagtgcacctgtggtattcaccgaaggaccgacgcccccacccgcctttagtcccattccgggaactggtattcccaacctggatccagccgacgtttatcacacgctgggacagaagaacacacaggcggaggagcagcaacagctgcaactggagaagcagcagcaaatgcagaagcaacagcaaatacagcatcagcaatatcaggagcagcagcagcaacaactatatgaacagcagcagtatcagctgcaattggagaagcagcatctggataagcaaaagcatccgtaccagcagcaactggaaaaacagcaacagcagcagcaacagcagcagcaacaacatcaccaacagcaacaccaacaacaacaccaacagcaacaacatcagcaacaccaacagcaacatatacaacaacaacatcaacaccagcagcaacatcagccactaccgccaactctgcaacagcaaccatctccgcctaagcctcccatgacactcagcgatatattcaatagcttggctgaagaggaatccaatgtggcacagaactaccaacagaaccaaggattcgatgcccagggcaatctcattcagcccattgcaccatccaagccatcgcctttcgccatgcagcagccaggaactcagcagcaaccaggaacacagcaaccagcaccacatcagcgacccagtcccaacgagcagaaggtgatctctggtagccaggagaactacagcaatgagtacgtctcgtaccaggtgcagcagccaaacatgatgcaataccgacctgtgccgggacagatcaataatgtggtgatttcgccgggacagcagtcagcctcttttgttctcggcagtcaggtgcaacaggttagcgtgggccatccgagcattgaaaaggaaccactgttcgccaaggacacgccaggtgttcaatatggtcaggtgatcaacgaggacattggcaacattaagcgaccccttaaggaaccactgcctccgccaccgaacttccaacagatgccgagcatccagcagaactcgaacttccatcagaacggaaatgtggcgacatcgggagcacctggaaccatttcctaccaagagccaccaccagaggcacctactccctatcaacagcttcccctaatcggatccaacaagcgaccatcaaagaaacccgtgaccaagcctgagcagccttctcattcctacccaccacagcaatcttcgaccccgcagaaaccacagcccactcccccagttttgatgcagggagaggataccaaggaacttcttgtatccacaaacattcgtttcccggcccagggagaagagtcgctggaaccgccctcctccgctgtgatgcaaggtcctccagcgggaccaaacattaatggccatgcacaaccattaagtctacagcaaattcagaactcgaatcctgttgtctttcccaagcccatggatgaagtagttcctggcagcgccagtgtgcagatccagcagcacgaagtgcttaacctgagccagcagaaacaaccattggtatgtccaatatttagggtaatcaattaatcgttttataacatattcaaatcttgatccatagaaattccctgcccagcagcctggcgagcaaccctcattggaaatggagccacctccgcgatacccaaccacagtgccagtggctcatgcgccaccaactcctggcaagcgaccattgggtacatcaccaccttccaacttctataacgagtacaaccggaaaccacaaaacggaccccgtccaagcaatctgccaaatattctgccacagttccgcccgaatgccaagatatccagcggacatccacctgccttaaagcaggaaccgggcaacatccgtctgccccagcaaggtggtcccggtcccaagcgcccttataatcctgcgatgcaacctcagtttgcccatcgccgtcagcctttgcaccagcagcatcagcaaatgatgcagaagcgctatcccatgaatcgcatctcggagtatcccgtggggcctggtccaggaggagatgttaataggagagtttacagactacccccgtatggaggccagaatgtgccctacatgcccgatcacatgtatccccgtcgcccccaaggcgctggtccattaagatccgttgatggctatcccgctgagcggcatgcgccttcatcggaaccctacaaaacgatcgatgccgaggcagctgccgactttgaggaggaagatctggtcattaacgatccaccacagcccgtgacacctggcaaggatcgcaaggggacggaggagacgaaattagagccagtggtcacattacaaatgctgcagtcccaaaagaaggctgtgagcctacctggcgatgatacgggtgcaggagagatccaggtgacggccgacaacgatcctcaggaagctgaggcctccaagctcagccagcaaaagttggatcccagcggcatgtatgttgtcttcccgatgaagagtgctgagaagggacagagcgaaggcgatgctccctcagctccagctgaataccagaatactcccttctccgtgattcgcgatcagccccaggaacccattctcaagaacaagaagccgcaatccctgcagcagcaaaacaaggcacagcacgttcccaaagataagttcccctatcccatcgagaagccagatccatccttttcagagctccaccctgaatctcagacttctgtttcgggagtactcgtggcgccacggatcattacgggagctatgggcactgggacagagacacccatagcaattgcctacacgcccacagagccgaatccattccgccacgaacaggggcagaaattctccaatatcaatctggccacgtcggtgatcaacgagatccgacaggacacccagacggaggagggtctgagcagtgatttcgatctgcgtggccagaacttcgagaaggactttatggcaccattttacccaagtgtgagcctaggtggtgccagtggagctgcagcaataaatcctgcagcgccgagtaactggaacattctgccgtcgactacggatcaggcgatctatgagaagaataacattaaccgggctgatgtggaaaccacagagcaaaagaagccagaagaggagcaacccactgctagtgcgttgacagcggaaaagccttctgaaatggacagcttccagccacaacttcaaggtggcttcaaacccatttatccaccgggctacaaacatgttgagcaagtggaacaggaagagatcgcaggtgccaagaatgctggcaaggatcagccaatcgcattgccactgatgggcacaacagcaaaaccttcgacgtcagcttcaccagttagcagcagtagcagtagttccacctcaacatcctctaccacatccacgacctcaacgactcatccacccggagtaacgaagtcggatgtcacactggccaccaccaaagcgccggcaatcagcacgaagcccacgcagcgcaagaagtccacctttgagacgagtctggcggccttgctcttcggagacgaggacgaggaggatggagcacgcaagtccgccgagctaccgaaggcccaggttggacctagaaatgtgccccgaatgggtccccgaagtctgacgttgagctaagcggattcgaggatacccgcaactagtttagtccaattttagtttgtattatttattcaaagtttatgagacagcagggatatgccccgcttagaggtagaccatgtggtaatctagttctgttctacagcttatagttagtaagctcacctttccagatatatagaccattgccaccaacgaacacttcaccccacgatcccagcgacttttgcgagtctgatttgaaatgcgaatcacttgaactttctcatttgactcccgaatcgtcggaaatgagataaaagctttttactcaatttaacaacataaactaaaatagtactcacaatctacccaattactgtaccatagaaaaccatgaaaaataaacataaatctgacatgataatcaaagtcgttgaaaatgcttttctttagaaattggcggaaaaaagggcccgtgaaaattaaacaaacagacgtgatataaattttttctaatagacaataactttttacccatcttaaacaaattttacagtaaaataattttttagtgtatacttttaggatgagacagttaataatcttgcacgcattacttatacgacgaccctggttaacgttatccaatacccaatgataaaatatagaatctgtggatttactatatcagtatctttattatacgagtacattaattcagtttacagttttacaaaattatttgtttgcctgacatgttttcgttcttcgattttaaatttacgttgttttaacatctattaaaagtcgaaattaatttcgtttgtgtctgggatggactgcgatttcaatgttgataataatatatgtatatatataatacttattcgtcatcgacccaagtcggtcggtaaagtgcattaaaatgattgattggcaaccggaaatgaattttaaattcatgattttctaatgtttggctttacttagaacccattaacaagacgatgcaatgaggttgacgtgttatgat

SEQ ID NO: 41159 - DNA, 4629 bp, DROSOPHILA
atgttgctactgagcacagcagcaacatcgagcggggagtccaccaccgagaccccatcggccctgttgcccttggaagccaggagtgctgatgtctccggcgaggaagatgtcatctctacaagctatgtgctgccgaatcagatttttaacgagggaaaaccgtactatgcgcgccaggatcccgtgtctggtcagctggacttcagtgccaagaaaccggcgggaattcagccggaggccaatgaggtgctagatcccaacgagaagatcgtgctgagtggcggcagttcgcccaacatacacgacttcttgaacctgccggtgaagtattcctcatcgaagtttgtttatccgctggtctccagttcgtatgccaacttgaagtaccagggcagtaacaagaattacattaccaacaagaaacccacttcggtggtggctcccgttacacccccaccgcccaactatcatagttcgaacttctttacggtgccaactactaagctaactgcagtgacacccacggcaggagcttactatcctagtagtccctccacaagcaccagcaccaccacgtctacgtcaacgacaaccacgacaacaaccacaactcgcggaactttgcctccttcgaggaaaccagttaccaccactacaactacggctccaacaagcccggcggccaagtacaccaccacgtcaagacgccccattccattgcagacagtttccacgacaccacagcctccgcgcaccagtaccacccgtaagaagtttgtgccgaccaagaagtacagtcccacagtgcccagcaccagtggcaggccaacggttggtcacgaggatcagcgcccggtgaagtcatcgcccagaccaactcccagcagcagcgatgtggccctcaccacccaccatgccacgccgcaggcagctatcttccctacggaacctgtcacaaccaccaagatgtacaccacatcgagcacaagtgcacctgtggtattcaccgaaggaccgacgcccccacccgcctttagtcccattccgggaactggtattcccaacctggatccagccgacgtttatcacacgctgggacagaagaacacacaggcggaggagcagcaacagctgcaactggagaagcagcagcaaatgcagaagcaacagcaaatacagcatcagcaatatcaggagcagcagcagcaacaactatatgaacagcagcagtatcagctgcaattggagaagcagcatctggataagcaaaagcatccgtaccagcagcaactggaaaaacagcaacagcagcagcaacagcagcagcaacaacatcaccaacagcaacaccaacaacaacaccaacagcaacaacatcagcaacaccaacagcaacatatacaacaacaacatcaacaccagcagcaacatcagccactaccgccaactctgcaacagcaaccatctccgcctaagcctcccatgacactcagcgatatattcaatagcttggctgaagaggaatccaatgtggcacagaactaccaacagaaccaaggattcgatgcccagggcaatctcattcagcccattgcaccatccaagccatcgcctttcgccatgcagcagccaggaactcagcagcaaccaggaacacagcaaccagcaccacatcagcgacccagtcccaacgagcagaaggtgatctctggtagccaggagaactacagcaatgagtacgtctcgtaccaggtgcagcagccaaacatgatgcaataccgacctgtgccgggacagatcaataatgtggtgatttcgccgggacagcagtcagcctcttttgttctcggcagtcaggtgcaacaggttagcgtgggccatccgagcattgaaaaggaaccactgttcgccaaggacacgccaggtgttcaatatggtcaggtgatcaacgaggacattggcaacattaagcgaccccttaaggaaccactgcctccgccaccgaacttccaacagatgccgagcatccagcagaactcgaacttccatcagaacggaaatgtggcgacatcgggagcacctggaaccatttcctaccaagagccaccaccagaggcacctactccctatcaacagcttcccctaatcggatccaacaagcgaccatcaaagaaacccgtgaccaagcctgagcagccttctcattcctacccaccacagcaatcttcgaccccgcagaaaccacagcccactcccccagttttgatgcagggagaggataccaaggaacttcttgtatccacaaacattcgtttcccggcccagggagaagagtcgctggaaccgccctcctccgctgtgatgcaaggtcctccagcgggaccaaacattaatggccatgcacaaccattaagtctacagcaaattcagaactcgaatcctgttgtctttcccaagcccatggatgaagtagttcctggcagcgccagtgtgcagatccagcagcacgaagtgcttaacctgagccagcagaaacaaccattgaaattccctgcccagcagcctggcgagcaaccctcattggaaatggagccacctccgcgatacccaaccacagtgccagtggctcatgcgccaccaactcctggcaagcgaccattgggtacatcaccaccttccaacttctataacgagtacaaccggaaaccacaaaacggaccccgtccaagcaatctgccaaatattctgccacagttccgcccgaatgccaagatatccagcggacatccacctgccttaaagcaggaaccgggcaacatccgtctgccccagcaaggtggtcccggtcccaagcgcccttataatcctgcgatgcaacctcagtttgcccatcgccgtcagcctttgcaccagcagcatcagcaaatgatgcagaagcgctatcccatgaatcgcatctcggagtatcccgtggggcctggtccaggaggagatgttaataggagagtttacagactacccccgtatggaggccagaatgtgccctacatgcccgatcacatgtatccccgtcgcccccaaggcgctggtccattaagatccgttgatggctatcccgctgagcggcatgcgccttcatcggaaccctacaaaacgatcgatgccgaggcagctgccgactttgaggaggaagatctggtcattaacgatccaccacagcccgtgacacctggcaaggatcgcaaggggacggaggagacgaaattagagccagtggtcacattacaaatgctgcagtcccaaaagaaggctgtgagcctacctggcgatgatacgggtgcaggagagatccaggtgacggccgacaacgatcctcaggaagctgaggcctccaagctcagccagcaaaagttggatcccagcggcatgtatgttgtcttcccgatgaagagtgctgagaagggacagagcgaaggcgatgctccctcagctccagctgaataccagaatactcccttctccgtgattcgcgatcagccccaggaacccattctcaagaacaagaagccgcaatccctgcagcagcaaaacaaggcacagcacgttcccaaagataagttcccctatcccatcgagaagccagatccatccttttcagagctccaccctgaatctcagacttctgtttcgggagtactcgtggcgccacggatcattacgggagctatgggcactgggacagagacacccatagcaattgcctacacgcccacagagccgaatccattccgccacgaacaggggcagaaattctccaatatcaatctggccacgtcggtgatcaacgagatccgacaggacacccagacggaggagggtctgagcagtgatttcgatctgcgtggccagaacttcgagaaggactttatggcaccattttacccaagtgtgagcctaggtggtgccagtggagctgcagcaataaatcctgcagcgccgagtaactggaacattctgccgtcgactacggatcaggcgatctatgagaagaataacattaaccgggctgatgtggaaaccacagagcaaaagaagccagaagaggagcaacccactgctagtgcgttgacagcggaaaagccttctgaaatggacagcttccagccacaacttcaaggtggcttcaaacccatttatccaccgggctacaaacatgttgagcaagtggaacaggaagagatcgcaggtgccaagaatgctggcaaggatcagccaatcgcattgccactgatgggcacaacagcaaaaccttcgacgtcagcttcaccagttagcagcagtagcagtagttccacctcaacatcctctaccacatccacgacctcaacgactcatccacccggagtaacgaagtcggatgtcacactggccaccaccaaagcgccggcaatcagcacgaagcccacgcagcgcaagaagtccacctttgagacgagtctggcggccttgctcttcggagacgaggacgaggaggatggagcacgcaagtccgccgagctaccgaaggcccaggttggacctagaaatgtgccccgaatgggtccccgaagtctgacgttgagctaa

SEQ ID NO: 41160 - protein, 1542 aa, DROSOPHILA
MLLLSTAATSSGESTTETPSALLPLEARSADVSGEEDVISTSYVLPNQIFNEGKPYYARQDPVSGQLDFSAKKPAGIQPEANEVLDPNEKIVLSGGSSPNIHDFLNLPVKYSSSKFVYPLVSSSYANLKYQGSNKNYITNKKPTSVVAPVTPPPPNYHSSNFFTVPTTKLTAVTPTAGAYYPSSPSTSTSTTTSTSTTTTTTTTTRGTLPPSRKPVTTTTTTAPTSPAAKYTTTSRRPIPLQTVSTTPQPPRTSTTRKKFVPTKKYSPTVPSTSGRPTVGHEDQRPVKSSPRPTPSSSDVALTTHHATPQAAIFPTEPVTTTKMYTTSSTSAPVVFTEGPTPPPAFSPIPGTGIPNLDPADVYHTLGQKNTQAEEQQQLQLEKQQQMQKQQQIQHQQYQEQQQQQLYEQQQYQLQLEKQHLDKQKHPYQQQLEKQQQQQQQQQQQHHQQQHQQQHQQQQHQQHQQQHIQQQHQHQQQHQPLPPTLQQQPSPPKPPMTLSDIFNSLAEEESNVAQNYQQNQGFDAQGNLIQPIAPSKPSPFAMQQPGTQQQPGTQQPAPHQRPSPNEQKVISGSQENYSNEYVSYQVQQPNMMQYRPVPGQINNVVISPGQQSASFVLGSQVQQVSVGHPSIEKEPLFAKDTPGVQYGQVINEDIGNIKRPLKEPLPPPPNFQQMPSIQQNSNFHQNGNVATSGAPGTISYQEPPPEAPTPYQQLPLIGSNKRPSKKPVTKPEQPSHSYPPQQSSTPQKPQPTPPVLMQGEDTKELLVSTNIRFPAQGEESLEPPSSAVMQGPPAGPNINGHAQPLSLQQIQNSNPVVFPKPMDEVVPGSASVQIQQHEVLNLSQQKQPLKFPAQQPGEQPSLEMEPPPRYPTTVPVAHAPPTPGKRPLGTSPPSNFYNEYNRKPQNGPRPSNLPNILPQFRPNAKISSGHPPALKQEPGNIRLPQQGGPGPKRPYNPAMQPQFAHRRQPLHQQHQQMMQKRYPMNRISEYPVGPGPGGDVNRRVYRLPPYGGQNVPYMPDHMYPRRPQGAGPLRSVDGYPAERHAPSSEPYKTIDAEAAADFEEEDLVINDPPQPVTPGKDRKGTEETKLEPVVTLQMLQSQKKAVSLPGDDTGAGEIQVTADNDPQEAEASKLSQQKLDPSGMYVVFPMKSAEKGQSEGDAPSAPAEYQNTPFSVIRDQPQEPILKNKKPQSLQQQNKAQHVPKDKFPYPIEKPDPSFSELHPESQTSVSGVLVAPRIITGAMGTGTETPIAIAYTPTEPNPFRHEQGQKFSNINLATSVINEIRQDTQTEEGLSSDFDLRGQNFEKDFMAPFYPSVSLGGASGAAAINPAAPSNWNILPSTTDQAIYEKNNINRADVETTEQKKPEEEQPTASALTAEKPSEMDSFQPQLQGGFKPIYPPGYKHVEQVEQEEIAGAKNAGKDQPIALPLMGTTAKPSTSASPVSSSSSSSTSTSSTTSTTSTTHPPGVTKSDVTLATTKAPAISTKPTQRKKSTFETSLAALLFGDEDEEDGARKSAELPKAQVGPRNVPRMGPRSLTLS

SEQ ID NO: 41161 - DNA, 3001 bp, DROSOPHILA
ctcagccgacgcagagcgagattataattcggtaaccgattcactggcactgctctaacgggctatagcctatgatccagtctggaatggagctaaagatatgttgctttcatttatgtctgcactcgcgaaaaagcgtccacaaattaacagttcttcgggagcgacgcgcagctagacgtccgactttgttttccgactcgattagagtgaccgttgtgggatggtggaaaaaagtggagggcccatgctgaaaccgataacaaaaataccagatgtgcgatatacactatcgataacgagcacaatttcttaattctaatttaaaacaattatataacgggctttcgtgttttatttaacaaatagtgaataaaatgcggctacttctttttgatgtacttcatgtacttcttggcgttgaagttgtcctccacctcctccatgatcttgaccttcttgcgcggcttgcgggcctccaatctcgctctgcgctccgcatcggttaaggtgctcagatccaagggaagctagtagatggtactcgttaattatggtttcgttaagttatagtaactaacgttaccttgataatcttcctgggctcgtgatagcggatgtttatcgtggatccatcgggttgcaccacaactgtgggatatagccggcagtaaaccgagcgatgcagcctggtaaccgccgtcgtggccgatgagatgcagcgtatctgctgaacagcctggggcaactgtttcagcaacattttaattgataatcacaatatttacactaaataagagctacacttaaatcgtgtttttgctgccaggcagctgatagtgtgaccgacccgagggtaagatttaaagactcctaaattagttattaagaatctgtggtagccctggttcagtttccacattatgtggtattttccccagctctggtcacattcgtactcaaagtgtaagtgttggttgcagaggcagaaattcttatttttctccttgaaaatataagtacgttacgttaaacactgcaaaaataataaaaaaaaagcgcacggttgggctacaacagcgattagtctgcaagcctcgaggaaaggactgcaaacgcgtttttagtttgaaggaacattgaggattgaaaaaaattacataatttttgcgagcataactcgccgtgcattatgtcgataagtctgcaactaaagaagcagagattacatttcaactaataagaatatcgctgcacagttccaggacacctagaaatcacttaccacctctataaacccaaaaacctaacctcatccccgcttttgttgttgtcttgcagtatctgtgcagaatggccgcccgccgtatcgcccaatcctcgatcaactggtccgctctcgccgagcgcgtgcccgccaaccagaagagcagcttcggcgccttcaagaccaagtcggacatctatgtgcgcgccgtgctggccaatcccgagtgcccaccccagatcgattgggccaactacaagaagcttgtgccagtggccggactcgtcgatagcttccagaagcagtacgaagccctgaaggtgccctatccccaggacaaggtgtcgtcccaggtggatgccgagatcaaggcgtcgcagagcgaaatcgatgcctacaagaaggcctcggagcagcgcattcagaactaccaaaaggagatcgcccatctcaagtctctgctgccctacgaccagatgaccatggaggactaccgcgacgcattccccgatagcgcactcgatcccctcaacaagcccaccttctggccccacactcccgaggagcaggtcggctacaagtccaaggagcagctggaggccgaagcccagggacaccactaaaccggagcgcacgaggagcactctgacactggcttcgttggtcgtctgttcgattcgaaatgtaatccgcgttgaagtaaattacccaaattaaattcatttcaaatgacagttacggtatctaatttgcatttgttgtctatgtgacatcttgttggatggatatgcataaagaaaatgggatccttaaatcaaaataatgaaataaattgagaaaacaatcaatttgacagcccaatgcactggaaatgatagccggtccttgcagttttataagctaatagataaaaatcaaatgcacaaataaataaataagcaaattggctacaattcaaacttaaacttaaacaaaaattaaaattactaatcggcaccaatggtggtgctagactccgctaaatgcggatgttgtacttgctaaatgaaactaaagctccctcttgtgggcggtggcaaataaattcccagagatgtcggtttctgggaatgaaaagcacttcctgatttctaaaaaatttaataattccgaaagtactttatattgaaatttaatgtgcgtcaaattagcgtcgatgagttagaggcggcacagtaagtgggaattcctgctccttattgccacaccgctggattttaatacttttaaacctctaccttggtttgtgtccgcactacaggcagtatattctaactggattttcccgatcgccttagtatatttttcaaatgtttattggttgaaagactgagcactgctagcatttattttgagagaattcaagcagtgccatcttgtttggctctccgaaagccgttaaaagcttcagtcgccgctcaaatctcgtttctctcgccatctcgctccaactcgaacaagctcaccttttgcgaggaaaaaaccgcagcagcgcgcgtcttaacttgtccgcgaagtgcaccttcgtgatcggagccgcaaatgccgcgcagcacgacgcgatctgttcagtcgcgagcgaatcgagttggagtgcaaacgtctcaagcggaatctcaagttgtagcgccagacgcagcgatccgatcggagtgtacatgcatgtgaatcaatcgctgagatacaaagttgaac

SEQ ID NO: 41162 - DNA, 679 bp, DROSOPHILA
tttctccttgaaaatataatatctgtgcagaatggccgcccgccgtatcgcccaatcctcgatcaactggtccgctctcgccgagcgcgtgcccgccaaccagaagagcagcttcggcgccttcaagaccaagtcggacatctatgtgcgcgccgtgctggccaatcccgagtgcccaccccagatcgattgggccaactacaagaagcttgtgccagtggccggactcgtcgatagcttccagaagcagtacgaagccctgaaggtgccctatccccaggacaaggtgtcgtcccaggtggatgccgagatcaaggcgtcgcagagcgaaatcgatgcctacaagaaggcctcggagcagcgcattcagaactaccaaaaggagatcgcccatctcaagtctctgctgccctacgaccagatgaccatggaggactaccgcgacgcattccccgatagcgcactcgatcccctcaacaagcccaccttctggccccacactcccgaggagcaggtcggctacaagtccaaggagcagctggaggccgaagcccagggacaccactaaaccggagcgcacgaggagcactctgacactggcttcgttggtcgtctgttcgattcgaaatgtaatccgcgttgaagtaaattacccaaattaaattcatttcaaatgaca

SEQ ID NO: 41163 - protein, 178 aa, DROSOPHILA
MAARRIAQSSINWSALAERVPANQKSSFGAFKTKSDIYVRAVLANPECPPQIDWANYKKLVPVAGLVDSFQKQYEALKVPYPQDKVSSQVDAEIKASQSEIDAYKKASEQRIQNYQKEIAHLKSLLPYDQMTMEDYRDAFPDSALDPLNKPTFWPHTPEEQVGYKSKEQLEAEAQGHH

SEQ ID NO: 41164 - DNA, 14078 bp, DROSOPHILA
gtaaaactccttgtatgtcctgtgtctcctccacacacaaacagacaatatatacaaatccataattgaccgatacttagagactgatctgttgtagatacgtttaagggtagactaaggattaattgactacgattactagagattacaaatggtcgcttaaatctgccattctcatttctcttttctgtggaagattgagcttctctgcttattcatctcgtatttggaaaacatttattaatagacaacaagaagacgacgacgacgacgacgagattatgcatacgttgagatattgacaagacatattgacaacattataaattgtttttctaaaattttctttgtgtgaactttaattcgtttgtaattgaattggtaattccgtaattaagcgctctgtatttactgggtaattttttatttttattactcttcctagggagcttgtggcgcaatcacgtacaaaaaaatacttccttatttttaaaaccatttaaataaaattataaaataatataataaagctgtattaaaataagtttgtaagctcccattgcaaaccctccctaaacttgggtcaaatttataaccttcgatgggaaccgaagaacttaagctacttcgagtgtttttggtaacattctgggtgttctgtgtgttttcagtacttagattatgacataagctacaagccattgttgttagttagtaagatacatactcattacgtgctacgcaaacaaggtcctgcctgacatgtgacgttctccagcgaattggcattacttttggacattcatcgaatcgttaccatacattttaggtggcttcaggcggtggatatgtcgggtggcgtggcagattgggggttaagtggggggcagagagacagcaactgcgttggatacgctgacttctaatcggcatactttggaccagccaaaatactttgttcctcgtgggctgagcaggttaggattggcaatggcggtcattacacctgcttggcggcactggcattggcacttgagccaccctggttgtctgtcttctgacgcacagcggtttcgggcaggaagagcaccacaaagccgccaaagatgctccaggcggtgagcagagtcatcaagagatggccctcgatcttgttctgaaagacataagttcagggttacggtttatccttatgagcatgtccctacaagaggtaaactcaccagtagcgacaggtatggtgtgaggatcaaggccaaaccggcggccacattgcaggcacccacgcccacattgcgtatgggcgtgggatacagttccgccgtgtacaccggcattatggtattgccagcactaatggtgaacttgcccatcatcaggaatgtgatcttcagccagagcagatccgcatgcccctcggtgatcgccgcacagcagcaggcgacgccggcacagatcaaagtggcgcaaaagagccacttcttgcccactttggtgatgatgtacatggccacggcgatggcgggtatttcgactaggccagctagcgcctgtggaaaacatagataaaacataacattcaggaggggatgaggacgacgagggcaagtggacaagatgtcagctgtcggctgggcgcattaaatcagagcggcatcaaaggtgcgctcggcgttgtcaaaataaattatgcaataaattagctgaaaacctcgctgtcacgcccattggcgaatgctggacagtgctgagcagttggctggctaaagtcgagaaattcggactcgaattgcacacaaataatgtgcttagtagataatttaaggttatttaggatttttaggtaataaaacacatacacagctttcatattatacattaaaatattgttacctgtacgaaaatctttagacatgtctggcgcaaactgaacatctttagcccacttattccattagcttttcgttccacaacaaaaaataaaaaaaaaaacaaccaaacaaacaaacatggatttcggacaacattaggtgcttagtgctttaaaacaatcaaatcccgaaaaaatgccaaacatgccgaacatattgtacactcaaggcccgccagcactgtgctctcaacattttgctggccatctgccaggtggaaggggctaagatggctgcgagtggcgctgcggccgcgacaggatttatctactatattgtggatggattggaggtgggtgtgggccagtaacattataattcgattgcaagcacattttcacaccgtccagccagtcggagaacacttgacatcgaacagacagtctttagtcagcgtctgatggaattgctgacaaatccaattaggtggccatcagtgccaccgaaaatggtgaacctcttggcggtggctaaatgcctgattgatcctatatgttaacaagatttcggctgaagattcccatgccgtcgccgatgatttgcctaagtggattgaactgcgcccgccctacgtatacttaatttcttaaaagcagcataactcaccgaattcaagtagacattgccgccaaaggagctcatgttaagaataatgccgtagtataccagattcatggtgaaccagatgcaaaagaagcaaatggagatgcgacgcaggtaactggagcggaacaggtaggtaacgtcctgcgtactgctctcctgcgtcggcggcgtcagttgataatcggcgggcagctggcgaccattgaactttgcggccgcctcaataattcgacgcacttcatcgattcgacccttgaccagcagccagcgcggcgattccggcaccacaaacctaacgtacagaagcacccaaaattaatcaaataaaatttagcgcgtgaaacatgtgccgcggcaattatggcactctgtttatagtggggaaacacccacgcgctgttttcttatttattcacatgtctacgatctatatacacatctgttttcatgccatatattatgctgatagtttacctgcccatgatgatcaaagacttaccaaagaaagcacaggaagattcccggaatgccgatgcacagctgtaggcgttgatagtcctgggtcagataggccaggcccgagatgatcatgtaagagattggcagtggaaacaggttgtacattccggcgatggttctccatttgccatccacatactcaatggctaggattagaccggagtaggtgaccgataccgataccagaccaagcagagcgcgaagtgtgagataaagctcaaaggagctgcagatatagagccaaagacctaaacaaaatatacaacgaaaatgccctaattagactttaagataatttgttaattggcttaggaaatggcccaagatgagagaaaaatgttacgacactttgaatatcacgtatactgctagttggaagaaaaaatcaaaggcgaggccaatggttgaaattcaatgctgcagttagcaattcaagttaagcttttaataaatacttaaatttgtagtaatttaaagttagggtggtaataagcttaagagctaattaatgctttgaggaatttcttaggaatctccagcagcctcgcaatcaaaaccaattccgcacacgtgcccaccctcgatgccagtccctcattagtaatgtcctttcgaatgcaaatttcaattatacattgtgagagatttaatcaacaaggacaacaaggctggcaagagccaggcagccacaactgcagcaacgaccacctgacagcccggtcccacaaaacccgcagagagccactcgatgtgctcgtgttgaccccccgacatggccaagttcacagtcaacggaggaggacatcgtcagggccaatgtcggtgtgacttccgtatattcagggatatatatgaggtggccagtggggtgtgtgtgtgtgcgaggggaatgaaatggcctttatgcctcgagagacactcaccgaatatggtctgcagcacggccgatatgaaaagcattgtcttgcggccgaacttgtccgataaatagccggagataatgccacctgttgccacgcccagaaggaagaacatctcggccacgttctttaggtgctccttctcgcagaccagatcccactgcgatgtccaggtgttgccgacattgtcgttcgtctcgtactcccatttctcgcaggccaccaactttttatccatctccgctggtgtctaactcaataccaaaatattagcgcacgttgttatctttaagtattctaggttagcatcttaccttccagtctgatggcagcgtggtttcattgctcacttgactccaatcgatgccctcccatcgccggcagttgtcgacggagccacttaagtttcgccaggtggccactggcatgtgctggagttgcgctggtcgctggcaccaaaagtccttgttggccgcctggtagatggacgaggatatgtggaaggtgttgggcacctggaagagcgacagcagcaccgtcatcagcaactgccacttgccgtagtgtcccatcaggtcgccgatcacgtcggtctcgtcctcatcgtccgccggatccagtccgctcaccgccgctgctggcgactgaggcgtcgctgcctgctgtttgggagggatggtggggctggtggtgggggattgtttggcggagtcgtgcatgatgcacaaaggaactgaaatcagaaaagtgacaatgaatcatcaaacaatgaactctagtaagctaaatttgacaaaatcatttcaattttatgacatccttaacctacatataaacaatataatgtgtgttaggtaatgaaatgaatgaaagctactgattttatactaaatcatcaaatcataagaactagttactaatgatgtatttctaattcaaccaatgataaataactagcaaagatgcagattgacttaaggaaacatgcaaataatcgacttttgcgggcaggggaattaattttattgcccgtgtcaggagcacacaaaggagcaattagttaagtggtcagtgactggccataaaccaactcggagtcggaggccaaagcctctcagaaacagtccgaatgcagtcaagtcaagcggctctatttcatttattaggacaagccccctgcttccttcctgcccccttgaagggttctgatgcccaagtccggtcattggtcaacctgcgttcgatggaattcaatcacgttggaggcgattaactacagcagcctggtctccggcaaaggcaaaagttggtgccgagcaccgaggatggagaactgaagcgaaccgagccagctagcactacaaagtaaaagaataatagccaagatttaatgtaattgcgtcggggtggacggaggcaggaggcaggatgaggatgaggaggagtagattgctcctgccatgttcgtgtcctttgcttagtttgctagttgaacttctgcccccgtccattccgttcgcatcctttctccgctttgctctgtttgcgttttcttttgtggccactgaccagtggggcttttgtagcgcattggctttgtctgggatttgctcgaaatgggtccatatataccagatatggctgaattgagcccgcggcccaagtagccgaaggtatcaatgcccaaaagtaggcagcaggctggcaaagttttcgtctcgaattagccaacttaaatgtttaattccgttcagttgatttatctgcggggtattagtaagccaaattaagcaaacacgcagcgaaaacgatttagtttgaaaggctttggaattatttagtaagtttgtaaaagactaactctattatatgtcacaaagtaggaggattttcgtaacccagttaagtctctttccattcataaagataaaggactgaatgcatttaatactaaatttattgcaaggtaatggttaaagtgattactaagttttttctttaaatctgaagtaattaaatatgcttaaattcacaacgttatatcatagcgtttaaaactatgcgcaatatcaaatctctcctttcacatgacttgtcaacagcaaggatatcactatgtgtccccatgaatcaagttcccgcgcatatcaatcaacggagccaacatttatggcacaattcccgggagctgttagttaaatttgcaaatgcccaggcggcggggggcgtgtccaaacccccggaagagatattccatttaagaggggacttagcatatgtggccagtggccaccacaccgcatcacagtggctgcagcagcagtagcagccacagcaccagaagctgcagcagtggttgtgccagtaaaattcacgccatacgccgcacgtgataagcagttgagcgcacattttcacgcacttgtaaacaggaataagcgaagcgtgtccgcgaaaagccgcgggctggagcgaccacccaccccatcctatgctgcctggcaggataattaattatcaattttatgggccaccccctcttgggccagctgcagtttgcagttggctccagcttttggccagcggagttactgagcggctgctgtcgcagatgcaagtgccactggtgtccgccgaaggtcgtcgcgacgtcgccatgtcgtgtgggcacaacggctcaatttcaatgctataaactacgtcgtcgtcgccgtttaccttcaactcgcggcgcacatggcgtatgtgcaatatcgtggcacgctgaaaataacgctaattgcattcagcagctgttgtcgctctggtcacaccccagttgtccatgcgggcccctattcctgcccagctccccattcgctggcattcgctggtatgacaaatcgacaggttcctggtttggggattaaatcaattttataaactaattggaagctgtcgaagatggattagtcctataattcgtctctgcacaggcattaattgaaaataattcgcgcgcggatttaattggctcaactagataattcgaaaagtaacttaaataatgtataacattttattgtattttattaggtgtctactttctaaaagttataagcttttaaatttattgaatttgctatttgatgtgcacattaatattaattggatttatatacattccaaagatagatgaatatacccatcaatcaattgcctagttaactgacagctagccgtaatataaaaaactggttcaaatcgctctttccttttttgtatgcatatcagggcccattgtactgccaaagatagtactatatagacagtttcacaccccatgcaaatcaaacagcaatggcccatgtccaattggtaattacgtttacattgcagccataaataataaattataatgccatgcacgatcataaaagtgcatacacatcccgctcccactggtggtgtccacatatcaccgcgggttcccagggacctggaaaagcttcggaggcggatgcgtctgggcgcgatctcttgacacgctccaccagcgccagggcgcctcaattgaacatgatccacacaagcttctctaataatgatttgtttcaattgaaaagtcaatgccagagctctctcccactggccattaataatttgcttagcttccattcgtggttaattaaaaaaaaagcaacgaaatgcggcgctaaagacaattgacaacgggtgaaagagagtgcgcgtttatcttgctactcatatttgcataaaaatgcgaaaaattacaaccgctggttgtaaaatattaatgaataacaaatttaattaaccgaaattttgtgtgcgagcggagtttccatggcattaatggcgttttgtatttcatacagataatggaaacttttttggtatttccgtctattaaacattttaaattactaaacgaaaatccgaaaagttgtaattaagtttatattttataagtatttgtttaagatgtacaaatatgattaataatcaagtttatatgaattccaattgatatgtacaatgatagtgcagatatttatatcgcatttaacagaagaattctcttaatacttcaacctttcctttacatttaactaactgctcccgttcatttgaatttttgtcgcactttaagtagcacaatgacaaattgagggggctttccccagacaattacgaccagccgagtgtagataatcaggaatgcgaaagaatctcataagcgtcatagtcacaaaagccgaaatgtgctaaatatttctaatacaaaggcaagcgtttagctctggggagcgaagaggtggggtggggcggcttttgggtgggtggctactggcaggagaggcagacaaattgccgctgtaattagccgtcatgcatataaaagtgcattcactttcatgccatgatagaaaagagaattgagagtgccgaggggctgggatgggatgggatgtgatggaatggtatgggttcgggttcgtttgggctggtgatgatgatgataatgatgacgcctgcatctgcatttgtgcaagcatggctcggtgacgttgccagctaatttgcacatttataggatttgatttgtttattatgcattcaccgccgctggtggagcgacggggtggcgagcaaatgctgccaagtgggtaatagtaatcttcagacacttgcacgcagcaacgagctgcgcttccgtttctccgacaagtgccctcggtgcggatgagcgatgacgatgtcggatggcggataggggttacaggagcgagacgacataccgccggatgacggctcgtcatcgtatagcattggtcggcctcacttcatcacttgtcagactaattgcaactgtatggcagccgctttcggataagtaacagcatcgctgcaccacggggcgtatgcgcaacgtctagcgaattgcatttaattccgccggctgctggctgctagttgcctgtggcgatagtaaataatggcaattcaaattcgatttgcgcccgcacaacgcaccattttcagtataaacaatttaactttctatatcgccgatttgcgcacgaacgtgctcgaaacgaccgataatgggtcgatcttctggtggatgaaatttacgaccccacgccttgccattaacacaattgattttggcactgggtaaacaaattcaaaaacgaatccataaacaacacgaatccgatccggccgcttgagccagaaaactaatgcgactaattccgaagtaaatcagccaataaacgaatgtactcccaaaccttgcgtttaacggccatttttccggtgaaaaacaaatgcaaagaaaatatacgaatcggctgcgaataggctggttctccgtccaaagaaaactttgaccgtcattaaaaggcaaatttcaggcatcataaattttgagaaaaacaagtctagcgaaatattcatacttgatggtaacatattttagatactttttctctttaacatgtgtaaaacattgtttgaatatcaaattccttatttataccatttaattaaatcttcttattgtatgatgtataatttgaaatggtattgtcaaattcttatataattttgccaattgactgaaaattcacctcatgtttggcaaattaagtcctggcaataaaaaaggagcatatgtcagcattttttatatcaatgcgagaacacatttgcaactttataagccctgccaaagccacaaaaccctcgaacacatttgattgccacaaattgaaggcagcttgacaatttcgtgtgatcggatttcgtaaaatggcacattttcacaaattttcaaatgccaaaatcattacaatgaagtgtgctccccttcgcacaaacccaaccccgaacaaggatcaaatcaattcgaatcaattgaaaaggcagccacaaagtatttgaaagtttttatgagttgggcgttttgtttccacatatgtgcgtgtgtgtctgtgtgtgtttgtcgatatattatgcaaatttcagctacctttgggtggctccaccccgcctccatcactttatcgcactcggaacaaattcatctcaaaaccgttcatctgcggatatcttttatttagcaagaattgcgagtggggcatttggggaggtaggttggtggaaacattgcaatatggcaattccgttttgttctcgttcacttttgaagggtccttactggcttccttccgcttgccgcctaccatgcagctgctgctgctatgtcctgcccagctcagctcagttcagtttggtttggttttggtttggctcggttcggttcggttcagttgagtccggccctggttgcatttagctgtaaacaaagtcagagatgcgatgcacaggatacaaccggactcgcagccggaatcggtccagtgttgtagtgcaatacaaaagaatataggtcatcagccatgggcgaaattgagctaacaaaaggtatatgggtattccatttaaaattaagatgctttctgtcaataatgtttagttaaacaaatatatgctttactagttgtaaatggtttccaagaaagctctttagcccaagacaggaatacccatcctaccgagaaatactcaagtggtcaaacatttaaccactgtcaatcaaagatccactctcgcatagggtatatccaattttgttggccagtcttttttggattcatatttggtatctgtttagctacactcttaatgtaaatccgtatggatgtctaagtgagtgcccgctgctgttgtcaacatgaattcacaattctatttccatttggtcttgtcggtcactggtgatgggtatatagagcctttgcccatgctccgcgactcgtgtcttgttaatcgaatagcaaatcgtttggcaatttcaaattttgccagctaagcagccatctgcctgcccctcgccagtcccacccctctattgtggggtcgcgcgcctttttgattagaatttccatttcaaagtgcgcactgatttgctacttttatgcgcttccaatcagtggcaagtcgagagtcaaagcatccgccattagcataatcttacggcaaggagtgggtgggccaggcgccaggtgattgccagctatgtttgtttgcctgccccccaccaccgttgacctccgcccctgcgaatcattggcgtgcattgtcaggattcccatgcccattggaatatgcttgtgagctactcaatatgttcaatgccgggttatgtgtctcgggactcagccatgtgaagttttcaatttaattttcatgaaaactcttggctccttagactttttccatgactaaccttaagtcctcgaaggaatgtaaaagcactctatatttgtttgcttatgccagacaaacggcttacaaaagcatatttcataaggtcttagtatttaaagaatataagtgatataaaaaatatatcattattatattgaaaataaattactgtctttttttaaagccaatatgaaccaacgcattttatggaatcataaaagttgccaatgtacatcttagtgaatatgaactggctacttttaaagactatttccgtttatgtcatttatggttaccatttacgggaaaatcctcgaggcaaattcggatccttggagtggaatgagcagattttacccgagggcctaaagctgccttcaacaatctgtcaggataaagtcattgtcgttgtcattgttgttattctcattgttgttatcctgctgttgttcttcttgttgttgctcttgttgttgcaagagccaaacaaatagactcgggcggcgaaaaaaaaaacaaagtcacacacacacaagaaagcaaggaaaaaaggcgcacaaataaacaaacaaaggagagcaaagcaaatgtcgctggcggcacgtccgcgagcaaggatgccaggacatatattcacacatccctaaccccccaccgatttctgcactgtgtcctgccgcgttgtcaacgtcgccaggcagcctgtgtgcgtaatgagcttaccttatggatagacaaaacaagttgctgcgggtgttgctgctgctgatgttgctgctggtgtcgcaggttcgggcgcagccaatcctgcagcaagcgtcctgctgcacaattggcagggctgatggcgacttcctagcccgtttcctgtggctggctctttttgttttgatggtgtgtgtctgtctgtcttggcgcggaaatccgtcgcacgctcgtcgtttttttattttctttttttttttattttttctcacttttggaataaatttacggctagaggcgcactaaacggaaactgacacgtaaaatgctgtctgattttacgagcgtctacggccctacggtctctacggaatatgcgatacacgtggtaaggtgggggtgcagagcatttgcttcgctatttattcgatgcatttcggtgattactcatacgcagcgtggtacgaggcatggaaattgattcgcgcgcgcgtttttcgcccgctgaagcaacagcaatttgcaatttggacaatcgtaaataagtggcgaagagcagcggcactctagtaaataataacgcgatattataataacaataataggttgatattatgaaatttcaagcgattctgtgtgggctgccgctgcccgctcgcattatttatgggttgtccaaacattgtctggcggaattgtctttgggcggaatcatgaatctatgtgttagcacatctcaacggaactcagtatatatagcatgattgttgccactcgcatttgttgctgttgctgttgctgttgctcttgttttatttatttaattttatactatgcgcactcacgcacccacaccacggatatcgggatctcggaatcccagaatctcagagtttttgaatttcggacctcgtaccgcactcgtaccgcttgtcttttggctgctggcggcaacaacaacgcttcctgctcttgattcgcactatttgctaggcgctgatgctgaaaatgcgattcgactggcgacggcaaagggcggctgttgcggcgttcaagttcatcacacaacgactgaccaagagcaactgagcgctcgtctccaaagcgaagaacttttataaccttctccccaccgcccccaacgaactgcgacgccggcagcgacgttggcagattcgatgctcggatgctgccagcttggaccattctcttaacacgctcttctgcgctctttggctcttgactcgcgtggcgcgcaaaactgttgctgttgttatttaatcgccggcaccgcttcactcggcattactgccatacactacgccccaaaggggactccccgttataatgaagctcacggaaaaagtaaaacaataattcatttttaaatgaaatcataatggccaattaattttaaagatgctaagtagtttttactaccaaatattgttgcaattaaaattaattcgtacctaaaatgttataccttttcatataaaataataggaatttaaaatgaaatagtatgaacgtattacagtgtttcaataatttggaataattggttcttttatgattcgagtttgaaaacaaaacaatctaacaaaataagagtgtcccctgttcgacatcaacgaagcgttgctgccctcctcttgaggtgtaatgatataaatcaattgatgaaaaacgaatgactgtagctatatatccgatgtgtgaagtgcagtttgaccgacaacagaacagcgaactgtggcagagatcggctgcaaatcggcggagcgtgccgaaagatcgcccgccaatcgacgatcagcgggtgttttggcctaatgtatctatccgtcagcggtcgcgaccaatttgcctgatagatcacatcaaatatgattctgacaatttgttgacagaatgttttgtttgtagcttgtgggggcttttgttttgtttctcgtatttattttggggtagttagttgacgatgattgtttaatgacaatgtactatgatgcctggtcgttcatggcgttatgattctaatattgacagcgat

SEQ ID NO: 41165 - DNA, 2168 bp, DROSOPHILA
cttgaacgccgcaacagccgccctttgccgtcgccagtcgaatcgcattttcagcatcagcgcctagcaaatagtgcgaatcaagagcaggaagcgttgttgttgccgccagcagccaaaagacaagcgagaccgtagggccgtagacgctcgtaaaatcagacagcattttacgtgtcagtttccgtttagtgcgcctctagccgtaaatttattccaaaagtgagaaaaaataaaaaaaaaaagaaaataaaaaaacgacgagcgtgcgacggatttccgcgccaagacagacagacacacaccatcaaaacaaaaagagccagccacaggaaacgggctaggaagtcgccatcagccctgccaattgtgcagcaggacgcttgctgcaggattggctgcgcccgaacctgcgacaccagcagcaacatcagcagcagcaagttcctttgtgcatcatgcacgactccgccaaacaatcccccaccaccagccccaccatccctcccaaacagcaggcagcgacgcctcagtcgccagcagcggcggtgagcggactggatccggcggacgatgaggacgagaccgacgtgatcggcgacctgatgggacactacggcaagtggcagttgctgatgacggtgctgctgtcgctcttccaggtgcccaacaccttccacatatcctcgtccatctaccaggcggccaacaaggacttttggtgccagcgaccagcgcaactccagcacatgccagtggccacctggcgaaacttaagtggctccgtcgacaactgccggcgatgggagggcatcgattggagtcaagtgagcaatgaaaccacgctgccatcagactggaagacaccagcggagatggataaaaagttggtggcctgcgagaaatgggagtacgagacgaacgacaatgtcggcaacacctggacatcgcagtgggatctggtctgcgagaaggagcacctaaagaacgtggccgagatgttcttccttctgggcgtggcaacaggtggcattatctccggctatttatcggacaagttcggccgcaagacaatgcttttcatatcggccgtgctgcagaccatattcggtctttggctctatatctgcagctcctttgagctttatctcacacttcgcgctctgcttggtctggtatcggtatcggtcacctactccggtctaatcctagccattgagtatgtggatggcaaatggagaaccatcgccggaatgtacaacctgtttccactgccaatctcttacatgatcatctcgggcctggcctatctgacccaggactatcaacgcctacagctgtgcatcggcattccgggaatcttcctgtgctttctttggtttgtggtgccggaatcgccgcgctggctgctggtcaagggtcgaatcgatgaagtgcgtcgaattattgaggcggccgcaaagttcaatggtcgccagctgcccgccgattatcaactgacgccgccgacgcaggagagcagtacgcaggacgttacctacctgttccgctccagttacctgcgtcgcatctccatttgcttcttttgcatctggttcaccatgaatctggtatactacggcattattcttaacatgagctcctttggcggcaatgtctacttgaattcggcgctagctggcctagtcgaaatacccgccatcgccgtggccatgtacatcatcaccaaagtgggcaagaagtggctcttttgcgccactttgatctgtgccggcgtcgcctgctgctgtgcggcgatcaccgaggggcatgcggatctgctctggctgaagatcacattcctgatgatgggcaagttcaccattagtgctggcaataccataatgccggtgtacacggcggaactgtatcccacgcccatacgcaatgtgggcgtgggtgcctgcaatgtggccgccggtttggccttgatcctcacaccatacctgtcgctactggtgagtttacctcttaacaagatcgagggccatctcttgatgactctgctcaccgcctggagcatctttggcggctttgtggtgctcttcctgcccgaaaccgctgtgcgtcagaagacagacaaccagggtggctcaagtgccaatgccagtgccgccaagcaggtgtaa

SEQ ID NO: 41166 - protein, 569 aa, DROSOPHILA
MHDSAKQSPTTSPTIPPKQQAATPQSPAAAVSGLDPADDEDETDVIGDLMGHYGKWQLLMTVLLSLFQVPNTFHISSSIYQAANKDFWCQRPAQLQHMPVATWRNLSGSVDNCRRWEGIDWSQVSNETTLPSDWKTPAEMDKKLVACEKWEYETNDNVGNTWTSQWDLVCEKEHLKNVAEMFFLLGVATGGIISGYLSDKFGRKTMLFISAVLQTIFGLWLYICSSFELYLTLRALLGLVSVSVTYSGLILAIEYVDGKWRTIAGMYNLFPLPISYMIISGLAYLTQDYQRLQLCIGIPGIFLCFLWFVVPESPRWLLVKGRIDEVRRIIEAAAKFNGRQLPADYQLTPPTQESSTQDVTYLFRSSYLRRISICFFCIWFTMNLVYYGIILNMSSFGGNVYLNSALAGLVEIPAIAVAMYIITKVGKKWLFCATLICAGVACCCAAITEGHADLLWLKITFLMMGKFTISAGNTIMPVYTAELYPTPIRNVGVGACNVAAGLALILTPYLSLLVSLPLNKIEGHLLMTLLTAWSIFGGFVVLFLPETAVRQKTDNQGGSSANASAAKQV

SEQ ID NO: 41167 - DNA, 6454 bp, DROSOPHILA
cgaaccctggccaggaaggggtttgcggtgtggatgagcatggcgagcgcacttacaccgacaaggatggcgtcgagttcttttgggatgcaaccaagagtgcttggttccccaagatcgatgatgatttcatggctcgctaccaaatgaactatggatttattgacaacacatcagcgggggagaaagagaaggctgaaaaggaggcggctgaggccaagagaaaggaggaggaactcaagcgtatgacggcagaggcggaagctgctatgtctagagacaatccagcatccagcgctgcagtgcccactggcaagcgaaaggcccaggagcccccaagtacgcggtattcgacatttagattaatttcctacgatttctaatgataaccttcttttagaatggttcgaaatggatccattgcagaacaccaaggtgtatgtctccaatttgcccctggacattactatggatgagtttgccgatctgatgggcaagtgtggcatggtaatgagagatccgcagacgcagaaattcaagctgaaactatatgccgaaaaggatggacaaatcaagggcgatggcttgtgtgattacatcaaggtaagtgttaaattaaaactctgtattcgatctctttgttttgtgttttttcaaactttatttattattttactttgtttgcttcttaactagaatttatcttgcataaatattatatggtaattttatcatatgtgttcgtattacatttgtgtactgctttcctctttcgtgatttctttgctaacgtttcgctgactatttagttttattcgcttttcatttctccgtgtgtagagtaataatattttaaattggttagtttactattaaaatgcatttacttggctgtaaaattgcttttcatttcgatttcattcccgtccttgccagctttcaatttcaacattaaacgaaacaaaatgtacttcgaggtttttttctttttttttgttttgcctttcgcgtttgaggtattaaaaaatacataaaaatttacatttaaacatactttagttattacatacatctttgtaaaatatagttttgtaatctagaagttaggaaatggtcggtgaccatccgatgatgttatcaaaagattattagtagtaaattattgcttcgctgtgcccgattcgaggacaccataggcaaacccagtgtggggaggcatgggacttggacactgctggactttgacccaaaggagttttccattcaatcttacgctttactcactataaatatatccgtggttctgtgcttgagtttaaaaaattgattttgcgtctgtgtggggtttattggttctaaaattgattgctaacttctagttcggttattaaggaaacatgcgtgactggttgccgtgtgtttacggtgtgtcctgtgtgctgcgtgagtatgtggcgtgtccatatcctagacctatatatagtatatctttactgtacagtactaaaatagctagcgaagcgcatggagattgggtttcctgctcgatcgaaatgcaattaattaaccgacaaaatctgcttcgcagcgatgttcctccattcttccttctcttctgataaataatacttttgcgtgttcatcttgtggtttgttttaattaaagcacaaagaaaacaatcgaaaagggatcgactgggcaacggtgcgtatgtggaaccaattgtgatcgatatgtatcggttagtattggttagtgcgtggcgatttgactgccgcctggacttctactcgttgtcatccaatcgcatggcttgctgtatcctcttcagttcctttgcccgctggtcacgttcctttttctccttcagctgcttgcgccgtttgcgcatctcgataaacttcttctggtcctcgggactcagcgccgagattcgagtcacatactcacgcctcttctcctccaacttagccttgacttcctcgtcggccttctttttggccgcctccacgcgtcgcttctgctcggcggccttggcctcttcggcagcccgttcctcggcctccttggctttacgcgcctcttctgcctgtcgcatttcatcttctagtcgctgcttaactttgcgttcctcttcagccacttccttgcgcagcatttcctcctcctcagctagttttttctccgcagcctcgcggagtgctatttcccgctcgcgctggagcttctgctcctcgcgccgctggttctcctcgtgcaggcgctttagttccttctcctcgaagcggcgagcctcctcaagcctctccagttccaggcgcttttcctcctcctcctgctcgcgtcgaatctgctcctgccgctcgtcctcctgtttcttaagctgctcttgcagcttcagctcctcaagtcgcttggcttcatgggcctcggcaagttgcttctcccgctcggtattggccagccttatgcgctcggcatacagatcatgcagtcgcttctcttcagccagacgcttggcatggttttggcgatcctgttcctcctgttcttcgcgctgtttgcggcgctgctcttcgcgctctcgtcgctgttgtgcctccagttcgcgttgtttttggatgcgctccagtcgtagcttctctgcctcctcgtccgctgcgtgctggcggtctgcttcagcctgccgttgcttcaggagctcgagctcgtgctcacgcttttgctgctggtaatcccgttcctgcttttctcgctcctgcttggctttaagttcgcgaagttgctgttcctggttttccttgagctctttctgatgcgttctggcctgctcttcctcttgtttaagtctatcctgctcctctctgtccttttgttcctgttcatcgcgttgcttttgctgttcttcccttagttttttttcctgttcatttcttagtttctgttcgtgctcgtccgtttgattcttatccaaatcctcaccagatctctgacggagttcatctatcacttggggcttcacttgggggttcacttggggtttgggttcatcgtgatgcaatcgctgcctgcgctgctgttcctcccgctgcaatcgctggcgttcctccttaaggcgacgttgcctttcgcgcttttgctccctagccaacttctggcgttcctgccgacgcagctgtcggcgacgttccctttcccgttgacgttgcaatttacgatcgtactgagtcatctgctgaggcgtgggtgagggagccaggacatcattagactggctaaccgattgcgtagtagttggcgcaacagtagaagtacgaggacgattcctttggcgttgctgtgctggctggtagttcacatcattgggatgttgattctgattcttgatctgacggtttctgtggttgttgcgacgattgttattgcgtcgacggtcgggaataatcatctcttcgtcactgtcctcggccttgacacgcctgtggtacctagaagaaacatttactagttagtttgtttctatttcaggtggagagtgtcaatctggcgctgaaaattttagacgagtacaatctgcgtggccacaagattcgtgtccagagggctcagttccaaatgcgtggagaatacaatcccgctctgaagcccaaacgcaagaagaaggacaaagagaaattgcaaaagatgaaggaaaagtaagtaatacaaaatgaatgttgtattaaaagataacgacattcattatattcattaatattttcaggttatttgattggcgtccagataaattgcgtggcgaacggtcaaagaatgagaaaaccgtcatcattaaaaacctcttcaccccagaactctttgagaaggaagtggagctcatattggagtaccaaaacaatctgcgtgaggagtgcagcaaatgcgggatggtccgtaaagtggttatctatgatgtaagaaaacaaagtttctagaaatgttctctaaaaaagttcccattgcagcgccatcctgatggtgtagcccagatcaacatggcctcgccggaggaagctgacctcgtcattcaaatgatgcaggggcgttattttggacagcggcaactaagtgcggaggcctgggatggcaagaccaaatacaagtaagtttcaaaatgagatagtctaaagaaatagttgctaattcttccttaatgtcttagaattgaggaatcagctgtcgaggcgcatgaacggctttccaaatgggatgaattcttggcagaagaagaaaccgataaaaaagcttccgaggatatgaaggaggaggacgttgactcgcccgaaaaccagcttttgccaggagacgccaccccttagttttcatttacctgcgatcgttttcacgcggttcaagaatctccaggaccacctcgttggcctgctcgttcggataggtggcgttccagcggttgtagatcttgtagcgattggggccgctcacctttggcatcttgtgctgacatatgaagcgcagcttatccgagcagggccgcgccgaccagcggtacttgaggcttggatcgtagatggcacagttattatcaagcggttggctgttggagataagttgcacatagctagaattgttgcttaagcgttaaatcaatctacggaaataaagaaagaaaggaaagagcatctgagagatcacttacgcggaatcagtgcggctgaaggagtcggtggacagattgcgaccactcatgctccactgccatcggttgttgtggtggtcataggtggctcctagccagataggatcattttctaaagttgaaaagcaggttttatttaactattcagggttagatctccggtagcgattcaaaatatatggatctactcaccgcctgatagggcatcctgtttctgaaggaaaagtctcagcttgcggtcggcgtgtttacccggctctgtaagattggcgtttttgtccttgcagaagaagtgcgcctccagccaactgctgcgctgatcgaccagcgagtagcaatcggtgcccacgcgatggaatttcggtggacacaaggcgtatacacggcgctttggcctggaagttggagctgctgtatcctgactgtgagcaggcgaggggccttcgaagttgatttcggcgcgagctgcacttccgtggaactccaccgcaattgtgtgagcaactgtgggcatgacagaaataatcaataaatcatcgaaagagctggatgcgaaagaactcacataaagctaagataaatacttgacagcaccacattttatggctgccacacatcctgttgcctgccgcttgatgattgttgatgcagtgtatttttttccccgacttgcgagggtaagatgaagctggttgtattatgctctgtattatgttcgctatggccacttcttacatcgctttaccggatgacgggctggaaaaatgggtttgaaatgaaaacaaacgatgaacattcgttaatctctcaactcgtctgcatatcataattttatttcaccaaatgtttgttttatgcaaatatatgtcggagaagcctctaacaagtgtatccgttgatggatggacacacaaacgcctccacgccagcgaaaacaaattgagtcgacgaacatgtattcgaacagatttattttatttatcggtccccattcataaacagcttttgcccacgaaactggtcatcgtcgactttgggttggttggttgggttgatgcagtgtccactcatcgagtggctcatttggccggtcattgtgtggcgtttcaattagcactttcataactttaaccacctcgtcaagtggcagacaacccggtcaaaagccgtcactgtagctgccactgccactggggcttgttattgcattctattttcaatttgttgacactccaagtgcctccgccgagtgtgtgaatggtgtgtgtgccggttgcagtgacccacttttccaccactaaataaacgacttgaaatgccgctaacttgccgggtttatccgctaactgttttaaagggtctgtcatgggttatatttagaacatctgccatgtaagggtctcaaataaattgtgttgttatatgagataagatactcaacgaaattgaacttgactctttaaatacaaacaaacaagtcctgtgtaaaattgaaatgttgatctttataaatcttctgaaacaaaagtgcgctttaacttgtacagttcccaagatcccaaggttctgacgggcatgacctggttacctctttcttctagcttttgcatagttttcaacgaatctagttacaactgtactgaaggtgagagtaaataagatctaatgataaacggaatttaattaaaagtttggctgcaccatgtctttcacctttgacataccactacacttaattaaatgatctatcatttaaaagt

SEQ ID NO: 41168 - DNA, 3333 bp, DROSOPHILA
ccagcccgtcatccggtaaagcgatgtaagaagtggccatagcgaacataatacagagcataatacaaccagcttcatcttaccctcgcaagtcggggaaaaaaatacactgcatcaacaatcatcaagcggcaggcaacaggatgtgtggcagccataaaatgtggtgctgtcaagtatttatcttagctttatttgctcacacaattgcggtggagttccacggaagtgcagctcgcgccgaaatcaacttcgaaggcccctcgcctgctcacagtcaggatacagcagctccaacttccaggccaaagcgccgtgtatacgccttgtgtccaccgaaattccatcgcgtgggcaccgattgctactcgctggtcgatcagcgcagcagttggctggaggcgcacttcttctgcaaggacaaaaacgccaatcttacagagccgggtaaacacgccgaccgcaagctgagacttttccttcagaaacaggatgccctatcaggcgaaaatgatcctatctggctaggagccacctatgaccaccacaacaaccgatggcagtggagcatgagtggtcgcaatctgtccaccgactccttcagccgcactgattccgcccaaccgcttgataataactgtgccatctacgatccaagcctcaagtaccgctggtcggcgcggccctgctcggataagctgcgcttcatatgtcagcacaagatgccaaaggtgagcggccccaatcgctacaagatctacaaccgctggaacgccacctatccgaacgagcaggccaacgaggtggtcctggagattcttgaaccgcgtgaaaacgatcgcaggtaccacaggcgtgtcaaggccgaggacagtgacgaagagatgattattcccgaccgtcgacgcaataacaatcgtcgcaacaaccacagaaaccgtcagatcaagaatcagaatcaacatcccaatgatgtgaactaccagccagcacagcaacgccaaaggaatcgtcctcgtacttctactgttgcgccaactactacgcaatcggttagccagtctaatgatgtcctggctccctcacccacgcctcagcagatgactcagtacgatcgtaaattgcaacgtcaacgggaaagggaacgtcgccgacagctgcgtcggcaggaacgccagaagttggctagggagcaaaagcgcgaaaggcaacgtcgccttaaggaggaacgccagcgattgcagcgggaggaacagcagcgcaggcagcgattgcatcacgatgaacccaaaccccaagtgaacccccaagtgaagccccaagtgatagatgaactccgtcagagatctggtgaggatttggataagaatcaaacggacgagcacgaacagaaactaagaaatgaacaggaaaaaaaactaagggaagaacagcaaaagcaacgcgatgaacaggaacaaaaggacagagaggagcaggatagacttaaacaagaggaagagcaggccagaacgcatcagaaagagctcaaggaaaaccaggaacagcaacttcgcgaacttaaagccaagcaggagcgagaaaagcaggaacgggattaccagcagcaaaagcgtgagcacgagctcgagctcctgaagcaacggcaggctgaagcagaccgccagcacgcagcggacgaggaggcagagaagctacgactggagcgcatccaaaaacaacgcgaactggaggcacaacagcgacgagagcgcgaagagcagcgccgcaaacagcgcgaagaacaggaggaacaggatcgccaaaaccatgccaagcgtctggctgaagagaagcgactgcatgatctgtatgccgagcgcataaggctggccaataccgagcgggagaagcaacttgccgaggcccatgaagccaagcgacttgaggagctgaagctgcaagagcagcttaagaaacaggaggacgagcggcaggagcagattcgacgcgagcaggaggaggaggaaaagcgcctggaactggagaggcttgaggaggctcgccgcttcgaggagaaggaactaaagcgcctgcacgaggagaaccagcggcgcgaggagcagaagctccagcgcgagcgggaaatagcactccgcgaggctgcggagaaaaaactagctgaggaggaggaaatgctgcgcaaggaagtggctgaagaggaacgcaaagttaagcagcgactagaagatgaaatgcgacaggcagaagaggcgcgtaaagccaaggaggccgaggaacgggctgccgaagaggccaaggccgccgagcagaagcgacgcgtggaggcggccaaaaagaaggccgacgaggaagtcaaggctaagttggaggagaagaggcgtgagtatgtgactcgaatctcggcgctgagtcccgaggaccagaagaagtttatcgagatgcgcaaacggcgcaagcagctgaaggagaaaaaggaacgtgaccagcgggcaaaggaactgaagaggatacagcaagccatgcgattggatgacaacgagtagaagtccaggcggcagtcaaatcgccacgcactaaccaatactaaccgatacatatcgatcacaattggttccacatacgcaccgttgcccagtcgatcccttttcgattgttttctttgtgctttaattaaaacaaaccacaagatgaacacgcaaaagtattatttatcagaagagaaggaagaatggaggaacatcgctgcgaagcagattttgtcggttaattaattgcatttcgatcgagcaggaaacccaatctccatgcgcttcgctagctattttagtactgtacagtaaagatatactatatataggtctaggatatggacacgccacatactcacgcagcacacaggacacaccgtaaacacacggcaaccagtcacgcatgtttccttaataaccgaactagaagttagcaatcaattttagaaccaataaaccccacacagacgcaaaatcaattttttaaactcaagcacagaaccacggatatatttatagtgagtaaagcgtaagattgaatggaaaactcctttgggtcaaagtccagcagtgtccaagtcccatgcctccccacactgggtttgcctatggtgtcctcgaatcgggcacagcgaagcaataatttactactaataatcttttgataacatcatcggatggtcaccgaccatttcctaacttctagattacaaaactatattttacaaagatgtatgtaataactaaagtatgtttaaatgtaaatttttatgtattttttaatacctcaaacgcgaaaggc

SEQ ID NO: 41169 - protein, 800 aa, DROSOPHILA
MCGSHKMWCCQVFILALFAHTIAVEFHGSAARAEINFEGPSPAHSQDTAAPTSRPKRRVYALCPPKFHRVGTDCYSLVDQRSSWLEAHFFCKDKNANLTEPGKHADRKLRLFLQKQDALSGENDPIWLGATYDHHNNRWQWSMSGRNLSTDSFSRTDSAQPLDNNCAIYDPSLKYRWSARPCSDKLRFICQHKMPKVSGPNRYKIYNRWNATYPNEQANEVVLEILEPRENDRRYHRRVKAEDSDEEMIIPDRRRNNNRRNNHRNRQIKNQNQHPNDVNYQPAQQRQRNRPRTSTVAPTTTQSVSQSNDVLAPSPTPQQMTQYDRKLQRQRERERRRQLRRQERQKLAREQKRERQRRLKEERQRLQREEQQRRQRLHHDEPKPQVNPQVKPQVIDELRQRSGEDLDKNQTDEHEQKLRNEQEKKLREEQQKQRDEQEQKDREEQDRLKQEEEQARTHQKELKENQEQQLRELKAKQEREKQERDYQQQKREHELELLKQRQAEADRQHAADEEAEKLRLERIQKQRELEAQQRREREEQRRKQREEQEEQDRQNHAKRLAEEKRLHDLYAERIRLANTEREKQLAEAHEAKRLEELKLQEQLKKQEDERQEQIRREQEEEEKRLELERLEEARRFEEKELKRLHEENQRREEQKLQREREIALREAAEKKLAEEEEMLRKEVAEEERKVKQRLEDEMRQAEEARKAKEAEERAAEEAKAAEQKRRVEAAKKKADEEVKAKLEEKRREYVTRISALSPEDQKKFIEMRKRRKQLKEKKERDQRAKELKRIQQAMRLDDNE

SEQ ID NO: 41170 - DNA, 9462 bp, DROSOPHILA
gaattcaaataacaaaaagaagaggtactttaaagcgttagaaatgggtatacaaaataagagagacaggtttcgagttctcacaaattagtcattaaattagacctataatgttctacaggaaacagcgtgactttgtttgggaaattatcaaattgaatggttacttccttaaatggaaaccagtttgcctttgaatcacttctagaagctctgaccaaataaagccgccaatttcgtagctacaaatgagttgtctgtctgtttaatttgtgtggcacttcctagatttgttttttttgttaggcattactgtgccgcgtggagtgttgcacatgcagttgcagtttcggccgtgtttagaaagtcatttgcaaacagtcgacaaaataaacgacaaacagtagccatgcagctgcaactggcgattacccaaccgcaatcgatgggttttccaggcagagagagagatgtgacaatcacagtacagtaaattatgtggttgtcaagcccatctatccatttccacattttcccaaccaccaattctggcagtccatgaagtcaacagcagcggcggccacatcatcatcagcaaaatttcaataatttcattatcaagatgaagattgattgataagctagctgcctgggcaaatggcagtgtgtggccatgatttcggggctggatgatgaccacatggccacatggcacagtcgcaattgctgggctcaacttctccactcaatcaatattgagtcatgcggcagaagttgagattgcgttgcaggcggcagtgaaagttaattgtgagcttgcgcaatattttgcaaagaaagtttaggcttacgaactaacaacctcatcatcatcatcttcatcaaaccataactcacgaccgcttaactgattcaatgtttttttcccatttttcccttgcagaatatggcctaaggttgtttcgtcggcgggagcaatagcaaaggtaaagtctaagcgatgtcgtcctcgatctgttcgcacttcacccagaatgcctggaagaaggatttgtgctcgaactgcttcaagtccaaggatgagcacaaggcagccgctgcagcagctgcctccaaaatgggtggcggccataagccggacaaagaggtcaaaacggattaccccaacaagcacaagactccggcgaaaagcatcatcaagaaggctttcggtgtcagactgaccggtaccagttcaagttccagcggctcgggaaatggctctggaaagtccgttaactcaaagggcgtcaaggtgtgctttcccaagcaactgcacgaaatcatcggctatggcggcgagtggtcggaggacgacgacgacgatgacgatcacgattttatgaaccttggcaatgagcacgatgacatggccattagcgagacggatgacgaggagaccaaagagctgaagaggataaccagggccaacacagacttcaatatgaacaatggcaatctgctgggcgatgccgaggagaatatcaagaaatcctttgccgccttaaaactgggagcccctcaggtcgacaaagagggcaagaaacagaccctaacgatcaatgtgatgccctttggccagcccatgggcaaatccgcaccggctccagcgaaaactgcgtccgcggaaagcaaaagcacagcagcaaaatcagttgcatcatcattggctggtgcaacaccggcaaaagccaaaccagcgaccataaccacagccacagccatcaagagcagtagtacaactactgcaattgccagtgttaccaaaaaggtgaccaccaccctaacgcccacgctaaccatggccaaaagcacaacgcccagcgcaacaggggcagctgccgcaacggcaactcaatcgcgagatggcaaagatagtccacccattgagcgggcaatggagaagtcactgctggacgaaatctcggagacattggagcagaagcagaagctaagtgagacaaatgcatcggacgcatcttcaggcggaagcggaagcaacatctccacatccgccagcaacagcaatagccacaacagcagcaagatcaaattcgagctgagtgcgctaagtgactccccaaagccatttctcgaccttaagaagcccatcgcacggaatgcgcccatcaccagggaccaggccaagcccaaggtgaacgtgtgccacaaatactcggacacggacagcaattgttcggatacggaaaatggtgtatccgcctactatgatgtcgtcgagacccaattgagctacgagaatcttcccgatggcaaatactccgagcaggtgggcgtagcaactgccgcacagacagatagttccagcaattcacactactccagctcgcagtacatcacggatatgctgcttagttcaaagacccgggcagccagctacaatcttcacgagggtaactttatgaccagcaagattacgtccgatggtctgatcgtcaccaagtgcagttcggatgacgccctagactccacgggcagcagttttgatggcagttcggatgaggagaatgcctacaatatgattcgcagtgaatcggattcgggaatcggcattagcttgggtagcgagtacaagaatttgggattggccaagggcacggcggccagtggggaaaagcgtcaacttctggcggagaagaagctgagtgccagtaccaataactcagattacgaggatattcaaataggcgatcaagcggtgcccaagccagcggttaagagccgggagctacatggcgaacccgatggcagtgccgatccggacaacagtctggagcagaaacaaaagcagacggtcgaaaaggaggcggagcagcagcttcccgccctgccaaagtcaccgccaccgcccatgaagatcgatgccaggccgtcgttcctacacggtctcaaaaaaccagaactcccggtgaaaccacttgtcaatagccatcccagcagcaatgctaccagcaatggcagccagctgaaaagcttcctgggcaaacgacaacccagctgcgccgagcagcagttcatcagccagctgcagtcggccatttccaagtccaccgagtgtctccagttggccaaagagaatctagccgctgatgaagccaagctaaaaaagggcaaagccccgaatccaccgccagagccaaagcttagcgctccgcccacgccggaacgagattacagtctggtagttgagttcgagcaggcgacaaaggcggcagcaaagccagcggaaaaggccacgtcatccggcccaagtgagacatcatcatcatcgtcatctaccgagagccaagcgacagcaacaggtgctcccgccggaaccgcaggagcagcaactgtagcagctgcatctgcaaccaacaacagcagcctttacaccaggaagccagctcttccggtggcggcagcagctcccgtcattcgagagaaggacaaacgcgagcgtgccgtgatcaatcccaagttccggagtctcaacacattcgtgatgcagcgcaccaatgcggccaagcagatgcagctgcaatcggccagttcggttttgagcctgaagcaaccgatgacaccggagccaacgccccggaatcaacgtcatctctccatgtccgaggaatgtctggccgcggctggtttggataagaaatccccttctgcgtcaccgccacagaaacaaaagtccaagttctccatcaagaagttcctgcgcatgggcaccaatggaggcaagtccggtgaatctctggccaagcgggagagcagcgtgtatacggaaatatgcaccggcaccgaggagggcaatgcctctgggaaaccacgtctcgtgattatccatcccattgacattaatcccacggccgtggaggtagtgaaggatatcaccaagactagtgattccgtttcggcccagacagtggccgtggttacggcaaagccaccagctccgccccttcgatcgagcgccagtgagggccaacgagcccatgaggccaacaagccggcacgccctccgccgcccaagagcgccgagctccggcggaagcagaaaaccgaactgaccgccacgctcagcgccagcagcgtggactccagtgtcctgccactggcaaccggcagcggatccgtgaagctgaaggccgacaatgtttacgccaatttgggtaagttaaaaaacaaaccagaatggtaaaatcagtttaaaaatttattttaaccttattaggttgaaaagattttctaggtaattctagatagttaatgattaagccaggttagaattaaacattttaaaagtaaaggtattcctagtaaaactatctttgattaaaagggtttttaattcagttaaataggataaattaaagtctttggccaatttgccataatggtctaaatgtagaccaaataagccttttattcgcacacatttttttttggttttagagcactgagattcctgcataatgagtaagcggaattccgccaatcatgaagtcaatttcaatctcgttcccattgacacgattccatgagctgtgggcgacatacatacatatgtgtccccttttcccgcatccatttctcccggccattgtgatcgcattccaaaagaaagcgtaagcaaatcacgttcactgacagcgcccagaaattgggcgaccttcaaaacacagccagctcatgtatcgtatgtatcgtacatgtacaatatgtgggtctgaagggtttcggccacttcacccacttccttctgccaacttgttgacttcaattgcagccacaaatacgaaacgcgagagtcgaaaaacaagaacacgaataaaattgccgtaaatggtaaaagctgtgccagcaactcctcggaaagtagaacccaaaacccaaacgcagaacaagttacgcattttaatcaatataacgggcgaacaaacaaatacattcagcgtagtacggatacaggtacaggtacgccacttatgaccatatccgccgcatccaaacgagtgtgatgagccggctcgaactgggttaagtggccaagccagagagcaaaatagtttgccagatgagcgcaaaaaaaaaaaataaaaaaaatcgaaacgaaaataagccaggccgaaccaatgaggtaacccaaccacatgttgatggtggatagttggtcggtggaaagaaccaaatggtgaaactgccagactggcggaccagagacccatttcttttggcctgacactttgcggtcaaagcgaatgcggcgagaacttgttacacctgccgctgcaactggcacctggaaccttgtcgtgctattaaagctatattccagaccccaacctgaagccatttgttagatatcgaggacggtgaagagcgccagaaagacccagatccgagagcaacctcattcaagctgaccaccagcagcagcagcagcagcagcagcagcaccatgcgaattgtaatttggcacgaatgtgggtcaaaatcgcaattagtactcacaggttgtctaactacttggcccccaggtgtagaaatacgagggtggagccggattttccgcaattcttggatgccagcaaaccagaaaaatgcagaaagccactgacactttttaacactctacttgcggcaataaaaaatatccgagtgttttgctaccctggagcaggtcattttctgtatgcataaaatttgtatgggtggaagaatttttgtactcaatttaaatatatatattttttttgctttgtttattatttaaattaaatgtattattttaggcacttgcctttttctgattgtttgtcttctctatcctccgttatgagtggcacaccggggtgcttgacttcacctgcaggttttgactgcatgtcctgcactcggtcccgcacccattcgatttgattagttattaattacttagactggtagcaatgcatctcacttaactaaatttcaaattttctatgcttcacaggtgaaatccgctcatcgattgcgcccagaaagccggagcgcacggccagcatgcgggaaagggaggcccaactggaactggtgcgcaagcgtggagtcctcaccgacactatctccatttgctcgtcaaacggtgacaatgtagccacggatcagggcaagacgatgggtaagaccaatgccaacagcagcagcagtggtcaggaggcaggaaagtccgcatcgactgccaacagcaggaccagcacctttgagcgtataccccaaaagaaaagcgagccgaagatgtcgatctccagcaaactggagatcttcgagcagcgatccatggatgcagcggatgctgcccagcgcagcagtctcaaggattcagtccgcaagatcaacagcaccatcgatagctatctgaaggacaagcgcgactatgagaacatgtacgagttcgtgaagatgggttctccgacaccgccagctgccaatggaaataccacacccacgccctccacatcgactcctcctccgccgccaacgcgcagcaacatcgatctgtccgtggctggccagagattgacccaggccacgagacgtaacaatatctactcggacacggcctccattgccagttattcgcgcagcgagtatggaccggtgcgaaactacggattgaacaacagcttgggtaggttataagatccttgctagaaaaaaacctcatacgaacattgagcactaaaagtttattgtaactaatacctaatacctccactttcacttttagccaacattccacgcatcatctccgcctcttatgcgggcagtgaggtgggcgagttcgatatctatgctccgtacagctattacggtagcgaggcgggcggcgatgtggccacggacatcaacgacagcgtttggggcatgccacaggtgaattcaatcttaacaataactacagcaagaaataaaaacttattaaaaacgtttactttcataggctaacaagaaccgcagcaaggccacgaatcgtttgcgcatgcgcaagggacgcagtgtcgtgcacaagaccattgaggataactacaccgccgtggtggtggccaatcacgaggccctcgcccaggtgctagatcaggtgggaatacacatactaataatttaaaacaactaaactaattatattcctaatcagcttcagcaaactccagtggtgccggccgccttgcgtccgctggccaatgccatcaacttgcgctacgaggactttaccattttggagggaacccaagcctttgtggtgggcaagaaggccttccatgccgccctgtggagctcctcgccggtgaccttggccctgtcggccgactgcaaccaactgggcggcgtggctggggaactcagccagctgtcgggcggagtgagcgatgtgctcaatccggtgaccgaattctgtgacctggtgcccagctatcaactgccgctgatgccctcgacggaggtgaccctgctgcaggccaccatctcggtgttgccccgtttgcagctggagaccctacaatcgatcggatcaatactcaagggcaagtcgcaggtgctggacaagagcaacttcaatttccgcggctcgattccaaatctcagtggcctgaaggatggaaatggtttaattgctggcaatctaaggaatgtagtctcggtgcagaatctaagtacactgaacgaagaatcctcggccaattcgatgggcgcagaagatggatcaacgaatgcaaatgccatgcctgcattcgatgatgtgatgacgcgggaggtggccttcatcatgctgcagctggtcaacggaatgaagaatctgcaggccaaggcgatcgaggagacgccgctcagtctgtccaatgtggtgctgtccaaggacatggacaacaaggacgcccaggcgcgactctgtgtgctgcaggggtgagttgggatcaaactctaaaacttataaatcttactgataatcgctttgcccatttagaaacaacaatgacgacgacgagcccatgggtacgctctgtaaatgtgcccactcggccttgaccgacatgctgcccgcaacaaagatcacgcccatcctggcggacattctgcagcaggagcgagccgagtccctgtccaaggcgaaggctgtgctggagttcgtactgtggggcccttcggatgtggcgctcaccggatccgctaaggagcgggagctagaccttcagcgctggctggatttggagagggccaccgttctgcacggattggtgcgtacccgggtcgagctgaccgtttacgacgagtgtcatttgatgttcctcgtccgctccacggccaagatgatgaacgatgcagcaaagatcgtgtgcaactaccagcagatgaatggatctgccagccaggattagttccactcagtctgctagttaagcctgctcaatgctaaaggaattatcatttaaataatatacgaaactgtcatagacacttagtccttagagtcaacgaataatatcttctgaattgctccataaaaacatactatacgtacatacatatatctatatctttgcccagcgtgccaaattgtttcgcgcggaaattgtcatgtaaaaatatgcttaacgaatgcaaactcaaacgatttgtgcaactctaatttattagtaatctattgttaagtcattaatctaaacgaatatttatatatcactattcgaggacgaaaagttgtatacttcataagatggcaactatctatgggtatgccaacaatttgattagcaaaactaaactttttggtgtttgaacaaatacatacatgcatatatggtaaacataaataaaatacagtctaaataaataaatggaaaactaaaacccagagcttttattcttcagaataaagataatcatatttcgcttcaaagaaaatacgtacctcgcataatcagcgatcgaatgttcaaattttctgatgcaattttttatacttataaacttaaattttgcaattgaaaattgtttgtcagctgaattggcgtcaagaaaacagctgattagataaaatattcgctcgataacttactctctttcgaacaattgttttgaacctatgccaataaatttgaccaatcccatcagcgataatacttattattcgattcaaataactatgggtattttcgatagtgggctttaactatcatgtgtcagaaaaactatgatattaatggtcataccacatatgtcgatatttattacatatgtaatatgcatatattatgcacttgtcgatcttttttttaattctccaccactatttaatgcttagttcctatctattaaagatatatcttaaagaaaaggtatattctagtcggtactaattcccagaaatatacatat

SEQ ID NO: 41171 - DNA, 5355 bp, DROSOPHILA
atgtcgtcctcgatctgttcgcacttcacccagaatgcctggaagaaggatttgtgctcgaactgcttcaagtccaaggatgagcacaaggcagccgctgcagcagctgcctccaaaatgggtggcggccataagccggacaaagaggtcaaaacggattaccccaacaagcacaagactccggcgaaaagcatcatcaagaaggctttcggtgtcagactgaccggtaccagttcaagttccagcggctcgggaaatggctctggaaagtccgttaactcaaagggcgtcaaggtgtgctttcccaagcaactgcacgaaatcatcggctatggcggcgagtggtcggaggacgacgacgacgatgacgatcacgattttatgaaccttggcaatgagcacgatgacatggccattagcgagacggatgacgaggagaccaaagagctgaagaggataaccagggccaacacagacttcaatatgaacaatggcaatctgctgggcgatgccgaggagaatatcaagaaatcctttgccgccttaaaactgggagcccctcaggtcgacaaagagggcaagaaacagaccctaacgatcaatgtgatgccctttggccagcccatgggcaaatccgcaccggctccagcgaaaactgcgtccgcggaaagcaaaagcacagcagcaaaatcagttgcatcatcattggctggtgcaacaccggcaaaagccaaaccagcgaccataaccacagccacagccatcaagagcagtagtacaactactgcaattgccagtgttaccaaaaaggtgaccaccaccctaacgcccacgctaaccatggccaaaagcacaacgcccagcgcaacaggggcagctgccgcaacggcaactcaatcgcgagatggcaaagatagtccacccattgagcgggcaatggagaagtcactgctggacgaaatctcggagacattggagcagaagcagaagctaagtgagacaaatgcatcggacgcatcttcaggcggaagcggaagcaacatctccacatccgccagcaacagcaatagccacaacagcagcaagatcaaattcgagctgagtgcgctaagtgactccccaaagccatttctcgaccttaagaagcccatcgcacggaatgcgcccatcaccagggaccaggccaagcccaaggtgaacgtgtgccacaaatactcggacacggacagcaattgttcggatacggaaaatggtgtatccgcctactatgatgtcgtcgagacccaattgagctacgagaatcttcccgatggcaaatactccgagcaggtgggcgtagcaactgccgcacagacagatagttccagcaattcacactactccagctcgcagtacatcacggatatgctgcttagttcaaagacccgggcagccagctacaatcttcacgagggtaactttatgaccagcaagattacgtccgatggtctgatcgtcaccaagtgcagttcggatgacgccctagactccacgggcagcagttttgatggcagttcggatgaggagaatgcctacaatatgattcgcagtgaatcggattcgggaatcggcattagcttgggtagcgagtacaagaatttgggattggccaagggcacggcggccagtggggaaaagcgtcaacttctggcggagaagaagctgagtgccagtaccaataactcagattacgaggatattcaaataggcgatcaagcggtgcccaagccagcggttaagagccgggagctacatggcgaacccgatggcagtgccgatccggacaacagtctggagcagaaacaaaagcagacggtcgaaaaggaggcggagcagcagcttcccgccctgccaaagtcaccgccaccgcccatgaagatcgatgccaggccgtcgttcctacacggtctcaaaaaaccagaactcccggtgaaaccacttgtcaatagccatcccagcagcaatgctaccagcaatggcagccagctgaaaagcttcctgggcaaacgacaacccagctgcgccgagcagcagttcatcagccagctgcagtcggccatttccaagtccaccgagtgtctccagttggccaaagagaatctagccgctgatgaagccaagctaaaaaagggcaaagccccgaatccaccgccagagccaaagcttagcgctccgcccacgccggaacgagattacagtctggtagttgagttcgagcaggcgacaaaggcggcagcaaagccagcggaaaaggccacgtcatccggcccaagtgagacatcatcatcatcgtcatctaccgagagccaagcgacagcaacaggtgctcccgccggaaccgcaggagcagcaactgtagcagctgcatctgcaaccaacaacagcagcctttacaccaggaagccagctcttccggtggcggcagcagctcccgtcattcgagagaaggacaaacgcgagcgtgccgtgatcaatcccaagttccggagtctcaacacattcgtgatgcagcgcaccaatgcggccaagcagatgcagctgcaatcggccagttcggttttgagcctgaagcaaccgatgacaccggagccaacgccccggaatcaacgtcatctctccatgtccgaggaatgtctggccgcggctggtttggataagaaatccccttctgcgtcaccgccacagaaacaaaagtccaagttctccatcaagaagttcctgcgcatgggcaccaatggaggcaagtccggtgaatctctggccaagcgggagagcagcgtgtatacggaaatatgcaccggcaccgaggagggcaatgcctctgggaaaccacgtctcgtgattatccatcccattgacattaatcccacggccgtggaggtagtgaaggatatcaccaagactagtgattccgtttcggcccagacagtggccgtggttacggcaaagccaccagctccgccccttcgatcgagcgccagtgagggccaacgagcccatgaggccaacaagccggcacgccctccgccgcccaagagcgccgagctccggcggaagcagaaaaccgaactgaccgccacgctcagcgccagcagcgtggactccagtgtcctgccactggcaaccggcagcggatccgtgaagctgaaggccgacaatgtttacgccaatttgggtgaaatccgctcatcgattgcgcccagaaagccggagcgcacggccagcatgcgggaaagggaggcccaactggaactggtgcgcaagcgtggagtcctcaccgacactatctccatttgctcgtcaaacggtgacaatgtagccacggatcagggcaagacgatgggtaagaccaatgccaacagcagcagcagtggtcaggaggcaggaaagtccgcatcgactgccaacagcaggaccagcacctttgagcgtataccccaaaagaaaagcgagccgaagatgtcgatctccagcaaactggagatcttcgagcagcgatccatggatgcagcggatgctgcccagcgcagcagtctcaaggattcagtccgcaagatcaacagcaccatcgatagctatctgaaggacaagcgcgactatgagaacatgtacgagttcgtgaagatgggttctccgacaccgccagctgccaatggaaataccacacccacgccctccacatcgactcctcctccgccgccaacgcgcagcaacatcgatctgtccgtggctggccagagattgacccaggccacgagacgtaacaatatctactcggacacggcctccattgccagttattcgcgcagcgagtatggaccggtgcgaaactacggattgaacaacagcttggccaacattccacgcatcatctccgcctcttatgcgggcagtgaggtgggcgagttcgatatctatgctccgtacagctattacggtagcgaggcgggcggcgatgtggccacggacatcaacgacagcgtttggggcatgccacaggctaacaagaaccgcagcaaggccacgaatcgtttgcgcatgcgcaagggacgcagtgtcgtgcacaagaccattgaggataactacaccgccgtggtggtggccaatcacgaggccctcgcccaggtgctagatcagcttcagcaaactccagtggtgccggccgccttgcgtccgctggccaatgccatcaacttgcgctacgaggactttaccattttggagggaacccaagcctttgtggtgggcaagaaggccttccatgccgccctgtggagctcctcgccggtgaccttggccctgtcggccgactgcaaccaactgggcggcgtggctggggaactcagccagctgtcgggcggagtgagcgatgtgctcaatccggtgaccgaattctgtgacctggtgcccagctatcaactgccgctgatgccctcgacggaggtgaccctgctgcaggccaccatctcggtgttgccccgtttgcagctggagaccctacaatcgatcggatcaatactcaagggcaagtcgcaggtgctggacaagagcaacttcaatttccgcggctcgattccaaatctcagtggcctgaaggatggaaatggtttaattgctggcaatctaaggaatgtagtctcggtgcagaatctaagtacactgaacgaagaatcctcggccaattcgatgggcgcagaagatggatcaacgaatgcaaatgccatgcctgcattcgatgatgtgatgacgcgggaggtggccttcatcatgctgcagctggtcaacggaatgaagaatctgcaggccaaggcgatcgaggagacgccgctcagtctgtccaatgtggtgctgtccaaggacatggacaacaaggacgcccaggcgcgactctgtgtgctgcagggaaacaacaatgacgacgacgagcccatgggtacgctctgtaaatgtgcccactcggccttgaccgacatgctgcccgcaacaaagatcacgcccatcctggcggacattctgcagcaggagcgagccgagtccctgtccaaggcgaaggctgtgctggagttcgtactgtggggcccttcggatgtggcgctcaccggatccgctaaggagcgggagctagaccttcagcgctggctggatttggagagggccaccgttctgcacggattggtgcgtacccgggtcgagctgaccgtttacgacgagtgtcatttgatgttcctcgtccgctccacggccaagatgatgaacgatgcagcaaagatcgtgtgcaactaccagcagatgaatggatctgccagccaggattag

SEQ ID NO: 41172 - protein, 1784 aa, DROSOPHILA
MSSSICSHFTQNAWKKDLCSNCFKSKDEHKAAAAAAASKMGGGHKPDKEVKTDYPNKHKTPAKSIIKKAFGVRLTGTSSSSSGSGNGSGKSVNSKGVKVCFPKQLHEIIGYGGEWSEDDDDDDDHDFMNLGNEHDDMAISETDDEETKELKRITRANTDFNMNNGNLLGDAEENIKKSFAALKLGAPQVDKEGKKQTLTINVMPFGQPMGKSAPAPAKTASAESKSTAAKSVASSLAGATPAKAKPATITTATAIKSSSTTTAIASVTKKVTTTLTPTLTMAKSTTPSATGAAAATATQSRDGKDSPPIERAMEKSLLDEISETLEQKQKLSETNASDASSGGSGSNISTSASNSNSHNSSKIKFELSALSDSPKPFLDLKKPIARNAPITRDQAKPKVNVCHKYSDTDSNCSDTENGVSAYYDVVETQLSYENLPDGKYSEQVGVATAAQTDSSSNSHYSSSQYITDMLLSSKTRAASYNLHEGNFMTSKITSDGLIVTKCSSDDALDSTGSSFDGSSDEENAYNMIRSESDSGIGISLGSEYKNLGLAKGTAASGEKRQLLAEKKLSASTNNSDYEDIQIGDQAVPKPAVKSRELHGEPDGSADPDNSLEQKQKQTVEKEAEQQLPALPKSPPPPMKIDARPSFLHGLKKPELPVKPLVNSHPSSNATSNGSQLKSFLGKRQPSCAEQQFISQLQSAISKSTECLQLAKENLAADEAKLKKGKAPNPPPEPKLSAPPTPERDYSLVVEFEQATKAAAKPAEKATSSGPSETSSSSSSTESQATATGAPAGTAGAATVAAASATNNSSLYTRKPALPVAAAAPVIREKDKRERAVINPKFRSLNTFVMQRTNAAKQMQLQSASSVLSLKQPMTPEPTPRNQRHLSMSEECLAAAGLDKKSPSASPPQKQKSKFSIKKFLRMGTNGGKSGESLAKRESSVYTEICTGTEEGNASGKPRLVIIHPIDINPTAVEVVKDITKTSDSVSAQTVAVVTAKPPAPPLRSSASEGQRAHEANKPARPPPPKSAELRRKQKTELTATLSASSVDSSVLPLATGSGSVKLKADNVYANLGEIRSSIAPRKPERTASMREREAQLELVRKRGVLTDTISICSSNGDNVATDQGKTMGKTNANSSSSGQEAGKSASTANSRTSTFERIPQKKSEPKMSISSKLEIFEQRSMDAADAAQRSSLKDSVRKINSTIDSYLKDKRDYENMYEFVKMGSPTPPAANGNTTPTPSTSTPPPPPTRSNIDLSVAGQRLTQATRRNNIYSDTASIASYSRSEYGPVRNYGLNNSLANIPRIISASYAGSEVGEFDIYAPYSYYGSEAGGDVATDINDSVWGMPQANKNRSKATNRLRMRKGRSVVHKTIEDNYTAVVVANHEALAQVLDQLQQTPVVPAALRPLANAINLRYEDFTILEGTQAFVVGKKAFHAALWSSSPVTLALSADCNQLGGVAGELSQLSGGVSDVLNPVTEFCDLVPSYQLPLMPSTEVTLLQATISVLPRLQLETLQSIGSILKGKSQVLDKSNFNFRGSIPNLSGLKDGNGLIAGNLRNVVSVQNLSTLNEESSANSMGAEDGSTNANAMPAFDDVMTREVAFIMLQLVNGMKNLQAKAIEETPLSLSNVVLSKDMDNKDAQARLCVLQGNNNDDDEPMGTLCKCAHSALTDMLPATKITPILADILQQERAESLSKAKAVLEFVLWGPSDVALTGSAKERELDLQRWLDLERATVLHGLVRTRVELTVYDECHLMFLVRSTAKMMNDAAKIVCNYQQMNGSASQD

SEQ ID NO: 41173 - DNA, 3919 bp, DROSOPHILA
cgattgtgtccatgattcccataaattccctgtacagcgaggagtacttcccaaagcccacggagttcctgccggagagatggctgcgaaacgccagcgattctgccggaaagtgcccggccaacgatctgaagaccaagaatccattcgtatttctgcccttcggctttggaccacggatgtgcgtgggcaaacgcatcgtggaaatggaactggaattgggtaccgctcgtctgattcgcaatttcaacgtggagttcaaccattccacaaagaacgcttttcgctccgctctgatcaacctgcccaatataccactcaagtttaagtttacagatgtgcccaactaatacgttttacaatatattagatatctgttgtgataagataataagtattgttaaacgaatgctttttctacatatatacatcattgcaatgaaatgtttataagtccctctgtttgcaaatattacaaataaaagatgaaaatattttaaatataactattgcacagatttcaaaataaaaggctttgaaattttactaatgaatatctagagagaatgtagctatggccatacatttccccagcatgaaattattattaatagtcatggtgaaaaaaaaattgctggcattgacactgaccgatatgaaagggttaacggccatgttatttgtgtttgttctattgttataaagttccatttaaacatgttaatttaacagttattaattctacatacttgctctatccttttaaatttgattaaaaactaacgaactctttgctcaattattaattgaataaatgttttttttttataaactaccaaataagctctctggaacctgtttatatgcccgttgtctgtggggtcgctatctctctgtttgtgtgctcttatcaaccaattaagcggcaaagctcgcgcggccttaggatttaaagccagtagaacgaactctcgtttcacagttttgtttgggcggtgagccggaaaagttctaatcatcgcaaaaatgctaaaagttcgcagtgctctatcattaattcagtcgcaaaaagcgactctctcgctcgccactcaaaaggtgaatacttgtatttaatataaacaactaatctaggaactataagcccgtttatcaagagctggttttgcttcatatgtttattttgttgtttaattgctcagcatacggagtacttcaaaatattactatatatttatatcaataaactatattaccagcgctggcaaactaatgtggcgactgcagaagctagagaggattcggaatggctgcaggctaagccatttgagcagatccctcgactcaacatgtgggcattgtcgatgaaaatgtccatgccgggtgggaaatacaagaacatggaactgatggagatgtttgaggcgatgagacaggactacggcgatatattctttatgccaggtattatgggtaacccaccattcctaagcacccacaatccccaggacttcgaggtggtatttcgcaacgagggtgtgtggcccaatcgtccaggcaactatacattgctctaccaccgcgaggagtacaggaaggacttctaccagggcgtcatgggcgtcattccgacgcagggcaagccatggggcgactttagaaccgtcgttaatcccgtgcttatgcagccaaaaaatgtgcgattgtattacaagaagatgtcgcaagtcaaccaggagtttgttcagcggtaagatactttcacaagaatagtaattcatacaccgaagataaccaattttctcgacagcattctcgaactgagagatcccgatactcttgaggctcccgacgacttcatagacaccatcaaccgctggaccttggaatccgtatccgtggtggccctggataagcaactgggtttgctcaagaactcaaataaggaaagcgaggccctcaagcttttccactacctggatgagttctttatagtatccattgatctggaaatgaagccctcgccctggcgctacattaaaactcccaagttgaagcgattgatgcgagctttggatggtattcaggaagtaactctggcctacgttgatgaggctatagaacggctggataaggaggccaaggagggcgtggtgcgtccggagaatgaacaaagtgtgctcgagaaactgctgaaggtagacagaaaggtggccactgttatggccatggatatgctaatggcaggagttgatacggtgagttattggtagtacgatcttaagaaggcgtcgtgtaattcaacatcctgcattccagacatcgagcacctttacagcactattgctgtgccttgccaagaatcccgagaagcaggccaggctcagggaggaggtgatgaaggtgctgcccaacaagaattccgaattcactgaagcatcgatgaagaacgttccctatttgcgtgcctgcataaaggaatcccagcgattgcatcccctgattgtgggaaatgctcgcgtccttgccagagatgctgtcctcagtggataccgagtgccagctggaacttacgtgaacattgttcccctgaatgccctgaccagggatgagtacttcccacaggcatctgagttcctgccggaacgctggctgcgaagtcccaaggactcggaatcgaagtgtccggcaaatgaactgaagtcaacgaatccattcgtatttctgcccttcggatttggaccacggatgtgcgtgggcaaacgcattgtggaaatggaactggaattgggtaccgctcgtctcattcgcaatttcaacgtggagttcaattatcccacggagaatgcgttccgatctgcattgatcaacttgccaaacattccgctcaagtttaaattcatcgatttaccaaactaacctatagatattaaaagcgatatacagtcatggtcaaaattattttcacaaagtgcatttttgtgcatgggtcacaaacagttgcttgtgcagcaagtggggggaggtgaaatgcaaaaaaacttttgcttttgcaaattcaaacctatgcagagtcagatgaaagaagaattgaaaaaataactgttcctatgcgcaaggaagaggcaaatgaagagatctttatcagttgtcagaagtatttgcacacggtttcgtcgcatcacaattattttcacaacgcaatttcttcttcagtgattggtttagagtgacaagtgccggtttgtttgcttaaatacatttaaattattgaataaaaattagatttaatcattttcctattacagttattaaataaaatgcccaaaacaaaagagttaacagttgaggcccgggctggtattgttgctaggtttaaagccggtacacctgcggccaaaatagctgaaatatatcaaatttcgcgtagaactgtctactacttaataaaaaagtttgatacagttggcacattaaaaaataaaaaaagatcaggccgaaaacctgtgctggaccaaaggcaatgcaggcaaatacttggagttgtggcgaagaatcctagtgccagtccggtaaaaattgccttagaatcaaaaaatacaattggcaaacaagttagtagttctacaattcgtcgcaggctaaaagaagctgattttaagacatacagttgttcagcaaaacgattgagatcacaccaaccaacaaaacaaaacgtcttcgatttgcgttggaatatgttaagaagcctcttgacttttggtttaatattttatggactgatgagtctgcatttcagtaccaggggtcatacagcaagcattttatgcatttgaaaaataatcaaaagcatttggcagcccagccaaccaatagatttggtgggggcacagtcatgttttggggatgtctttcctat

SEQ ID NO: 41174 - DNA, 1694 bp, DROSOPHILA
ccggaaaagttctaatcatcgcaaaaatgctaaaagttcgcagtgctctatcattaattcagtcgcaaaaagcgactctctcgctcgccactcaaaagcatacggagtacttcaaaatattactatatatttatatcaataaactatattaccagcgctggcaaactaatgtggcgactgcagaagctagagaggattcggaatggctgcaggctaagccatttgagcagatccctcgactcaacatgtgggcattgtcgatgaaaatgtccatgccgggtgggaaatacaagaacatggaactgatggagatgtttgaggcgatgagacaggactacggcgatatattctttatgccaggtattatgggtaacccaccattcctaagcacccacaatccccaggacttcgaggtggtatttcgcaacgagggtgtgtggcccaatcgtccaggcaactatacattgctctaccaccgcgaggagtacaggaaggacttctaccagggcgtcatgggcgtcattccgacgcagggcaagccatggggcgactttagaaccgtcgttaatcccgtgcttatgcagccaaaaaatgtgcgattgtattacaagaagatgtcgcaagtcaaccaggagtttgttcagcgcattctcgaactgagagatcccgatactcttgaggctcccgacgacttcatagacaccatcaaccgctggaccttggaatccgtatccgtggtggccctggataagcaactgggtttgctcaagaactcaaataaggaaagcgaggccctcaagcttttccactacctggatgagttctttatagtatccattgatctggaaatgaagccctcgccctggcgctacattaaaactcccaagttgaagcgattgatgcgagctttggatggtattcaggaagtaactctggcctacgttgatgaggctatagaacggctggataaggaggccaaggagggcgtggtgcgtccggagaatgaacaaagtgtgctcgagaaactgctgaaggtagacagaaaggtggccactgttatggccatggatatgctaatggcaggagttgatacgacatcgagcacctttacagcactattgctgtgccttgccaagaatcccgagaagcaggccaggctcagggaggaggtgatgaaggtgctgcccaacaagaattccgaattcactgaagcatcgatgaagaacgttccctatttgcgtgcctgcataaaggaatcccagcgattgcatcccctgattgtgggaaatgctcgcgtccttgccagagatgctgtcctcagtggataccgagtgccagctggaacttacgtgaacattgttcccctgaatgccctgaccagggatgagtacttcccacaggcatctgagttcctgccggaacgctggctgcgaagtcccaaggactcggaatcgaagtgtccggcaaatgaactgaagtcaacgaatccattcgtatttctgcccttcggatttggaccacggatgtgcgtgggcaaacgcattgtggaaatggaactggaattgggtaccgctcgtctcattcgcaatttcaacgtggagttcaattatcccacggagaatgcgttccgatctgcattgatcaacttgccaaacattccgctcaagtttaaattcatcgatttaccaaactaa

SEQ ID NO: 41175 - protein, 555 aa, DROSOPHILA
MLKVRSALSLIQSQKATLSLATQKHTEYFKILLYIYINKLYYQRWQTNVATAEAREDSEWLQAKPFEQIPRLNMWALSMKMSMPGGKYKNMELMEMFEAMRQDYGDIFFMPGIMGNPPFLSTHNPQDFEVVFRNEGVWPNRPGNYTLLYHREEYRKDFYQGVMGVIPTQGKPWGDFRTVVNPVLMQPKNVRLYYKKMSQVNQEFVQRILELRDPDTLEAPDDFIDTINRWTLESVSVVALDKQLGLLKNSNKESEALKLFHYLDEFFIVSIDLEMKPSPWRYIKTPKLKRLMRALDGIQEVTLAYVDEAIERLDKEAKEGVVRPENEQSVLEKLLKVDRKVATVMAMDMLMAGVDTTSSTFTALLLCLAKNPEKQARLREEVMKVLPNKNSEFTEASMKNVPYLRACIKESQRLHPLIVGNARVLARDAVLSGYRVPAGTYVNIVPLNALTRDEYFPQASEFLPERWLRSPKDSESKCPANELKSTNPFVFLPFGFGPRMCVGKRIVEMELELGTARLIRNFNVEFNYPTENAFRSALINLPNIPLKFKFIDLPN

SEQ ID NO: 41176 - DNA, 8537 bp, DROSOPHILA
catgtatttcctgtatttattttgaaatattattaattgtttgaaatgctcccgcaaggcaggccacttgaaagagaaacgtgcaatttactgcctgtgcttcgactattttgtaattagtgaattcttgaatattaaataatattaaatgtgaaactaatctgatttttaaattgtataaaagaataaaatgaaactattttggaagtgtttgtttggaatgtgaatgggggttcattgttatggtagcttatatttcaagttgatttttctttaatcaacaaagtagctatggcttgaaaaacgtttcaaaagagaatcagttacttttcagtaaactttcaaattttaaacttttcgaaactaactgatttcggtatatttttctgaactgctggtatatttaatcattcgatctgtggtcacacctcaaaccgggctaacttttgagttcaactaagttctttaagaattaccattaaaaataaatatggccacctacgaggaagtcaaggacattccaaaccacccggagaagtacctgttcgatgtgcgcaacgagtcggagctgaaggagacgggcgtcctgcccgccagcataaacattccacgtgagaagcgccaaagtccagggattaccggcttaatggacacgcctttttctaatttccagtgagcgagctggagaaggcactgaacttgccggaggaggacttcgcccagacttatggacgcgtcaagccggccgtcgatgcggtcttgatcttctcgtgcaaggcgggaggacgcgctgcccgggcggccaatctggccagcacgctgggcttcaccaagtgagtctcatgttgaagtacgttttaaaagatatgtacaattatttattaatcaattgcagcgccaaggcttatgccggatcatggacggagtggcaggccaagcagtcctaaaacattcagtctttaaacaaattgattacaaatctataaaatgatataataaactacacgctaacttccttaaattcaccccaactgcgtccgatcctcagcttcaccttgagtggcacgctgagtttcacgcagttctccatggtgaggctaaggactttggctatttttttggcctttcccgttggcacctcgaaaatgagttcgtcatgtaggtgcattaccaggtcaactgaattgtcacccaatgccagcttttcgcgataacgttcaatgttcttttccatcttcagaatagcgttcttcgcaatatccgcagccgatccttggatggtggagttaacggcctggcgctcggcctgatctgtgagaaagggagaaaggagggatgttcaaatggagatcacaatcggttttggaagacacatactttttagatgctccacatcactgttgatattttccaaataccgtcgccgtccagtaatggtctcaacaaatcccttgctgcgtgcgaaattgaccaccctcgtggtgtaatcgcgaatacccttgtacgcctggtgaaactgatcggatatcatccgcgcctcctgctcactgcagtttaacgactcggccagggaccgcatgcccatgccgtagacgattccgtagcacacctgcttggtgctgttgcggaggtcctgcgtcacttcggactcttcgattttgttccaatgcgctgcaattgcgatgaacaggtcctgtgacgatttcatcacctccaacagagccttatcctgagacatgtgggcaaggatccgcatctccagctgacagaagtcagccgacaaaagacatcggctctcatccgtgggcatgaatggtgacctacaggatatgtggaccacatcagagcccacttgtatgctgaattctttggcgacattttgcaggttcggctccgtcatggaaatacgacccgttgccgtatatgtaatgctctggccatgaattctgtctgcctggcagcactccattagcggctgaatgcttttggccaagagcccagacagctttcgatagcctagtatcaaatgcgaaatgggcgagttcaacttctccagcacctggcgtgaggtggtaactcgtccttttgctttccggtggagtcccagcaccttggcaacagcttgtgacgagcccagattgaaacgggaaccatgctgctcataaatctttgtttccactttcttcataacggccaccatgcgctgataaagctgttggagtcgctgcttctgggcgggaaagcccacaagctccatttgacaaagagtcaattgaatgggcatttcgatatctagaaagggattttggttattggtttaggctaaatgaatcaccatgaataaagttaccgtggaaaaacttaagtaagtcaccattgccaatcctgcttaggttctcagtctgtccctggagtatgtgcagcgttacgcaggattcgatggccgtcctaatcctcggcaaaatggcactggaggtatcaagcccgtagctgctataaccacgaccactgccacagagattcgcaaggccagtgcattccggggcgaatgtctggcactgcaaaatcaagaattagaagggattagctaaaaatattctccatagcataccatattgagaaaattcacagttttgtccggctgcagcagccagtttgcgaccttggcatcctccagcttggcgctaatcctttttagctgcggaatcgctttgcgcagcatcttaagctgctcctttccgtcgtgcatgaccagcgtgagatcctttcgagccatcaggttgcacaattcctgcaccttgagaggggtgggcactccctgatatgctgcacgttcgtcaatttgcatattccaatagtaggcaacattgtccgcaagacagaaagacacaccagagatgaagttggtgtcgtccacttggaatagcacacgttccctggcagccgcctcccggttctcggccgccgcaacttgattgatcaagaggttggatccaattagcggcttctgtttgcccgcttgagcctgcaggccaacgctaaatcccaaacgcgtggcgttattgatctcgatgatagcagcttgaaacgcattccggtggccacacacatcgattatatctatagaagagaaactcgacgcagtttcatcgactttcgaacagctcataatgtgcgaggcatttagatgtaaaggatttttcatgagtgggttctccatagacatgtccgagatttccatagaggagaccccattggattcgtttttcgattccaaatcaatttcgatttcacgttgcggggtggggctgggactttgtatgcgctgtgaacgcaactggtcggaacgcttcagtctggatgcatgtggagtcagtgcaccgatcacttccggctccttaggttgcgagctaggtatcacgtccgcctccgtgcaagaggcaattttgctctcagcggccgtgagagcagcggctagaccggtattcagcataaaggaatcgtctgccataaacaaatcctcctctgcgttggaaaccttccttgacgcagtgcggtttgcattgggtactggtgattgatttcgtggatttctgcggggcagttgactattgttcatctcattgtttgggttttccgattgtgtccatcgatttgcgggtgttctattaaccggacttgaaagttggttagacctcgacgcctgtattggctgatccttagactggttctctttttgggtgcgttgctgaatcttcattaaagcgaccctgcggcgttcggccattccctcattaacgagcttccttctagcactttgactggtactcggtttttcttcatttgctaattgtggactacacaccacagttgctggattgattttcatcttttcaatctgagaaccttgtttctggatgtcattcaaattggatattatgggttgtgccgtttttacgtttacgttgttctgacaagggtcattgctaatcgggtttaggttatccatgtgtgcagttgaattccttcgcgccttattttgggcatcgatttctttaagattcgggttcatcttgctttgattagcaatattcttatcaactttatagcctcgctgtgtgtccactactgtttcgagtctgggatttttttgtgaattggctgtgccattttcttcgatggacaatttcctctttactggcggctgctcctcctccagggacatgtggaggtctacctccccgccatcgtgtattgccctcgaagctatttccactcccgcctgagtttgggtccatttaattgtgcccagtccgatctcgtgctgaacaaattgtcgagcttcaccaatcagtagtttggcagcctcgctcactgtcatccccgccttgcctgtgatatagaaatttctaactacatttcgcttggccgcttcatccgcgttctcgtggtcgtgttgctttgcagagtcgaagctgattgagttatagagcaccttttccaattctacgggatcagcgcccgctagctctaccaaactggtgatgccagcatcaaagagagcacgagctcgtttctgcgacagatcgggtattcgcatcagatcgataagatccctgtgaatgccaaagaagagacgatccttaaattgggacacgatcagggcgagtgtggaccactgcagagaattgcagaaagcagtaacaatgcctgcaaaggtcgaggccatttgctgcagactctgtagcattcctcggtggcacttatacttgtggaccacgacgtttatgggtgtttcgtttaccagttcctccagagccagagctatgtagaaactgcaacacattgaagcaatataagtttcgtatttgatcttttcaaaaagctggcttaccgcttatgtatttgcatttgcttgtagtctagttttgtttgaccacgcagcgctttgtagagaaaggcgtccctgactccaacaagctcgcccacttttttcatgggcgaacttaacttttcccacatatgcacatacagcagccagtcgatatcttgaagttggtagcagacagaatagggcgttactaggtaaacagcatgcagttctgactctaggacgaaggagcgacgagatttctggagttccgcaaaaagaatgaggccgtcggtgggcggcatagaggaagccagacaggcggcaccgagacgagtggccacatagaccgctgtctccctttcctcgttcctttgcaggcgaacgaactcgtactccacaagaaagtcgagggcatcgttaatgtagttggcgtccgattcctcatcgggtggtttctcctttgcgtggaaggccttttgggcactcagcagagtacaattcacgaagaagtcgatgtcttctttggtgttcgctacaccagaagaaattacctcgagtagagcgcgcttcaagtgggtctgaaaaatgaaaagcttagttgctatgctctggctatttgcttgaatacttacgcttccgtccatatcgaggcaggaagtaatgggctgcagctccgatacgaccaggtctcttcccattcgggcattgatctcgttgcagatgagaatagactcacccagcgtatcctttcccatgcgtccagctcgtccgatcatctggcggtacgttagggaactcatttgcttgcccccaaataatggcgagcgtatcaggacgcgccgagcgggcagattcactcccgaactcagtgtgctggtggcgactagaaccttcagtgctcctgccttaaacgaggcttcaataatgtcccgctcctccgtagttaggccggcgtggtgaaacgcgcaggcgtaggtgatcgccttcgacatgaccccatcgagacctaagttaaatgaaattaaaatcagggatagggatagagtgtaaattatcaattcgactgatccaacctgtgggaatgtccctgagttgttgcttcacttctgcaatggccctcggatttagatttgttctcaatcgctggcccagcactgtttcagatttgatttggacatggattgcggtggccaattgaacggccaggttctcgcaccaatctttcgaggggcagaacacgattaccgagcatccctccagcaacgtctctatgcagagaagggccacatcatcggaatcgttttccaggcctttcaaaagtaccttttgcttggccacatctcgaactaatttcaaacggtggtcataaattactgtgcccaccttaatcatttcctttagagcaacgggtcggtagtttgtgatgtacaactcggcgtcaagccagctctgcagcagctgcacattctcgagtgtggccgacatggtgatcacctggatctgcagtccattgcgacgggacatgtagaggatcttggctagcagaagttccaggatatagccgcgtcccttgtccgaaatgagatgcacttcgtctaccaccaccatgccaatggtttccagtttgccctgctccatcagcttgttcacaatggagttcgccttctcaattgtgcaaatggccacatgaaggctctcaaagcctcctggtggcgtatagccgccgtagaatccctccacgcggtaaccagccggcgtgagcagatcctgcatgtagaacattttctcgcgcaccaccgagatgaagggcagtatgagcagcacctttttacctcgctccagtacggttttcagcatcagtatctcactaaccaacgtcttgcctgccgacgtgggtgctgaataaaccaggttgcagtgctcaaacagcaatctaggcttggagagacactccacctgccagtcgaacatatcgacaacacccttcttcttgtactccgcttgaatgctcatgggcaggttccatgcgcttattgatctaagcgtgttgagatcaagtggcattgctggtctttcgggcatcgcttcgcggatcctcgaggagttgggcgacactcgcagttggttgggcgacatgctgctcaggttctgcgtgacttgcgaaatctcttgatagaattcctgcttggccaatacggaatgactgtgcaagatgtcttccttcagctgctcggaagcctcttcatcctgcgcaggacacaaaaagctgttctcatccagattgggctgatccagcactgcatccgcgcctgcgtcctcgccctcgaacgaagactgtgtgcagatttggtcattcaaagcggatgagcggctctgatcctcagagtcctgattggaaacaactgccatatgctgctgaacctgagacacattgaccactgattgttcagctggcttatgggcctgattcacttcgtaggagaactcgtcccggaaaaactccgagttaatttcctggatctcgctatttacctcattgccggcactttggacttggatatttccgtttcctggctgtgcattctccttgtcgtccgcttgcattcctttctccagcgccattaaggtgctgtttccgaagttgaacgactgcgagaatgccattgcgccggtgcgtttttatactgaactaagaattgttgcaaactgcttgttacaagtgaaatgaataaaatgaaaacgaaacgtcgcgcggtcaatgtggccgtcttatgattagtttcaaatatactattcatgtttgtgacactttgaatgaactgtttacaccgccagcggtcccactgaaaccttgttcacactgcacgcgactttcttacaaaatatcttaattaaacagattttatttataccgttactttccgaattccatatgcgtgctatggggcatttagcacaaagctaaggtcccactaaaaccttgttcacactgcacgcgcctttcttacaaaatatcttaattagacagattttatttataccgttactttccgaattccatatgcgtgctatagggcatttagcacaaagctaaggtcccactaaaaccttgttcacactgcacgcgcctttcttacaaaatatcttaattagacagattttatttataccgttactttccgaattccatatgcgtgctatagggcatttagcacaaagctaaggtcccactaaaaccttgttcacactgcacgcgcctttcttacaaaatatcttgattagactgatttcatttatacctttactttcttgctaagtgtaagctaagtgtagttaagtgtaagcctgaaatccaagcccaagaccaaaactgaaagcaaaagacccacagcaaaaactcaaaaaactccacgacgcaacaaactcgcgttcgaatcgcaagcaagctgcgctgaaatcgctaacaagccaaccaaaagccgcacgaaagttgcgcccaagccgcaatgaatttaacgctgactttatgaactttaaaagaaacctttggcttatttttgtttatttctttatttgtatatatccttagaatagtttgtgttgttcaagattacataaaatttgtttacatatctattagatcaatatcccatttacatagtta

SEQ ID NO: 41177 - DNA, 6180 bp, DROSOPHILA
atggcattctcgcagtcgttcaacttcggaaacagcaccttaatggcgctggagaaaggaatgcaagcggacgacaaggagaatgcacagccaggaaacggaaatatccaagtccaaagtgccggcaatgaggtaaatagcgagatccaggaaattaactcggagtttttccgggacgagttctcctacgaagtgaatcaggcccataagccagctgaacaatcagtggtcaatgtgtctcaggttcagcagcatatggcagttgtttccaatcaggactctgaggatcagagccgctcatccgctttgaatgaccaaatctgcacacagtcttcgttcgagggcgaggacgcaggcgcggatgcagtgctggatcagcccaatctggatgagaacagctttttgtgtcctgcgcaggatgaagaggcttccgagcagctgaaggaagacatcttgcacagtcattccgtattggccaagcaggaattctatcaagagatttcgcaagtcacgcagaacctgagcagcatgtcgcccaaccaactgcgagtgtcgcccaactcctcgaggatccgcgaagcgatgcccgaaagaccagcaatgccacttgatctcaacacgcttagatcaataagcgcatggaacctgcccatgagcattcaagcggagtacaagaagaagggtgttgtcgatatgttcgactggcaggtggagtgtctctccaagcctagattgctgtttgagcactgcaacctggtttattcagcacccacgtcggcaggcaagacgttggttagtgagatactgatgctgaaaaccgtactggagcgaggtaaaaaggtgctgctcatactgcccttcatctcggtggtgcgcgagaaaatgttctacatgcaggatctgctcacgccggctggttaccgcgtggagggattctacggcggctatacgccaccaggaggctttgagagccttcatgtggccatttgcacaattgagaaggcgaactccattgtgaacaagctgatggagcagggcaaactggaaaccattggcatggtggtggtagacgaagtgcatctcatttcggacaagggacgcggctatatcctggaacttctgctagccaagatcctctacatgtcccgtcgcaatggactgcagatccaggtgatcaccatgtcggccacactcgagaatgtgcagctgctgcagagctggcttgacgccgagttgtacatcacaaactaccgacccgttgctctaaaggaaatgattaaggtgggcacagtaatttatgaccaccgtttgaaattagttcgagatgtggccaagcaaaaggtacttttgaaaggcctggaaaacgattccgatgatgtggcccttctctgcatagagacgttgctggagggatgctcggtaatcgtgttctgcccctcgaaagattggtgcgagaacctggccgttcaattggccaccgcaatccatgtccaaatcaaatctgaaacagtgctgggccagcgattgagaacaaatctaaatccgagggccattgcagaagtgaagcaacaactcagggacattcccacaggtctcgatggggtcatgtcgaaggcgatcacctacgcctgcgcgtttcaccacgccggcctaactacggaggagcgggacattattgaagcctcgtttaaggcaggagcactgaaggttctagtcgccaccagcacactgagttcgggagtgaatctgcccgctcggcgcgtcctgatacgctcgccattatttgggggcaagcaaatgagttccctaacgtaccgccagatgatcggacgagctggacgcatgggaaaggatacgctgggtgagtctattctcatctgcaacgagatcaatgcccgaatgggaagagacctggtcgtatcggagctgcagcccattacttcctgcctcgatatggacggaagcacccacttgaagcgcgctctactcgaggtaatttcttctggtgtagcgaacaccaaagaagacatcgacttcttcgtgaattgtactctgctgagtgcccaaaaggccttccacgcaaaggagaaaccacccgatgaggaatcggacgccaactacattaacgatgccctcgactttcttgtggagtacgagttcgttcgcctgcaaaggaacgaggaaagggagacagcggtctatgtggccactcgtctcggtgccgcctgtctggcttcctctatgccgcccaccgacggcctcattctttttgcggaactccagaaatctcgtcgctccttcgtcctagagtcagaactgcatgctgtttacctagtaacgccctattctgtctgctaccaacttcaagatatcgactggctgctgtatgtgcatatgtgggaaaagttaagttcgcccatgaaaaaagtgggcgagcttgttggagtcagggacgcctttctctacaaagcgctgcgtggtcaaacaaaactagactacaagcaaatgcaaatacataagcgtttctacatagctctggctctggaggaactggtaaacgaaacacccataaacgtcgtggtccacaagtataagtgccaccgaggaatgctacagagtctgcagcaaatggcctcgacctttgcaggcattgttactgctttctgcaattctctgcagtggtccacactcgccctgatcgtgtcccaatttaaggatcgtctcttctttggcattcacagggatcttatcgatctgatgcgaatacccgatctgtcgcagaaacgagctcgtgctctctttgatgctggcatcaccagtttggtagagctagcgggcgctgatcccgtagaattggaaaaggtgctctataactcaatcagcttcgactctgcaaagcaacacgaccacgagaacgcggatgaagcggccaagcgaaatgtagttagaaatttctatatcacaggcaaggcggggatgacagtgagcgaggctgccaaactactgattggtgaagctcgacaatttgttcagcacgagatcggactgggcacaattaaatggacccaaactcaggcgggagtggaaatagcttcgagggcaatacacgatggcggggaggtagacctccacatgtccctggaggaggagcagccgccagtaaagaggaaattgtccatcgaagaaaatggcacagccaattcacaaaaaaatcccagactcgaaacagtagtggacacacagcgaggctataaagttgataagaatattgctaatcaaagcaagatgaacccgaatcttaaagaaatcgatgcccaaaataaggcgcgaaggaattcaactgcacacatggataacctaaacccgattagcaatgacccttgtcagaacaacgtaaacgtaaaaacggcacaacccataatatccaatttgaatgacatccagaaacaaggttctcagattgaaaagatgaaaatcaatccagcaactgtggtgtgtagtccacaattagcaaatgaagaaaaaccgagtaccagtcaaagtgctagaaggaagctcgttaatgagggaatggccgaacgccgcagggtcgctttaatgaagattcagcaacgcacccaaaaagagaaccagtctaaggatcagccaatacaggcgtcgaggtctaaccaactttcaagtccggttaatagaacacccgcaaatcgatggacacaatcggaaaacccaaacaatgagatgaacaatagtcaactgccccgcagaaatccacgaaatcaatcaccagtacccaatgcaaaccgcactgcgtcaaggaaggtttccaacgcagaggaggatttgtttatggcagacgattcctttatgctgaataccggtctagccgctgctctcacggccgctgagagcaaaattgcctcttgcacggaggcggacgtgatacctagctcgcaacctaaggagccggaagtgatcggtgcactgactccacatgcatccagactgaagcgttccgaccagttgcgttcacagcgcatacaaagtcccagccccaccccgcaacgtgaaatcgaaattgatttggaatcgaaaaacgaatccaatggggtctcctctatggaaatctcggacatgtctatggagaacccactcatgaaaaatcctttacatctaaatgcctcgcacattatgagctgttcgaaagtcgatgaaactgcgtcgagtttctcttctatagatataatcgatgtgtgtggccaccggaatgcgtttcaagctgctatcatcgagatcaataacgccacgcgtttgggatttagcgttggcctgcaggctcaagcgggcaaacagaagccgctaattggatccaacctcttgatcaatcaagttgcggcggccgagaaccgggaggcggctgccagggaacgtgtgctattccaagtggacgacaccaacttcatctctggtgtgtctttctgtcttgcggacaatgttgcctactattggaatatgcaaattgacgaacgtgcagcatatcagggagtgcccacccctctcaaggtgcaggaattgtgcaacctgatggctcgaaaggatctcacgctggtcatgcacgacggaaaggagcagcttaagatgctgcgcaaagcgattccgcagctaaaaaggattagcgccaagctggaggatgccaaggtcgcaaactggctgctgcagccggacaaaactgtgaattttctcaatatgtgccagacattcgccccggaatgcactggccttgcgaatctctgtggcagtggtcgtggttatagcagctacgggcttgatacctccagtgccattttgccgaggattaggacggccatcgaatcctgcgtaacgctgcacatactccagggacagactgagaacctaagcaggattggcaatggtgacttacttaagtttttccacgatatcgaaatgcccattcaattgactctttgtcaaatggagcttgtgggctttcccgcccagaagcagcgactccaacagctttatcagcgcatggtggccgttatgaagaaagtggaaacaaagatttatgagcagcatggttcccgtttcaatctgggctcgtcacaagctgttgccaaggtgctgggactccaccggaaagcaaaaggacgagttaccacctcacgccaggtgctggagaagttgaactcgcccatttcgcatttgatactaggctatcgaaagctgtctgggctcttggccaaaagcattcagccgctaatggagtgctgccaggcagacagaattcatggccagagcattacatatacggcaacgggtcgtatttccatgacggagccgaacctgcaaaatgtcgccaaagaattcagcatacaagtgggctctgatgtggtccacatatcctgtaggtcaccattcatgcccacggatgagagccgatgtcttttgtcggctgacttctgtcagctggagatgcggatccttgcccacatgtctcaggataaggctctgttggaggtgatgaaatcgtcacaggacctgttcatcgcaattgcagcgcattggaacaaaatcgaagagtccgaagtgacgcaggacctccgcaacagcaccaagcaggtgtgctacggaatcgtctacggcatgggcatgcggtccctggccgagtcgttaaactgcagtgagcaggaggcgcggatgatatccgatcagtttcaccaggcgtacaagggtattcgcgattacaccacgagggtggtcaatttcgcacgcagcaagggatttgttgagaccattactggacggcgacggtatttggaaaatatcaacagtgatgtggagcatctaaaaaatcaggccgagcgccaggccgttaactccaccatccaaggatcggctgcggatattgcgaagaacgctattctgaagatggaaaagaacattgaacgttatcgcgaaaagctggcattgggtgacaattcagttgacctggtaatgcacctacatgacgaactcattttcgaggtgccaacgggaaaggccaaaaaaatagccaaagtccttagcctcaccatggagaactgcgtgaaactcagcgtgccactcaaggtgaagctgaggatcggacgcagttggggtgaatttaaggaagttagcgtgtag

SEQ ID NO: 41178 - protein, 2059 aa, DROSOPHILA
MAFSQSFNFGNSTLMALEKGMQADDKENAQPGNGNIQVQSAGNEVNSEIQEINSEFFRDEFSYEVNQAHKPAEQSVVNVSQVQQHMAVVSNQDSEDQSRSSALNDQICTQSSFEGEDAGADAVLDQPNLDENSFLCPAQDEEASEQLKEDILHSHSVLAKQEFYQEISQVTQNLSSMSPNQLRVSPNSSRIREAMPERPAMPLDLNTLRSISAWNLPMSIQAEYKKKGVVDMFDWQVECLSKPRLLFEHCNLVYSAPTSAGKTLVSEILMLKTVLERGKKVLLILPFISVVREKMFYMQDLLTPAGYRVEGFYGGYTPPGGFESLHVAICTIEKANSIVNKLMEQGKLETIGMVVVDEVHLISDKGRGYILELLLAKILYMSRRNGLQIQVITMSATLENVQLLQSWLDAELYITNYRPVALKEMIKVGTVIYDHRLKLVRDVAKQKVLLKGLENDSDDVALLCIETLLEGCSVIVFCPSKDWCENLAVQLATAIHVQIKSETVLGQRLRTNLNPRAIAEVKQQLRDIPTGLDGVMSKAITYACAFHHAGLTTEERDIIEASFKAGALKVLVATSTLSSGVNLPARRVLIRSPLFGGKQMSSLTYRQMIGRAGRMGKDTLGESILICNEINARMGRDLVVSELQPITSCLDMDGSTHLKRALLEVISSGVANTKEDIDFFVNCTLLSAQKAFHAKEKPPDEESDANYINDALDFLVEYEFVRLQRNEERETAVYVATRLGAACLASSMPPTDGLILFAELQKSRRSFVLESELHAVYLVTPYSVCYQLQDIDWLLYVHMWEKLSSPMKKVGELVGVRDAFLYKALRGQTKLDYKQMQIHKRFYIALALEELVNETPINVVVHKYKCHRGMLQSLQQMASTFAGIVTAFCNSLQWSTLALIVSQFKDRLFFGIHRDLIDLMRIPDLSQKRARALFDAGITSLVELAGADPVELEKVLYNSISFDSAKQHDHENADEAAKRNVVRNFYITGKAGMTVSEAAKLLIGEARQFVQHEIGLGTIKWTQTQAGVEIASRAIHDGGEVDLHMSLEEEQPPVKRKLSIEENGTANSQKNPRLETVVDTQRGYKVDKNIANQSKMNPNLKEIDAQNKARRNSTAHMDNLNPISNDPCQNNVNVKTAQPIISNLNDIQKQGSQIEKMKINPATVVCSPQLANEEKPSTSQSARRKLVNEGMAERRRVALMKIQQRTQKENQSKDQPIQASRSNQLSSPVNRTPANRWTQSENPNNEMNNSQLPRRNPRNQSPVPNANRTASRKVSNAEEDLFMADDSFMLNTGLAAALTAAESKIASCTEADVIPSSQPKEPEVIGALTPHASRLKRSDQLRSQRIQSPSPTPQREIEIDLESKNESNGVSSMEISDMSMENPLMKNPLHLNASHIMSCSKVDETASSFSSIDIIDVCGHRNAFQAAIIEINNATRLGFSVGLQAQAGKQKPLIGSNLLINQVAAAENREAAARERVLFQVDDTNFISGVSFCLADNVAYYWNMQIDERAAYQGVPTPLKVQELCNLMARKDLTLVMHDGKEQLKMLRKAIPQLKRISAKLEDAKVANWLLQPDKTVNFLNMCQTFAPECTGLANLCGSGRGYSSYGLDTSSAILPRIRTAIESCVTLHILQGQTENLSRIGNGDLLKFFHDIEMPIQLTLCQMELVGFPAQKQRLQQLYQRMVAVMKKVETKIYEQHGSRFNLGSSQAVAKVLGLHRKAKGRVTTSRQVLEKLNSPISHLILGYRKLSGLLAKSIQPLMECCQADRIHGQSITYTATGRISMTEPNLQNVAKEFSIQVGSDVVHISCRSPFMPTDESRCLLSADFCQLEMRILAHMSQDKALLEVMKSSQDLFIAIAAHWNKIEESEVTQDLRNSTKQVCYGIVYGMGMRSLAESLNCSEQEARMISDQFHQAYKGIRDYTTRVVNFARSKGFVETITGRRRYLENINSDVEHLKNQAERQAVNSTIQGSAADIAKNAILKMEKNIERYREKLALGDNSVDLVMHLHDELIFEVPTGKAKKIAKVLSLTMENCVKLSVPLKVKLRIGRSWGEFKEVSV

SEQ ID NO: 41179 - DNA, 4272 bp, DROSOPHILA
gctttcgacggcaccaaactggcgtaaataatctaaaaataagacgaggttttttttcctctgtacacggggaggctgatgccgcttcttcttcttgttatttgccctttgcttctgctgaagctgctgcttcttcttgctatgttccctttcctcttgctttttcttcttatcctcctcgcctgctagattctccttcttcttactactcttatcctttaccccttgcttgtgacagagctcctcctctttccgttccgcgtgcagttgttgttgttgttgctgctgctgcttgtttgaccttttcttttggccaaactttctgcccccgtcgacgtcacagctgatcgatttgctgcactcgctcggcgatttatccgcctcctggctttgcctgctttttcgattttcccaattcacattcgtcgtcggccgtgggaattctgctatcataatttgtatgccacttatgccataattatcacactcactctcactcacacgcacaaaaacgcgaaaagagaggcgggcgcgcgcttgtgttgttgttgatatattcttttttcaccgcttaaccaagctgaaaagttgaaaatctttacacacaccaaaaacacacacacacacagactcagaaaacttgggaaatcgaattttccgtactatgattttccggccataaatctgcacgggcgtaagtttcggaggaaactgctgcagaaaagctcctggtcgcaaaggaagaaaaatcggacgggcgaagcgttgccagacgatgacagcgatttcatttgttttgatttagttgccggagcgatgtcacctcaataagataccgaaaaataccaaaggtatttcgagctgccaatcttttttccgacatcaaacttttctagccatttgacttttttttcaaaagtatttataaatttttttatatttaaatgcacgaaataaatacatatatcaatgtctatataatatttggaaatataagtttccttcgttgtcattgggtctttcgacttctctttattgacgcatcgccttaaacaattccaactaaaaatttccaatcaacacagacagctacttcgctccgcttaggcaaacagacgcagttcatcgcgcgcctcgatgcacttgggcggcgagggagtctcgaactcgcccagctcggcgtcgtagtagagggcggcgcggtagggacgcagctcccatggcacctgctgctccattgtggtcagcgtgacgcccaaatcctcaagcgtggggacaccagtcagaaccttgtcggtgacagcctcgcgttcgatgcgagcgggatgcagaccgccaatcggggtgccggggcagatgaagctgttcagcttggctttcagcaggaaggtggggtcccagcgcatgtcgtagcgcatgtagccccagcgcttctggtccttgcgcatcaggcggtggaaccagtcgaccagctcgctcaactgatagcgtttaggtctgcagagaataaaggaaattaagaaaatgtacatggtacaaatacttggactcggagattgacttaccccacagcctggtagatgcggccagcgctgtccggatccttggcggcgttgatgatggcctgggccacgtccgaaacgtagacgggctgcttgacggtcttctctcccttgtgccacagcggcatcgagcggaactgacggcgccagatgtgggcgtagtagcgcaagaagcgatcctcggatccgtagatatccgcagggcggatgatcgtggcgttgggaaaggcgtcgcgtacgcgaagctcaccctcgtacttgcttttcagccactcgctgccgcccttgacgtacagatccttgggattggcctccacgttcaaagaggacaggtggattaagcgctccacgccagcctcgcgcgcaatcctgaagaaataaaagtggtttacgtcatgcaaagttagaatgaagaagtgggcaggcaaataatgctggctatgatgttcacctagcgatcctctccgctccgttgacatggacatccttgaacttgaagttcttggtctcgaagtccctgcccaccaggttgatgaccacgttcgagtgcttgactgcgtcacgaatggaggcgggatcctccaggttgtagaagtgaaagagtacctggccaagatcaccggtgaccttaagacggataacatccgaatcgtcaccgcgatagggcaggatcatctgggtgccagatttgcccagtttgttgcagacatagcggcccacgaaaccggtggcaccgaaaacggtcgccacgatcccattgaaactgctacgtccgccagttccgcgcttcatggcagccggattggtggtcttcagtggacgtggaccatcttccggcggcgcagcagcggcggaatatccacgcaggcacaaaactccaaccacgccactgccgtggtgctctaagtatccggaattggacagagaatgagccaaaagttagccacaaacatcgtattacataattggattgcctggcggttttcgaccgcaggcacggtactcactggccagctggagattacgggttagtactatggcggccatttcgcaccggcacactggaccaactcgattcggttaatttacgcttaaaatcctattttatttcggaacaggccagttttttattttgccccacgacagtgtgaccgtggcgtagcaattggaatatactagaattgacaggttgatatcaaaaactaccgtcaaacaaagctgccagactgaagaaaaacatttgatttggaaagtaacagttttttctatagtttttaaaaagccctgttaacctaaagttaaccctaaatatgtaaataattgacctcataaccaatagaccgtgttcgtggccattgcataccaaacatattttaattatctgattatcaaatatcggtaaatgctactacggttataactactatgatctcgaattattcatactatttaggtggcactaataattttacctcataattactttgacaaccttggggatatcttagcctcttagcggtaattaaaccgtcatataaaccactcttcttgcttggcactagtttataaatatttgttggcaaataagacataagctaaccgtgtcccagttgaaaagtaactgccttgcttgtcacaccgcaaactttttatctaatgtgcgtggcttaattgcaatttccagcccgcggatcgtttaattcggcacggcttgggttctacggacaaagaattcagttagcagtcgccttcgagctgtaaaaccgagagcatcgggaaaacttagtgttatctgttcgaaatcggccaactaaggattaactatttctacggaccaaaaacaccgataagcagtgaaataaaagtgagcttgtggtgaaactgttcataatggatacacatttttgcggttataaagtgcggaccactagctaatttggtttgaatgtaacagcttgggtaaactaattagtaccgagggtatataagttagtaatttgtttttagattggttaagataatgggatttcaggcgaatgcgactgtcatgaataacctccttcgatacaaaaatatttctggtattgtaacattacattatacacatgcagtgggtcaggatatacaaaaaattataaacatttgtcagtgtgtcaaacgcgttcttatacatatatatgtacgtatttgtgtataaagagtaaatttcgtgtcagatatttctattgaatcaccctgtctaaaaataaataataaaacacattgtttatattattgttataataaaacacattgttttttgtttgttgacttcagttgtgcgtttgataagttaaatatctgcacagatcactgcttttgacaattgaggatgtaattctatagagattaccatagcttcatatgtaaatatgtatttataatatttattatggcattgttgttgtctcataaacctacctagataacgacaatacaaacatacctacatttgacaggcataaacaagcaacatatgtataaatttcactctcctttttctgctctcatttcgctctctttaatagctcacatgcaatcagctgattttttttcaacctgctcacgcactttttcgcccacacaaatactatcactgttgctttctacctctctcttccttatctctgctccccaccctttaaatttgcgggcttttcgtttgttttgc

SEQ ID NO: 41180 - DNA, 1462 bp, DROSOPHILA
ccgtgccgaattaaacggggcaaaataaaaaactggcctgttccgaaataaaataggattttaagcgtaaattaaccgaatcgagttggtccagtgtgccggtgcgaaatggccgccatagtactaacccgtaatctccagctggccaagcaccacggcagtggcgtggttggagttttgtgcctgcgtggatattccgccgctgctgcgccgccggaagatggtccacgtccactgaagaccaccaatccggctgccatgaagcgcggaactggcggacgtagcagtttcaatgggatcgtggcgaccgttttcggtgccaccggtttcgtgggccgctatgtctgcaacaaactgggcaaatctggcacccagatgatcctgccctatcgcggtgacgattcggatgttatccgtcttaaggtcaccggtgatcttggccaggtactctttcacttctacaacctggaggatcccgcctccattcgtgacgcagtcaagcactcgaacgtggtcatcaacctggtgggcagggacttcgagaccaagaacttcaagttcaaggatgtccatgtcaacggagcggagaggatcgctaggattgcgcgcgaggctggcgtggagcgcttaatccacctgtcctctttgaacgtggaggccaatcccaaggatctgtacgtcaagggcggcagcgagtggctgaaaagcaagtacgagggtgagcttcgcgtacgcgacgcctttcccaacgccacgatcatccgccctgcggatatctacggatccgaggatcgcttcttgcgctactacgcccacatctggcgccgtcagttccgctcgatgccgctgtggcacaagggagagaagaccgtcaagcagcccgtctacgtttcggacgtggcccaggccatcatcaacgccgccaaggatccggacagcgctggccgcatctaccaggctgtgggacctaaacgctatcagttgagcgagctggtcgactggttccaccgcctgatgcgcaaggaccagaagcgctggggctacatgcgctacgacatgcgctgggaccccaccttcctgctgaaagccaagctgaacagcttcatctgccccggcaccccgattggcggtctgcatcccgctcgcatcgaacgcgaggctgtcaccgacaaggttctgactggtgtccccacgcttgaggatttgggcgtcacgctgaccacaatggagcagcaggtgccatgggagctgcgtccctaccgcgccgccctctactacgacgccgagctgggcgagttcgagactccctcgccgcccaagtgcatcgaggcgcgcgatgaactgcgtctgtttgcctaagcggagcgaagtagctgtctgtgttgattggaaatttttagttggaattgtttaaggcgatgcgtcaataaagagaagtcgaaagacccaatgacaacgaagg

SEQ ID NO: 41181 - protein, 416 aa, DROSOPHILA
MAAIVLTRNLQLAKHHGSGVVGVLCLRGYSAAAAPPEDGPRPLKTTNPAAMKRGTGGRSSFNGIVATVFGATGFVGRYVCNKLGKSGTQMILPYRGDDSDVIRLKVTGDLGQVLFHFYNLEDPASIRDAVKHSNVVINLVGRDFETKNFKFKDVHVNGAERIARIAREAGVERLIHLSSLNVEANPKDLYVKGGSEWLKSKYEGELRVRDAFPNATIIRPADIYGSEDRFLRYYAHIWRRQFRSMPLWHKGEKTVKQPVYVSDVAQAIINAAKDPDSAGRIYQAVGPKRYQLSELVDWFHRLMRKDQKRWGYMRYDMRWDPTFLLKAKLNSFICPGTPIGGLHPARIEREAVTDKVLTGVPTLEDLGVTLTTMEQQVPWELRPYRAALYYDAELGEFETPSPPKCIEARDELRLFA

SEQ ID NO: 41182 - DNA, 14395 bp, DROSOPHILA
tggataacaatctcaacggaggcgagatcgacaggattccgaactgaccttttttgggcgggctttttgggggatattttccccttttttcaaaagcagtttttccactaacacgttgcctctagatcgcccctcgcgctcccttcttcagctaaaagtcacaaccactttcagtcgcacacacgtatggacatcactagcgcacacacgtacacgtactgtgtaaaagctcttttgaggttaggatacttttaattttggagctctccgctcgaaaatgtccattgtttttcacacgtctataaacgctatttttgccaaatgattccagacggaattgggtatactgagtgacacacttgaactcttttcgggcgcccacacattgacctacctttccattttgtggctgtgctgtgtggggcctttcaggtttagatttcccccgttttacatcatttttcgcactcgattcggttttttgggggatatgggcctttcggagggtgttcgcgtattgctctcgcctatcagaatcgggtcctcacagcattatctgtggctggttcttcatttataaaaagcgtataaacgttagaaaaatagtacaaatatttcttttcttttttttactgtttcgcgtacaaaatagacgcgaatgaactagtgccaattggggatgggcgatagctatgggggacctgttactgatcacgagtgtgaaggaatcacgatgactgccccgaactcaatgggaaagttggtataagagatcaaatttgggaaaattctcagatttatttaggccagcacatctttataattattttttttcccaccatattaatataaaatcattttctaatgtgacttctcgtgaatatcgaattgccatctctatgctaaatgagctagttccactgaagtcattcacataggaatatgtaagttttctttcgtttttgagaggttttcctcccgccacagtacggtcacactgcccggtgcagaacttttgtataggaatttcgtttgcattattttttattaaattgtacttaaagaccaaatgcaattgctcagaaaagtgcaggtgcaagttttataaaatcgtgcagacccgcgaagcctgcgactgatcaccatgtgcctgcccattggttaaactcagctcgctgttaactttgtttgtgtttttgttgtgacttccagccggcggacgcagttcatctatttggaaggtaagcagaatttaggtaagtatatactgaaggactatactgaaaggtaccttcgatcctgaccgctttttcgttacggcacgagagcctgtccatcacctgcttcacgaatcccttagcatcttcctccttctgctgggccacagcttgaatatgggaatttgccctcagttgcatggcccgaatgtcatcctgcatcgccttcttactgcgctccaccactgcatctagagggtcttcaaaggtagtgcttggctcgaagatgttgccattaccattgccatgtcctgcagaattgtggtttgagtttacagaggccgttgttcgttcatcctcctcgttggaacccaacgttgtggtggtctttggtgccccctctttgaaggacaagtcatcctcgccgcgaggtgtggaacatggcgtggtctgtggatcagcctccctcgccgcttttatctgaaacaatgaggagatgttttccttggcgcccagtacttcagtagagatcttgctggtcaccgaatccatagccctgcccatcgaatcttttgtttccgaggctgctttgaccgcattactgcccgcctgctccactgcatgcattgcactacttcctacttgttccactgcgtgcattgcatcgctggccaaccgatgggcacctttacccgccgctcctactgctcctcccacggtatccacggctcctcgagctccagtagccattcgctcgcctacagcttccatggcatcacgagctccatttgctgcattttttaccgctgtttgaatcgagttacgagtggagtccatgacatctatcgcgtcttcgccgactttggacaccgcctcctcagagctcgtcacaattttgtcaacttgctcctcaccacgctgcattttttgctctccatctgattccagatcctccacggagctctccagtggtgtatctggcatttgttcctctaccctggacgtcacatccactccgtcgtttatgaaccgtatttcgttgatcactttgctgctgtccgttgagtccttcgttgtggttatttccacggccaggtgctcatcgtcttccgtgggcggtgttggtgtgttcacgtgaattttggccgtaggtacttcctccactgtgtccagactagagaccagttcgggagaagtcctctccagatggtcatggtccatggcagactcgtatgaaaagtttcgtataggcgtcttttttattgtctgcggtgtgctagaattactgctctcgggataaggcgtgcgtgggcgtaaaagtgtttcctggctgccaggcactttcggcttgggatcaactaattccatatcgtgtgcggatttattcgaccttaaagattctgtgggggagttgggaggggttggtgtatgtgtaggaggagtgggtagcttctgcatcgattccgtaggcttcacaggagatgagcttgattttattgaagattcaatggttttagctggtgagcgttttgttttcacaggggaaacgattggttttagtgatgattcttttgtatccgctgttataacgggggactctatagttgccgatggcttcatctctttatatccatcatttgttttgattgcttcacttgtggcagctgtgttcggactgtgaactgatttctcttgatctgctgcgctttcatttttgtttccgggtgtaacccgatctgcaatttgattatcttcctctttttcagaaatatttgagtttggacctatttcatcactaccctttgcttccttgtgttctttaggtataatgtctgcactttcgatatttgcattcaagtcttggtaacgagttaaatctgacttctcttctggtttctcaccattaattaaatgtttcactgcctccatggccgccgctgttccggctcctgctgcagctgccaattctcccacagtagtcgacattgatagatcctcagtttcctccatgccctcttgtttgataaggcttcttccgctgtgtgtccttgtatcctctttgtttccattggcatcagtcggctgcaacacaaaactacggttcacgtagcgatttggttcagctgatccatttacagatgcagacgacatcgaggaacgcggtatgccctgcaccaggacgtgttgatcccccactgcgatgtccaatagtcgcaggtttttaaacttggaaatttcacggaaggtcttcaaatgatggccgctctccgagaacgtagtaaagaacttgttggccttgctgagaaccgcatagaacgagaatcctttaaggagcttccagatgggtccgttttcctcgcagtcgtagtcatagaaacgttggaagaccagactcttgttccgcagcgactcgaagctgcgatagatgctgcccgcatttgtaacaatgtacacctcgctggtcttggaaatgtgcataaagatgatggcctcggtgggcggcagatttttctgcagctcagtgaagcgcggaaagacgaactcattgaggtgaccggtgagaaagaggttcccggtggcagtcaaaactagcgtggactccggcccgcaggtaaactgctgcaccggtgcatcaagacgaatctctaccggatgaccatcgtagtctgcctctagttctcctaactgcagctgggcattggagccacaaccgatcaaacgaccagtggctttaaaagagaaattaggaagatgaactcatactcattttcttttcctgtgaaaacttactggtcagcactgcaaagtgctccttgcccgcttggactgtcataaagttgtccgtctcctcgtttttggagaggtaatcatcgaactcttccaaacgaaaaggcttccggataatggcgcatggctgctgatcaacttgggcgctcgtaaagtgctgagccacatgggtatcctcgggaaagatattgcgacccgtgaaaaagatttcgttggagtctgaagaaattatttatatgcgggttataaattaaatacattaaaaagaccaaaagtgttgtgaaagttcgttatcgtagccacgtggttttcttcatttgagatatgactttaatcaatccataattgttttttaacattaaatttaaaaattacctaggtttttacgtttctacttgaatacccattttatagacttccatatttctcatattactgatatcttaatttaaggtatatatttagtaaagcccttaaaacgtttgttcttactaataacattgatatattggtatatcattgaatcataaacacacaactgagcagcaaaacaattttccaattgctgccatttactaaactttttccacaaaactaaaactttcggctaggccaatttcttaggtgacacatgattccaattctaagctccgagttgacgaacttcatccatatttgttgattcactcacgtgttagcatcacggcccagtgattgccgaaggcgacgtcacaaatctttaatccgagggttttcaaggcctttacgcaggtgggtttggtgacgatgtccccgttgccgttgtggctgccgccgccctttttgccggaggctccgccatggccaccaattccaagctgtccgtagtggttctcgccccaaacaaatagccgtccagattctgtaattgataagaacggtttgacatttgctttggctttcacctgctgctagtagcttttgtttttggttgttttattatgtttggcggggtgttgttcccttttcttgacttttattgattgagaaagtgtgcgcgcgggtgtgtgccaatcccatgaataacccaaaccctcaatcccacaacgtttcacttatttaactgctcccccgcataagttaacgcctcaattacgttagcttcggttttagtttcagtttcggtttcggtttttggggctctacttcgtgagttctctccatatttcaggtattttaacgccgcgtctgaccccattagttgtcgatgttgccgtgatttgaagtgcttggtcagctttactcggtctaacgtggattttaagcttatgtaataattatatatatataaatatagtacattgaaagtaatatccttaatgatatatcatatatagatatatattttacactattctgttaatacatcaccagggatcttttggacgattcattaaatttcaaataagtaaagaagtagtagagattatataccaccctataccaagagttccaaacaactttcccaacataagattttttctaagtgtcagattttcagggaatatacggatgtatttgatttctgtggggattgccaggatgaaatatttaaaacacccctgcaatacacctaattctggttacaaatttgtcgggctgcgaaagccggctataatttagtaattcaatagacccagcagcacgaaaaacacgaactcaagactgggccaacaagaaagtgaaagtaaagtaagttgaacagtggagcttattattatttaaagaaaattgcagtcaacatgcaatacacggggcacagacaagcgaccgacaatagattttcacttgaccacttgactggagtcaaaggattggcggtgagtatgtaaggacttttgggtcacgtagttaccacaaatgacagcgctctggtttggaccggaaataaggcgcttcacaggatcgtttttgatgtagaagtaactttgggtattctcagccagatgagatttgcccagggtgaaaatggctccgctggcaggtatatccattttgggattatgtgtctctttgtacttgcgtttttaactttatatgctaaacttttattgatttttgtattagtgagtctcttgcatatttttcgccggctgcatttgaaatgcttgtgggcaggcccctaggcgcacatatctgtacacagcaatgccatttggagttgcgtgctctcaattcccgaaacggtttattccgtggctactctgaccggcacttgcggtcagtcgaacgtcccagcgcgtactggtcagcgaggacgactaggactaggaatcgagcaggctaactgggtagttggctagctggctaaccattagccaccggttcactctcaccacccacaaacgggccatcaatattgggccattttggctggcgttgcttggcccttataggtatgctatggaaatgttagcgagtgagtttggcccagctcaggagtgagtcaccctactctgtccgttttgcccgagttaagttattccgtgcgccaaagagcgagtatgggaattctgttttttcggcctggagtttcggttcacccgctccccttcatggtatttatggcatttgtgagtaatgtttgcaaatctctcggaatacgagccatggtaaaaataacattatttttttgtgtgattgggtcatttcttttccctttcactgcgcataagtcccggtttcgtctcccctgaaagccaaattcctttcccctgacctgttgacatttggagaggacgagtgtcctgcgaattcgcgacatttctgaaaagttaattaattcacgtttgggcgttggaatggcggcgtttagccgaaattgggtaactattttatgacctccaaggcgccgtcataaaactgagccaactggctagtccttcccacatttgcaggctttcgcagacaatttgcgtcaattaattgatttctgctggcatcccaagaaggtttcatttgatttccgtactttgttatgcaataagtgcgttcccatcgattgggaaaggcaaaggtgtgcagacaaagtttgaataattgtctgactgtgcggctaaacttcagaatggtttattcggatctgatatgtatttataaatgttaaggagtctcacaaactcttagttatgacaaattatccaaaatagaaaaactataatataacatatttacaggttaagattttccatctaagcaagagagaaaaagtccacagtcgagttgctcgacttttagatacccattactcagccagtggaagtgcgagaaagaaaatctgatagacaaagaactcgactattgcattctctttctgatgcttgttttttctttagttcggtattctattttgcatgggaacgtgtagtcccagtttggagtctaaactttctgtattatatgccacactttgccttctgcatgtggaagccgtgagcctttcgagtatgtactcaaatgtctatgtaatttatgaatcccctaacaaagttgtttggcctgcaaactgcaattgcccgtgccgtgctctccgctcttttccgcttttccctgtgggcgaggagtgggtatggtctgttgcatgtgccagtatgccagggagtgccccttcgtagtccaaaatcccctggtggctccgccttcatccgctgactgtgcaggaatagtgaatcttgtgcgagtgcatgcaaatgctgccaactcgttgagcgttgaactcgaaacctctgtggtttttgagcctatttttagtggccttaagttgtgacaattagatcgagtccattgaacccattcgattaggttaagatgttgtggatgacgtaaagcgaatcggtcaagaacctgcgagccagctgccggaagtctcaagcgatgtgtcaataggttgacaaatctatttggcttctgcttctgaagtgtacttttcgggccaaaggttgattgaacctggcggtcagtttaggggaatcgattcgaaaagcgaaaaaggagaagggttccctgtcccaaatataacacgaaattagttgaccttcagcgggccggcggtatccaagtcctttttccacgacactgtgttctttcttgggatttgtgttggtcttttcttatgccgcccagaaagtggcgtgcgcttttcatttcattttattacccgacccaaagcttgacccacacacatacatactggaatacatgggggaaaaatggcaatcattgtgtaaattgtttacctcgcctggcgagaggtgcaaaaaagaagcatggtgttttcccggtgccttcttggaatgctctctcatttctcacccttattgttcttcaatgtcaagcaatatgggcacgttcctgcaatttagttttgttgtttcacgtggtgattatttgttgtcctgggaaaaaaatatgaaatgagctgggaattaggcgactgtcccgcccacgcagcaatgaaggaaaggaaggaactaaatgtagtctacttctcgacttgctttaattacagaacgcaaaatgagcgacgaaggtggctgtaaatcggagcagttagagaaatccgaagaagcggaggaaaaaaagggggacgcagaaggacaggaagcgaaagctccaattctcaaccccatttcagtcccagaagttgatgacaagccgacggaaaataaaccccaatcggataatcacgcggacaaaacggacgaaactccatctcaggactttgccgcctacgaggagcacatgacctatggagcggacggcggggctatatacacggatcccagcacgaagcagaaatacaagtggtgcgccaccggaaacaattggcaacccttaggcgttgatgaagatgttgatggacaggctgaagatccctacgaaaacgagcactacaagtggtgtcccaaatcccaacagtggttgccaaaaaaacaggaaactgaaacggagcactacaagtgggatgacgagcaaaagaagtgggtgcccaagcacccgaaccctggccaggaaggggtttgcggtgtggatgagcatggcgagcgcacttacaccgacaaggatggcgtcgagttcttttgggatgcaaccaagagtgcttggttccccaagatcgatgatgatttcatggctcgctaccaaatgaactatggatttattgacaacacatcagcgggggagaaagagaaggctgaaaaggaggcggctgaggccaagagaaaggaggaggaactcaagcgtatgacggcagaggcggaagctgctatgtctagagacaatccagcatccagcgctgcagtgcccactggcaagcgaaaggcccaggagcccccaagtacgcggtattcgacatttagattaatttcctacgatttctaatgataaccttcttttagaatggttcgaaatggatccattgcagaacaccaaggtgtatgtctccaatttgcccctggacattactatggatgagtttgccgatctgatgggcaagtgtggcatggtaatgagagatccgcagacgcagaaattcaagctgaaactatatgccgaaaaggatggacaaatcaagggcgatggcttgtgtgattacatcaaggtaagtgttaaattaaaactctgtattcgatctctttgttttgtgttttttcaaactttatttattattttactttgtttgcttcttaactagaatttatcttgcataaatattatatggtaattttatcatatgtgttcgtattacatttgtgtactgctttcctctttcgtgatttctttgctaacgtttcgctgactatttagttttattcgcttttcatttctccgtgtgtagagtaataatattttaaattggttagtttactattaaaatgcatttacttggctgtaaaattgcttttcatttcgatttcattcccgtccttgccagctttcaatttcaacattaaacgaaacaaaatgtacttcgaggtttttttctttttttttgttttgcctttcgcgtttgaggtattaaaaaatacataaaaatttacatttaaacatactttagttattacatacatctttgtaaaatatagttttgtaatctagaagttaggaaatggtcggtgaccatccgatgatgttatcaaaagattattagtagtaaattattgcttcgctgtgcccgattcgaggacaccataggcaaacccagtgtggggaggcatgggacttggacactgctggactttgacccaaaggagttttccattcaatcttacgctttactcactataaatatatccgtggttctgtgcttgagtttaaaaaattgattttgcgtctgtgtggggtttattggttctaaaattgattgctaacttctagttcggttattaaggaaacatgcgtgactggttgccgtgtgtttacggtgtgtcctgtgtgctgcgtgagtatgtggcgtgtccatatcctagacctatatatagtatatctttactgtacagtactaaaatagctagcgaagcgcatggagattgggtttcctgctcgatcgaaatgcaattaattaaccgacaaaatctgcttcgcagcgatgttcctccattcttccttctcttctgataaataatacttttgcgtgttcatcttgtggtttgttttaattaaagcacaaagaaaacaatcgaaaagggatcgactgggcaacggtgcgtatgtggaaccaattgtgatcgatatgtatcggttagtattggttagtgcgtggcgatttgactgccgcctggacttctactcgttgtcatccaatcgcatggcttgctgtatcctcttcagttcctttgcccgctggtcacgttcctttttctccttcagctgcttgcgccgtttgcgcatctcgataaacttcttctggtcctcgggactcagcgccgagattcgagtcacatactcacgcctcttctcctccaacttagccttgacttcctcgtcggccttctttttggccgcctccacgcgtcgcttctgctcggcggccttggcctcttcggcagcccgttcctcggcctccttggctttacgcgcctcttctgcctgtcgcatttcatcttctagtcgctgcttaactttgcgttcctcttcagccacttccttgcgcagcatttcctcctcctcagctagttttttctccgcagcctcgcggagtgctatttcccgctcgcgctggagcttctgctcctcgcgccgctggttctcctcgtgcaggcgctttagttccttctcctcgaagcggcgagcctcctcaagcctctccagttccaggcgcttttcctcctcctcctgctcgcgtcgaatctgctcctgccgctcgtcctcctgtttcttaagctgctcttgcagcttcagctcctcaagtcgcttggcttcatgggcctcggcaagttgcttctcccgctcggtattggccagccttatgcgctcggcatacagatcatgcagtcgcttctcttcagccagacgcttggcatggttttggcgatcctgttcctcctgttcttcgcgctgtttgcggcgctgctcttcgcgctctcgtcgctgttgtgcctccagttcgcgttgtttttggatgcgctccagtcgtagcttctctgcctcctcgtccgctgcgtgctggcggtctgcttcagcctgccgttgcttcaggagctcgagctcgtgctcacgcttttgctgctggtaatcccgttcctgcttttctcgctcctgcttggctttaagttcgcgaagttgctgttcctggttttccttgagctctttctgatgcgttctggcctgctcttcctcttgtttaagtctatcctgctcctctctgtccttttgttcctgttcatcgcgttgcttttgctgttcttcccttagttttttttcctgttcatttcttagtttctgttcgtgctcgtccgtttgattcttatccaaatcctcaccagatctctgacggagttcatctatcacttggggcttcacttgggggttcacttggggtttgggttcatcgtgatgcaatcgctgcctgcgctgctgttcctcccgctgcaatcgctggcgttcctccttaaggcgacgttgcctttcgcgcttttgctccctagccaacttctggcgttcctgccgacgcagctgtcggcgacgttccctttcccgttgacgttgcaatttacgatcgtactgagtcatctgctgaggcgtgggtgagggagccaggacatcattagactggctaaccgattgcgtagtagttggcgcaacagtagaagtacgaggacgattcctttggcgttgctgtgctggctggtagttcacatcattgggatgttgattctgattcttgatctgacggtttctgtggttgttgcgacgattgttattgcgtcgacggtcgggaataatcatctcttcgtcactgtcctcggccttgacacgcctgtggtacctagaagaaacatttactagttagtttgtttctatttcaggtggagagtgtcaatctggcgctgaaaattttagacgagtacaatctgcgtggccacaagattcgtgtccagagggctcagttccaaatgcgtggagaatacaatcccgctctgaagcccaaacgcaagaagaaggacaaagagaaattgcaaaagatgaaggaaaagtaagtaatacaaaatgaatgttgtattaaaagataacgacattcattatattcattaatattttcaggttatttgattggcgtccagataaattgcgtggcgaacggtcaaagaatgagaaaaccgtcatcattaaaaacctcttcaccccagaactctttgagaaggaagtggagctcatattggagtaccaaaacaatctgcgtgaggagtgcagcaaatgcgggatggtccgtaaagtggttatctatgatgtaagaaaacaaagtttctagaaatgttctctaaaaaagttcccattgcagcgccatcctgatggtgtagcccagatcaacatggcctcgccggaggaagctgacctcgtcattcaaatgatgcaggggcgttattttggacagcggcaactaagtgcggaggcctgggatggcaagaccaaatacaagtaagtttcaaaatgagatagtctaaagaaatagttgctaattcttccttaatgtcttagaattgaggaatcagctgtcgaggcgcatgaacggctttccaaatgggatgaattcttggcagaagaagaaaccgataaaaaagcttccgaggatatgaaggaggaggacgttgactcgcccgaaaaccagcttttgccaggagacgccaccccttagttttcatttacctgcgatcgttttcacgcggttcaagaatctccaggaccacctcgttggcctgctcgttcggataggtggcgttccagcggttgtagatcttgtagcgattggggccgctcacctttggcatcttgtgctgacatatgaagcgcagcttatccgagcagggccgcgccgaccagcggtacttgaggcttggatcgtagatggcacagttattatcaagcggttggctgttggagataagttgcacatagctagaattgttgcttaagcgttaaatcaatctacggaaataaagaaagaaaggaaagagcatctgagagatcacttacgcggaatcagtgcggctgaaggagtcggtggacagattgcgaccactcatgctccactgccatcggttgttgtggtggtcataggtggctcctagccagataggatcattttctaaagttgaaaagcaggttttatttaactattcagggttagatctccggtagcgattcaaaatatatggatctactcaccgcctgatagggcatcctgtttctgaaggaaaagtctcagcttgcggtcggcgtgtttacccggctctgtaagattggcgtttttgtccttgcagaagaagtgcgcctccagccaactgctgcgctgatcgaccagcgagtagcaatcggtgcccacgcgatggaatttcggtggacacaaggcgtatacacggcgctttggcctggaagttggagctgctgtatcctgactgtgagcaggcgaggggccttcgaagttgatttcggcgcgagctgcacttccgtggaactccaccgcaattgtgtgagcaactgtgggcatgacagaaataatcaataaatcatcgaaagagctggatgcgaaagaactcacataaagctaagataaatacttgacagcaccacattttatggctgccacacatcctgttgcctgccgcttgatgattgttgatgcagtgtattttttt

SEQ ID NO: 41183 - DNA, 1920 bp, DROSOPHILA
cccggtgcagaacttttgtataggaatttcgtttgcattattttttattaaattgtacttaaagaccaaatgcaattgctcagaaaagtgcaggtgcaagttttataaaatcgtgcagacccgcgaagcctgcgactgatcaccatgtgcctgcccattggttaaactcagctcgctgttaactttgtttgtgtttttgttgtgacttccagccggcggacgcagttcatctatttggaagaacgcaaaatgagcgacgaaggtggctgtaaatcggagcagttagagaaatccgaagaagcggaggaaaaaaagggggacgcagaaggacaggaagcgaaagctccaattctcaaccccatttcagtcccagaagttgatgacaagccgacggaaaataaaccccaatcggataatcacgcggacaaaacggacgaaactccatctcaggactttgccgcctacgaggagcacatgacctatggagcggacggcggggctatatacacggatcccagcacgaagcagaaatacaagtggtgcgccaccggaaacaattggcaacccttaggcgttgatgaagatgttgatggacaggctgaagatccctacgaaaacgagcactacaagtggtgtcccaaatcccaacagtggttgccaaaaaaacaggaaactgaaacggagcactacaagtgggatgacgagcaaaagaagtgggtgcccaagcacccgaaccctggccaggaaggggtttgcggtgtggatgagcatggcgagcgcacttacaccgacaaggatggcgtcgagttcttttgggatgcaaccaagagtgcttggttccccaagatcgatgatgatttcatggctcgctaccaaatgaactatggatttattgacaacacatcagcgggggagaaagagaaggctgaaaaggaggcggctgaggccaagagaaaggaggaggaactcaagcgtatgacggcagaggcggaagctgctatgtctagagacaatccagcatccagcgctgcagtgcccactggcaagcgaaaggcccaggagcccccaaaatggttcgaaatggatccattgcagaacaccaaggtgtatgtctccaatttgcccctggacattactatggatgagtttgccgatctgatgggcaagtgtggcatggtaatgagagatccgcagacgcagaaattcaagctgaaactatatgccgaaaaggatggacaaatcaagggcgatggcttgtgtgattacatcaaggtggagagtgtcaatctggcgctgaaaattttagacgagtacaatctgcgtggccacaagattcgtgtccagagggctcagttccaaatgcgtggagaatacaatcccgctctgaagcccaaacgcaagaagaaggacaaagagaaattgcaaaagatgaaggaaaagttatttgattggcgtccagataaattgcgtggcgaacggtcaaagaatgagaaaaccgtcatcattaaaaacctcttcaccccagaactctttgagaaggaagtggagctcatattggagtaccaaaacaatctgcgtgaggagtgcagcaaatgcgggatggtccgtaaagtggttatctatgatcgccatcctgatggtgtagcccagatcaacatggcctcgccggaggaagctgacctcgtcattcaaatgatgcaggggcgttattttggacagcggcaactaagtgcggaggcctgggatggcaagaccaaatacaaaattgaggaatcagctgtcgaggcgcatgaacggctttccaaatgggatgaattcttggcagaagaagaaaccgataaaaaagcttccgaggatatgaaggaggaggacgttgactcgcccgaaaaccagcttttgccaggagacgccaccccttag

SEQ ID NO: 41184 - protein, 556 aa, DROSOPHILA
MSDEGGCKSEQLEKSEEAEEKKGDAEGQEAKAPILNPISVPEVDDKPTENKPQSDNHADKTDETPSQDFAAYEEHMTYGADGGAIYTDPSTKQKYKWCATGNNWQPLGVDEDVDGQAEDPYENEHYKWCPKSQQWLPKKQETETEHYKWDDEQKKWVPKHPNPGQEGVCGVDEHGERTYTDKDGVEFFWDATKSAWFPKIDDDFMARYQMNYGFIDNTSAGEKEKAEKEAAEAKRKEEELKRMTAEAEAAMSRDNPASSAAVPTGKRKAQEPPKWFEMDPLQNTKVYVSNLPLDITMDEFADLMGKCGMVMRDPQTQKFKLKLYAEKDGQIKGDGLCDYIKVESVNLALKILDEYNLRGHKIRVQRAQFQMRGEYNPALKPKRKKKDKEKLQKMKEKLFDWRPDKLRGERSKNEKTVIIKNLFTPELFEKEVELILEYQNNLREECSKCGMVRKVVIYDRHPDGVAQINMASPEEADLVIQMMQGRYFGQRQLSAEAWDGKTKYKIEESAVEAHERLSKWDEFLAEEETDKKASEDMKEEDVDSPENQLLPGDATP

SEQ ID NO: 41185 - DNA, 3876 bp, DROSOPHILA
ggttgacggttcattgcagcgttccgttctgcaaacgtttctttttcccgccgcggggcagccgaaaaaaccgcatcgccgccacagcgaaaactcaatgtaatgcgaaccgctcgacggaattgtagtaaaaataaagaaatacaactaaaaccactgtcgttcttggcggctatcaccgaagttcgcgctatcaacgccatgcacgtgctcgctcgacacccagctcaatcccaaggggggtcactgcctaaaccgaaggtcatccaccggtcgatgggttggcccttatgtaatcgccggcgtttggacgaacttcaagtccgctcctctacgtacttgtaagccggaactccagtcgctgcaggcagacgtgcgattcacttgaagactctgggaatcagatgaagccgactcgagaatcgcgggaatcagtggtcgggtggagacctctcgagcgagcacacaaccgaacgcttgcgtcgtcggcggcggaatgaagaaaactgaattattttccacgagctgtttttgcgaaaaatcgctcgctcacttgatgaggggcgcctaatcggagaagcagagcaactgttctctgcggtaaacaaaaattcacctaggcaacgctcagacaagcgatgcgtcaagggtttcccatcagccaggctgatgatgcagctgctccaggtccagttcctcgcgcaatcacatgatcccgggcgggattttgtgttcaaattgaatgctcttctaattgatcaattcccagaattagaaactgaagcattcggcggtccactgcgcaataccatcaattggtggttagtcggtggcgatgacttccaccgcctgcaagtggccatatccgccgcagccaccaaagcgaactgttccagtgctcaatagcctgaccccaacttgactcatccggcgaattgttcgccgctcctggcgccggcgcttcctcttttcatattgcgatcaaaggcccgtcgagtggtttcgggtatatgtatgtgtttgtatattttgactggactccggcgaggagcaaaggccacgtgcattgtgttagatgagatgtataaatgtaaaacttactcgttagtggaagattcaattcgattaatttaaataactactagctaaccaatggacaccatcacattttcagaggagcagcgtcgagcgacatgggcagcacaggttccggctggtcgatgatcagcttcagattcttgtcgggccactcgagctccagtcgctccttgggctcgcatttctcgtctaggcccgcgctgcggaagtcttccatcaggcgcggcaccagttcatcgggaatcaggacctgaatccagtagcccagcacgccgtacggttcgttcactgtcaccgccgagccggtgacggattccgccaccaaagtgagcgccagatgctgagccttgaaggtgaagtggcgcccatgtcggatgcgatccttgatggccagtaggaggtacttggccacaccaggtgcgagggtaatctcaataccgtccagtgaaatgcagtttggtgcctgcgcttgaaagtccaggggacaggacttgtgcagcgaattgctgctcatcgacatggattgtggaaagcttggttcctcgcgtttcatttgcgtatccgtcagctgccgattgttttcgtcgttggcgcacttctcgctcagcgcctggaaatccacctcctccttcacctccttggtaggtttcagctcacggaacgtaaaatctgcattaacgccggccagatcggaaccctgcttctccagatcgtcctgtaggtttagcagcgtttcgggaaacagttcgaagacgctcatctggcgatccatgttagtcaccagccaatcaccgccagtttgcatatcttggcgaaggaagttgagcacaccgcgcccgttccaacgcgatgcctgctcaagttcgtcgtcaaagacgccgacgatctggcagaagtccaccgtgcccgtgggagtgtcgatgcagcccaactgcgggtcctgggcgacgagcaggttctgtagcttggaagtggtactgccatccagactcttgcgccacgggatgttgtctccgaagcacaacccgttgcctgtttgaaaacaatagcgtccgatggcctgcaacaggttcgccggccaggtgggcggtctttggggcttttccgggttctcaatctgctgctttagctctatttctgttttggccaagcgaaaggtcaactcgaaccccatgccagaccgagtgacgccctcctcgcgcaagtggactcgctcgtccccgtgtaggtcgctgagtccgaaactaatgtagtgccagtgcggcggaacgttcctatccacatctccgggatagttgtacatgctaatgtagtccaacggatcctgaccgcccagccagtacttgagcagtgtggtcacctgcagcgggttcggctggttggggtacacctgcccgaggtggtctatgatggccttaaggcccggcggaggcttcacctcaggttttttgtccaaattcgcctcggccatttcatccagtttgatcagtatgacctcagttggaacgttgcggaataccaccgcttgaatataccatgaataaaaatactgccatgtaaagtgcggatttgacaatggaaacttacatgagtttcttttaaaaccattatttatttttaaaaccttttttataataattattactttcttacttttttctgcttatttttaaaatgtagagaaaaacagtgaaaatatatatccatatagctttaaaccaccaccatgtaaaatattgagtatttcttgccgtggtatatttttacatgctgtttatttctgccaaccacctacggtcaccctgttgaccaactatttaatagaaaatttgcaaattttgataaacgcacaaaatggagccttatgatgtcgtcgtcaaccagcccgtcgtcatagataacgtaagtggagatggggctcattaaatgcgggtagctttgtgcaaatctagggttcccaaagttttagccagcaaacagtgacatcacctaccgcccgtccctttgtcaacgagctttcaagccgtcttcaaatggccaacatgactaatcccagagagaatagctccgcaaacgccagagatggttcaattcggaagtgaagacagcgaaaacggggaatttggtctataaagcttgcgtggaatccctttatctgcccagcacacgcacacacggatatctgcgggcggtggctgcatccctgctgttgcgtccctgcatctggaagcctctgtcgaagtccatttggtgcccgtactccattgggtaaaccacgggaatagactccacatgggaggcagcgggtcgctttaagcgctccagttcgggatctatcttcacaccacacttgcccctgtatgtgctgaacatcttggggcgcagcagcttgttgtagggatcgcggaattgatctcggtacttctggcactccaaatagaaggagtccaccttgtacaagctgccgtagctgatgttggtcagtccaactggcggtgcgaactttagtagcgattcccgttcgtattgcgaattctttgacacggtcatcatgtccacttccggcacactaaaggattccatgttgactatatagatttcctgtttgcacgttgaattttaaataaaataagctgacgcaactaactaaatgtattccacatcacttttgacagggctccggtgtgatcaaagccggctttgctggtgagcacattccaaaatgcaggtttcccaattagtaagtgccgtggaccactcacgaaccttaagaacccc

SEQ ID NO: 41186 - DNA, 1876 bp, DROSOPHILA
ataaacagcatgtaaaaatataccacggcaagaaatactcaatattttacatggtggtggtttaaagctatatggatatatattttcactgtttttctctacattttaaaaataagcagaaaaaagtaagaaagtaataattattataaaaaaggttttaaaaataaataatggttttaaaagaaactcatgtaagtttccattgtcaaatccgcactttacatggcagtatttttattcatggtatattcaagcggtggtattccgcaacgttccaactgaggtcatactgatcaaactggatgaaatggccgaggcgaatttggacaaaaaacctgaggtgaagcctccgccgggccttaaggccatcatagaccacctcgggcaggtgtaccccaaccagccgaacccgctgcaggtgaccacactgctcaagtactggctgggcggtcaggatccgttggactacattagcatgtacaactatcccggagatgtggataggaacgttccgccgcactggcactacattagtttcggactcagcgacctacacggggacgagcgagtccacttgcgcgaggagggcgtcactcggtctggcatggggttcgagttgacctttcgcttggccaaaacagaaatagagctaaagcagcagattgagaacccggaaaagccccaaagaccgcccacctggccggcgaacctgttgcaggccatcggacgctattgttttcaaacaggcaacgggttgtgcttcggagacaacatcccgtggcgcaagagtctggatggcagtaccacttccaagctacagaacctgctcgtcgcccaggacccgcagttgggctgcatcgacactcccacgggcacggtggacttctgccagatcgtcggcgtctttgacgacgaacttgagcaggcatcgcgttggaacgggcgcggtgtgctcaacttccttcgccaagatatgcaaactggcggtgattggctggtgactaacatggatcgccagatgagcgtcttcgaactgtttcccgaaacgctgctaaacctacaggacgatctggagaagcagggttccgatctggccggcgttaatgcagattttacgttccgtgagctgaaacctaccaaggaggtgaaggaggaggtggatttccaggcgctgagcgagaagtgcgccaacgacgaaaacaatcggcagctgacggatacgcaaatgaaacgcgaggaaccaagctttccacaatccatgtcgatgagcagcaattcgctgcacaagtcctgtcccctggactttcaagcgcaggcaccaaactgcatttcactggacggtattgagattaccctcgcacctggtgtggccaagtacctcctactggccatcaaggatcgcatccgacatgggcgccacttcaccttcaaggctcagcatctggcgctcactttggtggcggaatccgtcaccggctcggcggtgacagtgaacgaaccgtacggcgtgctgggctactggattcaggtcctgattcccgatgaactggtgccgcgcctgatggaagacttccgcagcgcgggcctagacgagaaatgcgagcccaaggagcgactggagctcgagtggcccgacaagaatctgaagctgatcatcgaccagccggaacctgtgctgcccatgtcgctcgacgctgctcctctgaaaatgtgatggtgtccattggttagctagtagttatttaaattaatcgaattgaatcttccactaacgagtaagttttacatttatacatctcatctaacacaatgcacgtggcctttgctcctcgccggagtccagtcaaaatatacaaacacatacatatacccgaaa

SEQ ID NO: 41187 - protein, 468 aa, DROSOPHILA
MAEANLDKKPEVKPPPGLKAIIDHLGQVYPNQPNPLQVTTLLKYWLGGQDPLDYISMYNYPGDVDRNVPPHWHYISFGLSDLHGDERVHLREEGVTRSGMGFELTFRLAKTEIELKQQIENPEKPQRPPTWPANLLQAIGRYCFQTGNGLCFGDNIPWRKSLDGSTTSKLQNLLVAQDPQLGCIDTPTGTVDFCQIVGVFDDELEQASRWNGRGVLNFLRQDMQTGGDWLVTNMDRQMSVFELFPETLLNLQDDLEKQGSDLAGVNADFTFRELKPTKEVKEEVDFQALSEKCANDENNRQLTDTQMKREEPSFPQSMSMSSNSLHKSCPLDFQAQAPNCISLDGIEITLAPGVAKYLLLAIKDRIRHGRHFTFKAQHLALTLVAESVTGSAVTVNEPYGVLGYWIQVLIPDELVPRLMEDFRSAGLDEKCEPKERLELEWPDKNLKLIIDQPEPVLPMSLDAAPLKM

SEQ ID NO: 41188 - DNA, 2526 bp, DROSOPHILA
cttttgggaaactgattccttgttgacacaatagaaaccaccatatgaccacaccttccacgctactgcaataactagaacatttagaacaacaaacagaatggcactattatcggcaaatgatggcgcatgcataaaaatgaggagatcgaaagtgggtggctggggatgggataaccttgtacttcttgagataaaaacagttcagtatttagcagcggcttattcctgaatgtttataaacaaatcgagcgagagagcgatgcataaatgaaatatgagggggggtgaagggtggttgcaaagagggtgacttttcgcagacgctgcggcaccaacacaagcaaagcaacggcaacaatttgcacgtaaaactcagctgctgctgctgctgctgttgccgttacataagaaactcttgcaaaaagtgcaaatctcaattcggtatgcaaatggaccgctgccacaatgtactcaccgtttttagaaactattcagtggccaaattgcgattctgcttttatgcgccaataacaaacggctcttctccaccgttgttgttgctctcctccttgttgttgtggtcgcagctactgcttagcgaagcagttgttattgttgttgcggcaacagtaatttgcaagtgcaccgctattgttgaatgtttttagacgattgtcatgccagtggaagcttccagtctgcgtcattcgcggagacgcgtagtttcacgttcgacgacacaaccgctcacagcgaattttgttttcggactagagctgagaaacggcgaattttggtgcttctggaaacatcgattaaactaaaacccgataagtatgcgacaagcggtcacactcggcgatgtgcgataggattgctgcattcgattatatagttatcgaaaagagcaaagagaagccggaatatacggcattaaaagtgcattttgtattaaaattaagaaaattagtaacgatataccgcagaatagggagacatggccaacgtggaatctatgattgtggaggaaaagacgcaggtcaagcagattgaccgcgagaaggtttgtttgtgaccccggtcatgtttacttcgcgtttgctctagatgtgttaataagtttatgtattttccagacctgtcctatgctgctccgtgtcttctgctctacgggacgacaccactccgtgtcggagtatatgttcggcaacgtgcccaccaacgagcttcagatttacacctggcaagacgccaccctgcacgaactgacctctctggtgcgagacgtcaatccggacacccggaagaagggcacctactttgactttgctgtcgtgtaccccaacttccggagtaatcacttccagatgcgcgaaatcggagtgacctgcacgggtcaaaaaggaatcgatgataataagacacttgctcaggccaaattcagcattggagactttctggacatctcgattactccgcccaaccgactgccgccaaccgccaggcgccagcgtccgtactgattcttcactttcatctattctaatcattttaatctttcacttgacactcaatggagtatgaacataattataagtggaatacaagtaagacgaactacgagctgcttgacttaagggactatatgttgtggggagtatcagttcctgtaaaagccgttcgggcgcttcgacttcttcttgcccaactgcgtcatgtcgatctccagaccattgggcagcacggcgcgattctcttcgtagttgacgaacccgttctcttgtagctcttcctcgttgttgcggttgttaggatcgcacttgattccagtctcatagtggtactcacgtttgttgccatctggatcaacgtagccataggttcccctggtgaacgagaagtttgggtaagtgggagaaagaggttggattcaatctgttttactcacttggtgatgcaatcggtgccgatcagctcctccttgaaagatccgtcgtcgttctcatagccccatgtgatgcttccgtcctcgttttcctcacgccacttgcgaatggtctgggaaacgggctgacggcgacgctgctgctgctggtcaacgtgatcgtcctgtagctgattttgatcaatgatgggacgcggctggacaggcttagggcgtggcctggccataggctgtggtggtggtgattcaggtcgtagggcagcggaagacgctggtcttgttcggatcacagccacccgctggggctgttgttgcggtggtggtggcgctgctgcagtgggcgtaggtcgctccaatccgaatctctgcgagttctcaaaccgaccaatgccaaaatcattgaaggcggcgggacggttcaggggcgtcggaatagatggccgttcagcggggaagcgcgaggaaggaggaggcaggatggcagccggctgtgagtcatcggactgaaggaactgctgcaccggcgagggttgttcaacgggttgttggccggccaggaaggcggctgctgcctgctg

SEQ ID NO: 41189 - DNA, 453 bp, DROSOPHILA
atggccaacgtggaatctatgattgtggaggaaaagacgcaggtcaagcagattgaccgcgagaagacctgtcctatgctgctccgtgtcttctgctctacgggacgacaccactccgtgtcggagtatatgttcggcaacgtgcccaccaacgagcttcagatttacacctggcaagacgccaccctgcacgaactgacctctctggtgcgagacgtcaatccggacacccggaagaagggcacctactttgactttgctgtcgtgtaccccaacttccggagtaatcacttccagatgcgcgaaatcggagtgacctgcacgggtcaaaaaggaatcgatgataataagacacttgctcaggccaaattcagcattggagactttctggacatctcgattactccgcccaaccgactgccgccaaccgccaggcgccagcgtccgtactga

SEQ ID NO: 41190 - protein, 150 aa, DROSOPHILA
MANVESMIVEEKTQVKQIDREKTCPMLLRVFCSTGRHHSVSEYMFGNVPTNELQIYTWQDATLHELTSLVRDVNPDTRKKGTYFDFAVVYPNFRSNHFQMREIGVTCTGQKGIDDNKTLAQAKFSIGDFLDISITPPNRLPPTARRQRPY

SEQ ID NO: 41191 - DNA, 12550 bp, DROSOPHILA
acaattactcagccgaactgtttcccaccgtggtgcggaactcggccatgggattgggatcgatgtgtgcccgtttgtcgggagcccttactccgctcattacattgctggactcatttgatccgaagataccggccgtgctgttcggcgtggtggccctgatctcgggcttctgggttatgttcctgccggagacaatgaaccagcccatgcccgagtccattgaggatggagagaacttcggaaagggagatacttggttcagtcagtgtgctggtcgcaaaaagcgccagaatagcgtatatcccgacgatccggagcaaatggtgccgctcaagaacatcgagagcaagtagaacctagccaaagacgattgtttcccaagtccaaaatccagcttaaattccttgttaccctgtgttttcttgttaagaattctactcttctgcctagtagtaagatttaatagtttctattcattccaagcgaataaaacgatgtgcagaatatggggaatcctaatttgtggattcactcatttctgagtgtccctttgttgtttgtacggattttttcttttaattttttcggtggtaaaatttagtttaaaggaaatttaaatgcttgacgagcatttttactgattagtgttgtctacttttaggctctatcaatttaggcgcagattcatagcttgaatttcaattttctctacggtaaaaccagtacacaccaaaaaattatttcccaactatttccaattaaagtttattctccgaccgacacagccaattcgggttcgtctggccttgcaaagtttcagtaatttccactcaattgcactatcgaattgccaattgccgacagggatttccaatgtcaaatccataacccatcgcttccctttgctccacatgatgtttaacccgccaattaaagtttgtttaaagagagagttttggtttttcggtttttgtttcttgtttggtaattcttcattttgttttgtttggtacatttgagaacattcatttcgaatttgaatatattttcaatttaaattttaactacacgtaggcatatagatttataaacgtatgtatgtgtatgccgatatctgatgcgatatcgttacacgatttcgctggcttagaattacattaacatttacatagatatagtagctttatatctgggatttcggatcgcggttctcggtagcgcctctgtcagcgatttcccgtcgaaggtacacagagatatatgtagatattgttagcaggtatttgcgatggcttaacatcaatattcttacacatagacacactcaaatcgcgagataaacacatctagatgcggttgttagccaatgaacttgtatcagaagccaactggggtaaatgctacgcttgaaggaagggtgggaaagtatgtcgggtatgggagttcgagtgcctattaatacaaacatacgaacgtagctaaatatatgtatgtgtaaattaatcacaattgaatcggaaaatatttacaaaaaatactcaatcgaagccccaaccatccgcagagcatgagtcccaacccgttgtcccgatcgtttggttttacaactcaggttttcagctttagtttcgtcaccaccttatgattatgcccgttccgggcacttggtctggacaattggcgccttcacctgcagtcccggcccggtctccgccagcatggccgtgtgcacaataatggccggctggtcctcgctctgaggatgcagctcgtgcgactcgccgggtgtgaggctagccaacgcggccaaaagatcatggttgaccagtggctcgccttcctcgcgcggctcccagccggctggcggcgaagcgggcggggagatgaggaactgtttgaccggcgccggtggctgcaggttcttgttgctgaccggtgtcaccggctgggcaaagtagcaggtgataaccgtcttcttgttaaactcgtactggtgcagcttgattcgcgcatttgccgccgcaatggcattgtcatagttaacacgcaggcgacggaagctgcgcagccactggaacgtagccgattcgctgaatgtgcggaataactcctccatggcgtgcttcagctctggattggcaaacacctcggagtggatgttggtcacgatgattgaggtgggtaggtcgtcgaacgagtctgcatccacctccggctctgtgtcgctatccacgtctccctcctttgggagcgacggatgctgattgggcaggccgtcggcggcgttgatgaaaatgtcctggtccggcgacagcttgtctatgctgccgcctccactgctgttctgtgtcgacttcagtttgttcttgcttctgccgttggcgctgttgttgttgttgtgattgccacgcggagttgtcggagtggctgcattggccgcgtcagcttcgccagtggcgtcaggagtggtcggatcaggtgcatcggcggacgcattgttgttggacttggccgcgtcggacatggctggctgaaaaggaaatgaaagctactttaaataatgtttacaataaaacgtttttatcgaatatggcgaatagcagccaagaaatatacttctgttaaccatccatttattatttacgaagcataaaccctttttatgttgttaaacaactaattattggggtcaaataaatgaattcctcgtaaagttcatttaaaagcttgtttttaatggcaaatgtatgtgggaagtggccgctgttcaaggatttatttttgtgatagccattaatgctatatttatgttatacggcctttaattatagcccaacgagcacggactttacagtaattggattcaacaagtcagtgacattctccataaatagaactgtcagctagttaaccttcacctccaaaacatttttaaaaaattggtaaacagcactcgcaaattaattccgcacaagcgacgagggggttggataaacacctcagcacaacgacaggatagggtttttgtttgcgtaatatatttgtaacaaatttcgagcgccacgctacgtcaaaagaattgctaccgcttttcacggaactggcagcccttcaaagcaaaccaattacggtaccaaaaactacagacgtgtctaagtttgggaaggagcgggggaccacaaggaagtgggtctccggcaggcgaggaccttaagtagcgacacgtgaagctaatcaataggtctatcaaaggggttggagttaaaatagggatctccgatggtgacgcactgttgattcacaactgctcttgattttattgttatgcctgctagccacaaacttttggcgaagggaaagcgccagacggttgattaatagtagcgaaatttttatgaatgaatgaattagtgaggaattggcgtcagaataaaaatggtgacgtgtgtctgcttctgcttcgcacctgtgaccgccatgaaacccattcccaacgaatccaagggaacccttggtgggtttcattataataactgccagtcgtagttctggatgggtgcccatttgtatgctataaaaatagcattcttcttagtgttttattgtggcccatgaatcagcaatatgcagtgagttaattatacgctgtttacccggacagggagttatttcagacaaatgcaaatgggtttttgtgctagcttgggctaacaaaattggcttagtttttgggtgcgaaatgtgcgaagtttttatgagtttccatgcaaggattcggcccagcagctgaaaatgtttgctttgtatttcttaattaataatttttggcataaattaaatttccaagaacttttaatgaattttaattgggatttggattttatggtttccataactcaattgattttatgccggcaactatattataattttgtttttgttatttcttaaaaaatgactgttaatagactaagttttacgtgctaatgcgattatatatatttttaaaggaaggcaaatggagcgttgaaggataactaaaatagcttaagggttattcttggctatcaaataaagtaagaaattccaattactaccttatctatgaaatatgttttcttggaactaagccattcttcgtgtgaagtaaattgctttttaaagcgattaaattgtaataccatctttgtgttaagcttatacttatgattttcggaaaataaataatcacttgaaggaatgacaaggccaaggactggggttttaaagctcaccagacgcgacgcaagaacctctttggctactgaattcccaaagcttatgctttgttagtactttcacttttcttttatggctattttattttttgttgactttcacctcaacgcaggtcagcagagcaacaacagtaagcgccgtagctaacaataaaaacaaaggccaaaaaagaacccaacgacgagttgatctatttccgtatgattgatttccttgaaaggacacacccacgcaattgcgacttttgcttccagcggcagttggagatgctactgttgttcatgacgtgtgtactttgtttgccgtagagcttgatccctatctcaggagcagcatgggaatgaggacgcgtgtaagtgcaagtcagcatgaacgagctgctggcatgcaaatcgcatgggccgcgtgtgacgtcaccgttcctgcacgcaatccataaaaaaaaaacgaagaaagcgggccgatagcgcactttaaactagacaaaagtagctctcagccccgcccacttttgaaagcggtgccgtggtttcgacatgatgatgaattgcctgccggtcgttagccaacgaccttcactcattcataattgctgtcatcattatatcaagtggttgctgccccccaccataggactcctgctctctatccaaccatccatatccatgtaatcatttgccaatccatccatccttttgctcatcccgccatgtcaggctttgcagatttttagccataagtagcccgcatgtaagccacctcaaagacacgcaaaagctctctaaatcatttgagacggcttcagtgggccactcaaaaaaaaatcagcaacaaagggatataaacaaattcatgtaacattttaagctgaacactaatacaatgcgttgccttttattactttaataatattgatcagaagctctaggacatccttaaatgtttaagttgccatttaattgaagctcacgtccctcacttaaaattgatcggatgtgttcgtgggaatacgagtgtgagtgaattgtggccttatttacattatcgtcccgatttcgtgacaaaaggaaaatcccacgagtgcgctttccactctccattacagctgctgctattgcatttgccgctgctgctactgctgcagttgcaatttcagtttaccctatttgaatgcaaatgcaaataacgctgggggaagattaatttgattttctgctgaaattttaaactttctcctggcagataccacgcgtctgagccagatatttgcgattgatgtaaaccgcctggaatttaattaaattgttcctggcctttatagagagctcaaagcggcgctctgttattacagctccttgcggttgccgatggaggttttgctgctcatatttgtgcctgcaagtgtcggcttcgtttgccacatgtcacatgttgctgcaaccggaatcctttcaaggcaactgcaaaagcaaaaggtcaggcggtcaggtactgctacagttcggtcactgctcgttgggcttgctcgaagcaagcattacatcaggagttctgtggcaggacgacacgcgaatcgtgtgcgaaacttaagatattttgctgaaagcttcgtcaactaaattaattgaatcctaattagtttggaacttccctttgttcactgttcaatctgggctggattgcttctgctgtaggcttagaaatttcccacacacgatgctcattgttggaaatttaaatactcgtatctgtgggctgcacctgaaagtatgctattcttcccacacacatggagattctctgtaatttagctccactaaaccaaaccagctttgctttcacggctgctgtggctggataattactaccaaaggtgaaacgttcaccgaaaactcgcccagcatcatgagcggttttgcgtgggagcggcatagccttggtgagtgcgtggttgtggctggaacggaacaaatcctgctgattggcaggacattgattggccgcatgagccatgtgtggaaaatgcaaaatgcttaaaagcttagctttggactgcagatcagcgagatttgtatttgatttctatatacactgcgaagatattatttattctatcactagaaaaatcacaatgaaacaagaacgctagagtattttaagtaaacagttaagtaaaaagttaaatatttaagatttatacccagcagaataaagcagactacaataaatttataggaaatcgaattaccaggaaagtttaattccagtaaactgaccaatgcaaattgtaattatcccaaattatgcaatattttaaaaatcaatttttttttattttagcacgtaactaatatgcttactaattctacggggaactgtgtgggtttgctttgtggaaacattaaacgtaatccctttatccagtggatagttgttcaccacccgtcaaccggtcacaagataacaactatatagctttgttaatgccgatacctttgtaggctgcgcacagcatccgagggaaaatcacggaatttgctgaatttacctttggcttgcatgacaatatcaggttttcgtaattacccgacacttccaggcatgaactgttaattaaatcatttacacaccgatgaatcgcaccgcaattggattgttaacacatttgtaccaagtgaatgtatgaaaaatggtttctctttttggggtcagaaaattcctggcatttcgattgaccttcgacgaaattgtaaattctaatgcggcccccatacacataccataacagctcatccatccccgcccactacttttacaaattggattgttatcactcaaagtccttgggcgattccgaggagttttcacttgcctcagactcaaactgattcgaccagcccctttgttgtcgactgtcactcgcaactgtgcggctccaagtgcaaatgtatctgtgtatctgtaggtttctgtgtgcgcccgtcttgtcagcgctttgacatgaaaatagtttgggccaacttggctatgcaaaagcgatttctattaggagccgccatcgccgacatgtgctgccgaaattcggtgatttgggtaggatgaagagattaccaaaagtttacagtggttcttgcttccaagcaaggaaggaattaaaatcctgttcagcaaatattccaataaatcgcttttaagcaagtgttatcagcagttcaatgttgagttcaaccggttgaaacccgctggttatcgtaaatcatggccacggtagttccctcgattcgcttcttatcgcgacgacagtccccactgacgcaccaaatggacgtatttagactccatagataacatttggctattgttactatggttaattgagacatttacaactcaagtatacctcaagtcaagcagaacatacgtatgcgcgcatatacagtcgaatggaatcgacgtcgctgccaatcaggccgatgtgttaagtgagttaggggcacttttgcttttgggacgtgacgtcagtgcaaactgcagctagatccagtcaagccaattgacgaaagagccgacggcagcggtctgtacgtattcaattcatcaattggcaaaaccctggcaaaaaggcaagaagatggaaaacaaaacaaaagcgaacgcaaacagaaatagcataaaatggacaacagacgcgacaacacaggcaccaatcgtaggggcaaaaattatgagttgcttttattttaaaatcgtttcatttattttgcgtcagcagcgcctctcaatgaggaaacgctgcgtatacataattttctggccacatatacgcactcccatatctttctcccatcgattcagtggtcgttcgcaatcaaaggcacagacgagtgatctttccttggccttttgcagtctcttaaagacgggttgttttcgagtgttttttgcagcagaatggtaatcagaatgctctcggcaattctttattgaacgaccgttcaataaatttcacaaaaggaaatgttatcagcgggtattcttaaaataactcaatctttaacaacttatatttggaatcaatcacatcaacccgtaatcagataactgataacattttagaggaaatagtttgtaccggcacattaacaagttaatggttttgttattcgccttatcgtgaaatactgtaaataaattttttaattgcttttcgaaagtagttgtttacaacttaatttatcagagtgtttttgttctccgctcagaattaatcacgaagtggggtggtaatccagattaacataagaaaaaaacaattttaaaatataatattaagtcgccattatgcatgagtaacaactaacaaattgctataaataataggagataatcttgaatactgctagaaagtgtaatacaatgtaaggcaattaaatgtgcaataaaatcaatgttattatcagcatgattgtatatgtcggagcgcgactcttcgcattccagaaattccttctgtgatttcatattctgatgaaattgtaatattgcggtaaaattctgtcgagcgctgcggcagaggcacgaacagcctctgcagctgagtgaggtccgatcgagtggtcataaatagtgtgttagagagagatgacaatgtggcacacgccagtgtgtatagccattagagaatatgatgaagaagggacatgtaagaagatcccttcagtgaagtttgactgctgacgtcgatcggaacttgctgcgctgacgtacaaaatcgcgaagtgaataaataatatggatgagactcctgtttcgccgacatatacaatagtgctcaagaccctaatggaattatacgttaataaccagccacatttcttagatatttctaatatgagccatctgctgcaggttctttccaatatctaattctagatcttcttcgaatacgacctttttggccatgaaacgatgatttgccacttcattcacaagcattaatttgtcatgattctcttaagcgtgcactttatctgaaagtctgaacagctggctgcgaaatggattccccggattggaaatggcaagtaaatctgtcctcgctacaaacaagtgggcaccactgggcattcggggaatagggatatgggtaggaatggggatatattgtggcattggcgaaaggtcgctatgcaaagccaaggtcgagacttacacccaggacattgtgttgtgcggctggcagtagaaacgcccacgcacacgcccctgtcaactggccgggtaaaaaatagaatcaaatacatatgtatacagaacaggagttgaagcaaagctcgcattttatttgcatttgtgaatttattgctttcggttacgtctgcttcgccttgccacttttccaaactcgttgtgctgctgcttggggaattttcggaaattcgaagtgattgggtttggagcagtagccaagggcttctactgttgctcaaagcaattaatatttgagaaaaaataacgaaaacgaagtaaggcggcagcaacaaagcgaccgcaacagtggcaacaaatcgccccacaccgcacgtcttcagtttacaaccaaggacttggcacgtttaaaattcagccagcagccgcagcaacgaacacggacagtgggcggaatttaatttcgaaaaacatattactttattgttcacatctttacccaccttccgattcgagtacatacgattccactgaagccactgaagacttacttcacttaaagtacattttcttcaacttcgtggggtctttctagaacttaagacttattctaacttaaaaagactataaagtttttaaacattccgttgttttgtcaaatttgaataatttacgaatgtgaatttgtcgcagaagtattgctgagtattatctttataaatttttcattttttaaagtgactaaagaaacagctttaatgcgtcttacttcatattggtcatcccgaccacagtgcactggttaccaaagtatgcgataacaataacatcgtccactatgtggtcgttgctggggttacgggcagtcagtcacggtcacggctgcaacccctccgctccggccaaaacgagtccacagaacaatggccaaggacgaaggggggggaggggggattcaataacaacagcaggaacaacaaacattctgctcccacgcaagagcagcaggaactgtggcaaaaacagctgctgcaggatcaacgaggtgggagtggattcgaggactttaaaacacgagccaactaaaaatattcagacacgccgaagcgaaaataccctttagcagggggttaattcaagtggggtattttccccttctagtgtttttcttttaccagggtaatcacagattctgtttctgtgcacttaaacggggtttattccgtttctaaaaatatcaaatgtctggattgacttatttcttggtatttgactaaaaataaaaacaaatatgcagcttttgggaaactgattccttgttgacacaatagaaaccaccatatgaccacaccttccacgctactgcaataactagaacatttagaacaacaaacagaatggcactattatcggcaaatgatggcgcatgcataaaaatgaggagatcgaaagtgggtggctggggatgggataaccttgtacttcttgagataaaaacagttcagtatttagcagcggcttattcctgaatgtttataaacaaatcgagcgagagagcgatgcataaatgaaatatgagggggggtgaagggtggttgcaaagagggtgacttttcgcagacgctgcggcaccaacacaagcaaagcaacggcaacaatttgcacgtaaaactcagctgctgctgctgctgctgttgccgttacataagaaactcttgcaaaaagtgcaaatctcaattcggtatgcaaatggaccgctgccacaatgtactcaccgtttttagaaactattcagtggccaaattgcgattctgcttttatgcgccaataacaaacggctcttctccaccgttgttgttgctctcctccttgttgttgtggtcgcagctactgcttagcgaagcagttgttattgttgttgcggcaacagtaatttgcaagtgcaccgctattgttgaatgtttttagacgattgtcatgccagtggaagcttccagtctgcgtcattcgcggagacgcgtagtttcacgttcgacgacacaaccgctcacagcgaattttgttttcggactagagctgagaaacggcgaattttggtgcttctggaaacatcgattaaactaaaacccgataagtatgcgacaagcggtcacactcggcgatgtgcgataggattgctgcattcgattatatagttatcgaaaagagcaaagagaagccggaatatacggcattaaaagtgcattttgtattaaaattaagaaaattagtaacgatataccgcagaatagggagacatggccaacgtggaatctatgattgtggaggaaaagacgcaggtcaagcagattgaccgcgagaaggtttgtttgtgaccccggtcatgtttacttcgcgtttgctctagatgtgttaataagtttatgtattttccagacctgtcctatgctgctccgtgtcttctgctctacgggacgacaccactccgtgtcggagtatatgttcggcaacgtgcccaccaacgagcttcagatttacacctggcaagacgccaccctgcacgaactgacctctctggtgcgagacgtcaatccggacacccggaagaagggcacctactttgactttgctgtcgtgtaccccaacttccggagtaatcacttccagatgcgcgaaatcggagtgacctgcacgggtcaaaaaggaatcgatgataataagacacttgctcaggccaaattcagcattggagactttctggacatctcgattactccgcccaaccgactgccgccaaccgccaggcgccagcgtccgtactgattcttcactttcatctattctaatcattttaatctttcacttgacactcaatggagtatgaacataattataagtggaatacaagtaagacgaactacgagctgcttgacttaagggactatatgttgtggggagtatcagttcctgtaaaagccgttcgggcgcttcgacttcttcttgcccaactgcgtcatgtcgatctccagaccattgggcagcacggcgcgattctcttcgt

SEQ ID NO: 41192 - DNA, 1820 bp, DROSOPHILA
aaaattcgctgtgagcggttgtgtcgtcgaacgtgaaactacgcgtctccgcgaatgacgcagactggaagcttccactggcatgacaatcgtctaaaaacattcaacaatagcggtgcacttgcaaattactgttgccgcaacaacaataacaactgcttcgctaagcagtagctgcgaccacaacaacaaggaggagagcaacaacaacggtggagaagagccgtttgttattggcgcataaaagcagaatcgcaatttggccactgaatagtttctaaaaacggccagccatgtccgacgcggccaagtccaacaacaatgcgtccgccgatgcacctgatccgaccactcctgacgccactggcgaagctgacgcggccaatgcagccactccgacaactccgcgtggcaatcacaacaacaacaacagcgccaacggcagaagcaagaacaaactgaagtcgacacagaacagcagtggaggcggcagcatagacaagctgtcgccggaccaggacattttcatcaacgccgccgacggcctgcccaatcagcatccgtcgctcccaaaggagggagacgtggatagcgacacagagccggaggtggatgcagactcgttcgacgacctacccacctcaatcatcgtgaccaacatccactccgaggtgtttgccaatccagagctgaagcacgccatggaggagttattccgcacattcagcgaatcggctacgttccagtggctgcgcagcttccgtcgcctgcgtgttaactatgacaatgccattgcggcggcaaatgcgcgaatcaagctgcaccagtacgagtttaacaagaagacggttatcacctgctactttgcccagccggtgacaccggtcagcaacaagaacctgcagccaccggcgccggtcaaacagttcctcatctccccgcccgcttcgccgccagccggctgggagccgcgcgaggaaggcgagccactggtcaaccatgatcttttggccgcgttggctagcctcacacccggcgagtcgcacgagctgcatcctcagagcgaggaccagccggccattattgtgcacacggccatgctggcggagaccgggccgggactgcaggtgaaggcgccaattgtccagaccaagtgcccggaacgggcataatcataaggtggtgacgaaactaaagctgaaaacctgagttgtaaaaccaaacgatcgggacaacgggttgggactcatgctctgcggatggttggggcttcgattgagtattttttgtaaatattttccgattcaattgtgattaatttacacatacatatatttagctacgttcgtatgtttgtattaataggcactcgaactcccatacccgacatactttcccacccttccttcaagcgtagcatttaccccagttggcttctgatacaagttcattggctaacaaccgcatctagatgtgtttatctcgcgatttgagtgtgtctatgtgtaagaatattgatgttaagccatcgcaaatacctgctaacaatatctacatatatctctgtgtaccttcgacgggaaatcgctgacagaggcgctaccgagaaccgcgatccgaaatcccagatataaagctactatatctatgtaaatgttaatgtaattctaagccagcgaaatcgtgtaacgatatcgcatcagatatcggcatacacatacatacgtttataaatctatatgcctacgtgtagttaaaatttaaattgaaaatatattcaaattcgaaatgaatgttctcaaatgtaccaaacaaaacaa

SEQ ID NO: 41193 - protein, 292 aa, DROSOPHILA
MSDAAKSNNNASADAPDPTTPDATGEADAANAATPTTPRGNHNNNNSANGRSKNKLKSTQNSSGGGSIDKLSPDQDIFINAADGLPNQHPSLPKEGDVDSDTEPEVDADSFDDLPTSIIVTNIHSEVFANPELKHAMEELFRTFSESATFQWLRSFRRLRVNYDNAIAAANARIKLHQYEFNKKTVITCYFAQPVTPVSNKNLQPPAPVKQFLISPPASPPAGWEPREEGEPLVNHDLLAALASLTPGESHELHPQSEDQPAIIVHTAMLAETGPGLQVKAPIVQTKCPERA

SEQ ID NO: 41194 - DNA, 8144 bp, DROSOPHILA
gctgccgcccactcctccgcctgcaccggaggccgtggtggtcgaggtggagagtggcggcgagatggcactcaaagtggagatgccgctgtcactactacatatgccggccggcagtgacgtgtgggtgggcgagatgaggtgtgggtggtggtgtttgccatttgcggcaccgatgaggccggccatgccgctactgggcagtacgggagccaggatgcctcccgggatgagtttcctgatctgcgcggggctggtcctcgccctgtcctaatgaatgctgggaagctagaagcagcttcctcgcgtctttgtcctcatcgttggcctgcgccctttgttcctggtgaggacttcgtatatcattccttgtgcgtaggaaaatcaatgaagggacgcgcttaaaacatgcattttaagcagcgcttttctcgctttgtaacccaaattgcgcatgaaaaaagtaaggcgaaaatccacacacgcacgcacacactgccacgaactggttcgcgatagaagagggtttttccacggtctgccctcaattgggcctattggattccctttcgcctttcttcgatgcttttggccaggtacgtgcccgtagtctagttaatagcggaattgatttatcctcgacaaataaagcgaacacatcacattttccactttgtgtttttggcagaagcagcagcacggaaaagtcttctttgtccgcacttggctcgaactctccgacggtctgccctccgggttctgaagcggaaaactctgcggcgaagttcagcgattccggggagcgggcaaagcgcatgtgccggctgtggcccgttactgtcccaaaacaaaacaaagcccgagcggagagagtgaaagctaactgcaagcagctggcgtcgtcgaaagttccatccccgaaaatcagtttgtttaccatcctggcagagcttttcatgggcaaagccgactaggcaataccctttgtaaaacaaagcggtgagtttgtataataaatttatttcggcttcttcgtgttagaccagaatacaattgaaatttggaaacaattgttaagtttaaatttagtttacttagtatttttgctttgacttgtacgaacaataaatacacacgcaagaccgtaaaatgtaattattaataattgaattttatatatgtatgcgtgtttatactatagatgagccggcgactctcggatcccggccctagacccaggcgcccaaggacttttatcctggcccggagctgatcggcaataattgatgtcaatgatttagaatgggatactacaatataaaagttaattactgctggactaatcgcattcatttacatttaaaagcgggttaacaatcaaacaaaaattaattagattcaattcaattttgaaacaatttggaatacataaatatgtgcaatactttcgggggttacaattcaacttttgattactcgtatttaattgttttatatatagaggggattattaatatctgttatataatttatatttgcgttaattggatcgcccttcaaagtgtcctcttcttcgtcctcctctgtttaactgtgtgatgcttaattgtttaactcgtatttacatttgcattagaatcggatcggagcaatctgctgggcgcgtcgctcgacaattcatcctttttacataagtagttctggctttaacaatttagtgcaaaataacagaaacaatcggtgaagaggagatctcgagaacaaattagctagactaagcgacgacacaaatgccacaaactagatacacatatcatatacatatatataattacagtgcctctcttcgcgactgaatcccaactcacgggctaagccgcaagggatccgatccccaagcaaatgtctagacaaacttccgatatacaatttcatcaacaccgaatggtgttttggtgattagcatgactggataggtggagatggtggcttcgcggcttggctatcgattcgagttgtatagtggtacagctgcaaggctagatgcatggcttgaacaatggaattggtgaatcgattgcccgaagtggaccaaaatcaacctgactgaccggagggcggccacgaagttcgatagtttaaaattagagctaagtgctacggcttaaaataaatacattggtttctatgtttactcgcttcaacatatcgcgcattttaaaaacaacactaataattatgaaataaatctggttttctcttctgttacgatttaggggcttgtgttttctgtgtctgtatctgaatgtgtggtgtacgcaagcacccgggtcttgactcgctcgcagcacttgactaatatttttgattaaccatatctagagtgaagagagggggagagagaagtagacagtgataagtgaaaagaaatcaaaatgtacgcgttgcataagaaacgataaaactaaaatccgtcaaacttaagctacattctttgaatatgtcttggatggaaattaaaattttcatttcatttaatttgcgaaagcttggaaaacaatcttgaaaggaggtctttaaaatgggggacttgagtacggctggcgcagacctaaggaacgaaaggctgagtcaatcaatctattcattggtcatcctgcagctcgggcagtgtgtggtaatgtaattcagcatgcagatctaagtaaatggatcccatattcgcgtggacatgtacagaaagtgactaaaaaataccttgccggatacacgagcttactgctaagggggtgttgatctgatcgctggacggggtatgtcgactggtgactgaatgccttcgccacctatccagcgaccgaaggaaacaatatttgttcgatatatgcacaataacaagttcgatggtcaaagacgctttgtcggattgccaaactagcggaggctggctgtgtggttgacttctggaccaattgcttatatacctggcgtgtaagtggtctgctccgttgtgtttagcgacgtattctcgttagctgctacaggggcgccggtgaaggggtttactcccacggctccactgggcggcggcatggcgaaaacaggctgtcctccggcctgttcccgcggctgtgaggtaacgggggctccgcccgcacccaagttaacgtcgtctaggtcaacgtcctcctgcgggacacaaaagagtgggattaggatttctgccggtattttagtttctgcagcaagttttgagagcttggagggaaggtcccttaaccaatgtttagtcaaaaactttcggtgggctgcctacaagccatgtatgtacactattctacggtttagttacgaccactacattactcttgtgctgatggatagaaggacccttcaagccaaatactacaaaattaaaatcagccagatgacagcattgaaagaaaatcataaaacatttaccaagtatttacagcagtactttcaaaaaaacgacgtttttttattttgtcatctcttcctctgttctctcgatcaagttagttttgcgactgaatgttagcttagtaagacgtgttcccttggaacatataaatttcgattggttaccgtttaagtagagttcggatttggttattggctttgtgttatttgggtggtgggtgggtgggtgccttgagccaggtggaggcggtaggcaggccgcaggtgatcttgcacctttttcatgcggtactcgtgctggtattattttcgatttgcatacttacaaggcgtggcggctgtcccagatgcgttggcatatcgttgccctcccgattgccatcggggcgctgacggcgaggtcgagagcgaatgtgtggtggttgtgggtggtagtaggtggtggatatgatgagtcgatcgcaaagatttttgagaaaaaaaaagaagttaaccaaaaatagaaacgtaagtctatagcttctgttccttagcttgcaaactagcaaaggaagaagacttctaatctgggtggtttcaaaataaatttgtatgcgcaatgggacacttaaaaaacaagaaaagcaatcgtggaaaaaacaataatcgttgcactgtctgtctcgagaaatccgagcgtgtatgtgttgacgttatttattattttttttatggagagagaaacgttggaagcatttgatgattttcgtgaagtacatatatacaaaacaaacactaacaataaattatacaaaaattgttcgatggatcggaaaagttttagggttagtcgtgtttacctctggtctcaaaaatcagtattctgattacttcagtgtctggagaattgataatcggaaaccaaaaccaaacttcatacttacccaaaataaactaattacaaagcagtgcaatcagagtagtgtttgtacggagtagtgtgagtaagggaaaaccaatcgagggagatggtgtgccaagatagctgataacccaggaaaattatactaaaaaatggttaggcgtttattgttcgggcagctgttaagtaagcgttgatgtcagatgtaggggctcgtttttgactaaacattagcttctcagaaggaaaaatgatacagatctccccacaaaaatcatcaaagttggtttgttaggttcgtaatagtacagtgtgtgggtggatgggaagcatgcgttaaagttaatgttttagctttgcaccggattggttttcttgttttctcttttcttaactaaatcaaaatgatttcagttattggcgggctgtgttggggcgggtattatatttggacttggctaagccaagtaacttcactcacattcagatgtgaatactgatcgtgcgactcgttgaccggcggcttgaacttgccgcagcagaagttgcaacagcagcagcagcagcagcaacaacagcatccagtgatcacggcacagcagataaccaccgcctgcaaggagaatcagagattaattaatgtgcctaggcatgcgaaataccgcgattcctgacctttacagccggtgaagtgaccacgaagtatgcgttgacattctcctcgccaaactgctcggctatgtacaagcccaaagagccgtagttgtcgtatatgttgcgcttcgtctggtcgctcaatatcgagtgggcccggttgacttccttgaactgcaaatatattaatatatttatattatatattatattaatatattaatacgcatggacccatttctcggaaatattttaccttatcagccgcatccacattgtccgggttcttatcgggatggtatttgagtgcgagtttccggtaagtctttttaatatcatctccggtggctgtcttcggaagtcctaagatctcgtaaagcgagtcgccagatgtcctaaataaatgaaaatcaagtgaacatggtctctgtattgcgtaggattactatccacgtctccgcatttggaattaaaggttgataaccacgcacaggtaagacctcaggaaccactgcgtggacctgcctagcgcagttgcactgtgcctccgacattccttcagctgcgtatgttacattctgacagagggcgataaggcccagccatcgcaagtagtattggactatgactcaccgcagcaacagttagccgtggcacgcgatgggagctcatccgggcgagcacttggccctcagggcttgcctgcacccacggactaggcgttggcattgagggcgtccagttcgaaagcaactggcattgttggctctgcagcagggtcgcgtgcaacataaattgcaatctgtatggattttcttgagcaggtgggtgctatttataaacttggtaagttaagggggttggggtgcaacgctgtgtatgcctaaacccgctctgagaatctgcgagctgataaggcggcgagcgctcgacaaagtggttgaggaccacgatgatgagggtgattacaggctcaagcggatgcgtgccccagggacactgggcggtgggcgactgcacagggccaaggacattggcaggcatcatgacaatctaagccaactcgaattcgcctgggccaaactgaagcggttagtgctggcattactcatatagggtacaattatagagacggctaacgcggccgtaaaactttctgtccgataacggccaggctggttagttagttggttgtcgtgttattggatctgtaggtctgttgttatcgcgcacttatgccggaatcggtatgtgttgcacgaagacccaaacattgaacaatttaaatagaacaatatttataaaatgaagtattcgactcattttttctctattaaacaattgaaatcgtgcgatttgcgggcaaaagaggtgtggccaaccgagaagaatgcaagaggaagaggagaaaggaagaggaaattctcatactgtgtagttataatgtgtaattctaataatggtctgtatgtattacatagcacatatctgaatgatatcggctcgagtcttgatcgatgatgtgcgtagccttttttctaccttttacattttcctgcctaatgcaacataagttgaaactatgccactaagattttaactaacgattattgaaatcaaataaaaatcgaattccgtcaaatggccaaatttgtccttggccttgcccaggacgaattcgcttgtccgaaatcaaactccagccgcagctgccctccccttcccactaccggagcccattattacccctgacccggttccttgtttatcccgacgtggaaaggaaagtgcctgctggctcgagaaaacttctgccgcgaaaaatcaatttcgcgccgaccgcgctgcctgcgcgcagctgctactcacactcgcgcacgggctgagtgtgtgtactctgccgacggcgcgtgtgtgtgcgccgtggaggaaaaatgaaggagcactacaaaatacttacgacagttttctcttgtccatgccaggtgcgctcatcctgatgcctgtgtcactttgactgcgaacgggtaacttgcactagcgatcgctgtcacacgcagtgaaagtctgtgcctgccaagaaccacaatctgtgcgtgtactcttataattgcagtttttgacgtccgtaccgatgcctcgattcttatttttttcgcaacgaaattagagatggaactgaaccgatgttctatcttatcggtttacctgccgacatcaatgatttccagctctggactaacacgccatctatcgcaacattaatagctgctgttacgggactcactgtaagaaatcgcatcgaaagtgtgcaccagagaactgcagcaagccactggcactccaagtgcacccgctaaacactgttgtatctaggcagccgggtgttttttgacactctacttgcgggaataaaaaatatccgacagttttttattacgagcgcaataaccttttctggtgagcgactcacaagcaacgatcggccgcaggtcattttctgtatgcataaaatttgtatgggcggaagcgagattgtctaagaaatgaagggtgaaagggaacacccaaggaaaaggtcgtgcacgtgtttttttttttttgatgcaacccatttcgcagaatatttttttattaatatttttttatttaaaaattaaattaagttttttaattatacaattacaaagttaaataagggaagcatatattaagaactaataataaaataaaaaaaattgtctatttcgtttttttttaaattatttaattaaattaaaattatttacagttttgtaaaaagaatgtaaaaaagaggctatatacaaattttggacttaatccataatctatactatgcacccctccattccaatttcaattatttaggagtaatttatactttcgatacgacagcaaccgttttatatcggtacgtcttacgaacttctattaaaccaaaaactaagctaaattgcatgtaaaatcattaataacgattatattcagtttggccggaacgccctgctccgcttcatcggtcaaaatgtactaacgcgtggcacacgccacacagctgctgtgacacatatggagtagagtggaacgacatgttgcgcctgtaaaagggaatcagatcgactgg

SEQ ID NO: 41195 - DNA, 2798 bp, DROSOPHILA
aatcgaggcatcggtacggacgtcaaaaactgcaattataagagtacacgcacagattgtggttcttggcaggcacagactttcactgcgtgtgacagcgatcgctagtgcaagttacccgttcgcagtcaaagtgacacaggcatcaggatgagcgcacctggcatggacaagagaaaactgtcgacatctggcgactcgctttacgagatcttaggacttccgaagacagccaccggagatgatattaaaaagacttaccggaaactcgcactcaaataccatcccgataagaacccggacaatgtggatgcggctgataagttcaaggaagtcaaccgggcccactcgatattgagcgaccagacgaagcgcaacatatacgacaactacggctctttgggcttgtacatagccgagcagtttggcgaggagaatgtcaacgcatacttcgtggtcacttcaccggctgtaaaggcggtggttatctgctgtgccgtgatcactggatgctgttgttgctgctgctgctgctgctgttgcaacttctgctgcggcaagttcaagccgccggtcaacgagtcgcacgatcagtattcacatctgaatgaggacgttgacctagacgacgttaacttgggtgcgggcggagcccccgttacctcacagccgcgggaacaggccggaggacagcctgttttcgccatgccgccgcccagtggagccgtgggagtaaaccccttcaccggcgcccctgtagcagctaacgagaatacgtcgctaaacacaacggagcagaccacttacacgccaggtatataagcaattggtccagaagtcaaccacacagccagcctccgctagtttggcaatccgacaaagcgtctttgaccatcgaacttgttattgtgcatatatcgaacaaatattgtttccttcggtcgctggataggtggcgaaggcattcagtcaccagtcgacataccccgtccagcgatcagatcaacacccccttagcagtaagctcgtgtatccggcaaggtattttttagtcactttctgtacatgtccacgcgaatatgggatccatttacttagatctgcatgctgaattacattaccacacactgcccgagctgcaggatgaccaatgaatagattgattgactcagcctttcgttccttaggtctgcgccagccgtactcaagtcccccattttaaagacctcctttcaagattgttttccaagctttcgcaaattaaatgaaatgaaaattttaatttccatccaagacatattcaaagaatgtagcttaagtttgacggattttagttttatcgtttcttatgcaacgcgtacattttgatttcttttcacttatcactgtctacttctctctccccctctcttcactctagatatggttaatcaaaaatattagtcaagtgctgcgagcgagtcaagacccgggtgcttgcgtacaccacacattcagatacagacacagaaaacacaagcccctaaatcgtaacagaagagaaaaccagatttatttcataattattagtgttgtttttaaaatgcgcgatatgttgaagcgagtaaacatagaaaccaatgtatttattttaagccgtagcacttagctctaattttaaactatcgaacttcgtggccgccctccggtcagtcaggttgattttggtccacttcgggcaatcgattcaccaattccattgttcaagccatgcatctagccttgcagctgtaccactatacaactcgaatcgatagccaagccgcgaagccaccatctccacctatccagtcatgctaatcaccaaaacaccattcggtgttgatgaaattgtatatcggaagtttgtctagacatttgcttggggatcggatcccttgcggcttagcccgtgagttgggattcagtcgcgaagagaggcactgtaattatatatatgtatatgatatgtgtatctagtttgtggcatttgtgtcgtcgcttagtctagctaatttgttctcgagatctcctcttcaccgattgtttctgttattttgcactaaattgttaaagccagaactacttatgtaaaaaggatgaattgtcgagcgacgcgcccagcagattgctccgatccgattctaatgcaaatgtaaatacgagttaaacaattaagcatcacacagttaaacagaggaggacgaagaagaggacactttgaagggcgatccaattaacgcaaatataaattatataacagatattaataatcccctctatatataaaacaattaaatacgagtaatcaaaagttgaattgtaacccccgaaagtattgcacatatttatgtattccaaattgtttcaaaattgaattgaatctaattaatttttgtttgattgttaacccgcttttaaatgtaaatgaatgcgattagtccagcagtaattaacttttatattgtagtatcccattctaaatcattgacatcaattattgccgatcagctccgggccaggataaaagtccttgggcgcctgggtctagggccgggatccgagagtcgccggctcatctatagtataaacacgcatacatatataaaattcaattattaataattacattttacggtcttgcgtgtgtatttattgttcgtacaagtcaaagcaaaaatactaagtaaactaaatttaaacttaacaattgtttccaaatttcaattgtattctggtctaacacgaagaagccgaaataaatttattatacaaactca

SEQ ID NO: 41196 - protein, 223 aa, DROSOPHILA
MSAPGMDKRKLSTSGDSLYEILGLPKTATGDDIKKTYRKLALKYHPDKNPDNVDAADKFKEVNRAHSILSDQTKRNIYDNYGSLGLYIAEQFGEENVNAYFVVTSPAVKAVVICCAVITGCCCCCCCCCCCNFCCGKFKPPVNESHDQYSHLNEDVDLDDVNLGAGGAPVTSQPREQAGGQPVFAMPPPSGAVGVNPFTGAPVAANENTSLNTTEQTTYTPGI

SEQ ID NO: 41197 - DNA, 8733 bp, DROSOPHILA
agaaaaacataaatgtgtatcctaatgaaatccatcacactcggaaaaacttggctagatccaaatgacaatatggaactgatagttatgtttttctctgtgcaggtcctgtcgggcgtgctgagcctgtccctgagcctgctgcgggattgccggctgcatcagccggagtttcatcagtcggccaatatcattaaccatgtgcgcacgggcttcgccttcttcacgaccatgatcaatctgttcatctcggcctttgacagtcgattgcctccgccacagggcgactttctaaacaactaggactagagggtgggcatggtagggattgtacgcttccgtttctaatgcattcctcattccccattttgacagcttttggtgggcattctgttcgtggtcatcgggagtctcaacataaacaggcagcaggatcagacggcagcggtcatcctgaacgatgtcattttggtagtcgtgttcataatatccgtggtgaacgttatcatatccggtttcggcatagagtactcatcgcagccgctccgacttctcgatcagcacgaaaagacaccgtaaaatctagagatccaacgatttacacttatattcatacaaatatgtactttaaggctaatgcaaacctaagttgtagagggaaataaatgaatgtattgataccaaggcattgcattttctcttaccttcgcaaacaggtggctgctggactcttgctggtcattcagtccctcatcaatatgcataataccaaggatcgaaatcggggcttcgccatcaaccacttcatagatgccttcatattcctgtccgtgttttgtgacatcatgaagatgaattttggactggatccggcggttcctcacacagatgtggaacttctgaagccctgaatttttgaaatcacagctgaggttaaattttgatgaacgacgtaggctcagtgttttaaatacacttgcttgccacattgtatatataaatttttaccaaaaaaaaagcaaatttctattaagtgataatgctagccgcgttttagtgtaaaatcacagaaacaaaagattagtgctttttaacagttgtttgttgcatatattttggaaggcccgtaaatttaacgttttatttgcttactaataaatcaagatgccacgcccagaagcaggcgacaggtgagcaatcctatatttacacaatttgaattcgatataagttcgcgcttgcaagaaaagtgtgaccgccgcgcaaatgtggaccgttatcgataggcgccgattatttatgttcattgtcaatgacaatttgttttaaagcgaaaaatatagtacaggaataatagttagttagttacgataaatatgagtataatttcaaaattagattaattagtttaaattaaggccgttgacgggctggtatttctttgacgctcttggtatattgcagtatttatccgaagactctgtggtatttcttcgttgtctctggcgtggtcacgttgattggtccgctatctggaccgaaaaaagtcgtattccaaaaataatacgtatacgtacgcgcgtgaatcactcgccacacgacccagcgcagcgcgacaatcgagtgtagacacataacataactgccgtagtcgtcgcctccgtgacatccgcgccagcaccaacccgaatccggccgcgtcccccgtttccaaatccaatttcccctttaatttcggtggctaatattagagtcttgcgacatgtttagctttctgaagcgcgagaagaacacccaggaggtagtggagaatgtgatcggcgagctgaagaagatctatcggagcaagttgctgccgctggaggagcactaccagttccacgactttcactcgccaaagctcgaggatccagacttcgatgcgaagcccatgatcctgctggtgggccagtactccacgggcaagacgaccttcatccgctatctgctggaacgcgactttccgggcattagaattggtccggagccaacgacggaccgcttcatcgccgtgatgtacgacgacaaggagggcgtgataccgggcaacgccctggttgtggaccccaagaagcagttccggccgctgtccaagtacggcaacgccttcctgaatcgcttccaatgcagcagtgtggcctcgccggtgctgaacgccatctccatcgtggacacgcccggaattctctccggcgaaaagcagcgcatcgacaggggctacgacttcaccggcgtgctggagtggttcgcggagcgcgtggaccgcatcatcctgctcttcgacgcccacaaactggacatctccgacgagttccggcgctcgatcgaggcgctcaagggacacgacgacaagatccgtattatcctgaacaaggccgacatgattgatcaccaacagttaatgcgggtgtacggagcactgatgtggtcgctgggcaaggtgctgcagacgccggaggtggctcgtgtctacatcggctccttctgggaccagccgctgcgcttcgacgccaaccgccgactgttcgaggacgaggaacaggatctgttcagggatctgcagtccctgccgcgtaacgccgccctgcgcaagctgaacgatctgatcaagcgggcgcgcctggccaaggtgcatgccttcatcattgccgagctgcgcaaggacatgccctctgtgttcggcaaggacagcaagaagaaggacttgattaagaacctcggccaggtatacgatcgcatccagcgcgagcactccatttctcccggcgacttccccgacatcaagaagatgcaggaggtcctgcagcaccaggacttcaccaagttccactccctcaagccccatctgctggacatcgtggacaacatgctggccaaggacattgcccgcctgatggagatgattccccaggaggagatgaccatggtcgcggacccaatcgtcaagggtaagtccccaagagagtgaatgattaagcaccgctttgccgcattagtcacactgcacttgctcgggcaaccagacatccgactcgtgcccgcgaagatctcgagaaatctcttggttttccgcgggcatttcactggcgcgttttcgctttcccatcgcaccgaaatattgcgcatgcgcagctagaaaaatgcgccagttaacccagatttccagacgggccaaaatgcgaaaaaaacgagttttgccaagcggagtgagcggcttggcttcggatacggccaaagtatgagccacagctacagctagaccgcagccaaacgtatttaatggatatacaattacaatcacaattcaaattgccagcgaaaaacaaagccagtgggagcgatccaaaaatcgaagcttttctttggcccgcatgcacagcttcctcttttcgctgactggccaattatgcaatgcctggcaacgactatatataaaccctatactatgagcgaaacatatttgagctactatataaacaaagtgataagcaccgaaaactgataagacgagcgagcaaaaagtcggtgtcaatttagcgcttaggccagccacacaaacgcactttctgtggcaaactcaacatcgaggtggaagaaaatagcgccacaaaaccacgtattttctttcctatctcttgcaaatactctgctacccaaaatgtgatagccaattgctttgtacttgaaaaatgggcgccagtggcgggctggggcgtggcaaaccgaaaaattttactattcatatgtgtcaataattatcggcttgctttcgtcatgggtaggaactcagccaagttgactgttttctccccgcaacgtgataagattcgtggccatgatgtaatcattggaaaataccgatagcttggagcagtgcagggttcgttctaattgggccatgagtcatcagagaggggaaaaaagaaaataatagcaggcgtacagttgggcatgataaatatttcacactcgagtacccaggctgaatcggatctggctctccggagcagacgcatccaggcaaccatgacgaataccacgcactcgatgccgagccaaaacgcccagcaatataatcgcatttaagcgttgagcattcgaggaggagcagtaggaggtggtagtagtaactcagttaatcagagtctagaggcgccagtcgcattgcagtcggaaaaaagtaaaccctaattgaaagtctaattcgattcgatgcaagctggctgctccaccggttcgccctgttactgtgacctccgaccttcgtgcgtggcccagagttcaaggcccagtgccgcgcacctgttcgctttcccccatgcattcgttagtgggtcgagccaaagtggcctgtttgtcaacccttatcgggttgctaggcaacttctagttggccgtactgcacgttaccctagataaaaatcaatgtaaggccgagtcagcatgccatcatcaaatcatgtcttatcagtcgacaaaagtctgggcatgttcctctactagcactgctctaatttcaagcatcaagtatgctcatttagtttgtttatctgctcttacgctgtttagcgtaattaggcaacaagttgcggctactggccgtgcaatttttggcatatttcaaacaataaaagccgaaattatcagaactagtgcatatgtatattatgaggggctcaaaggttgtccaccgtaaaacttgtaattatattcagctttagggatcattgcttgctgagcaagcaacttatatggaaagccagtaactaatttgattgctcatttatgtaatcatccgttttgcatgcacaaacctttttttatcgtgcgagtagaaggcactgtcagcattctcttgccatttatcaatgctccttatcatgccagctaatggtgttgtgcccaatgaaacactataaaactacaacggaaaggcgtgtgattggattaattcagtatacaaagccgccagacaaggagaacgaaaataattatcttccaatatgccaggcaacttagaattggaatagtaaatatacatatgtatatatacattccaatatgtgctgcctccgaggaggagagattgtcgtccagctgatcaaacagcacccagaataatccccacgcccagttcgcccagacgatccctggtcaacccatcgccacaacccacctctggcgattatatacatatgtacgtatatatgatctgtaaaccgaaccggttgcagtcgcatacgagtacatgtattgctggcgttggcaacctgaggccgcgtatcaatttgatgctctccgattgtgacttggggcgtgtggcactaagtggctcatcctccgtctaatccgctcgtgaattccacgaaggggcccacggaattcagatgaactagcgctaagtgcaggaagaaagcattttactctatgatatacggctcggtggcaatccagtcgccacaatgctattgtctgatctctactgtttgccttttggtttgctgaccacttgagtggccttttaattcaactattagcgtattttggcctgaccttgtgcgaaagtattccacatagccgagcaaatacgtttcgctggggcaaatccaagcataatacgattggcgatcgactgatgtcatgggtgggagatcaatatctcaacgcatgtgtcatccatccgcagtctcggtcacctcgacattcgatttgggtaaaattcgatagccccctccttttaaattggacccgacaagtgaatgaacttctcgtttattattacaccagaaggaatttcgatggttgtacccctgaaaaagagaggcggaatgcgttgataaagcgaaccgaatcgaaatcaaagtcaagaacttggggctctaatttagtgcatgggcgagtgagtgagtgaatgagtgtatgtatctgtatctgtatctctgattttattttcgttgcgttcgctgcacagtttgctttcatttgctagcatttccgttgtattgtcttggataattgacttggctagctcagccagcaagataagtgctttgggtagtgatgtcttcatagtttcggttgatttgacaatggaattgacactccattcgaaatggaacttatgtggaccgtgccttgagtcactgcctccaccgtcaccatcacttcatcaccagcacatcttgaatatggggatcggcatcacatgtttagcagtatgtcgctaaatagttgtacacatatctgacacgatcttgcagaaatcagttcttctgttcgccgttcttttggttcttcgtacttttcgttttcgccattggcccactaattaaactcggtttgatttccacgtccgagtcgcactgccgcacttagcagttgtgctatgctccactgtcaaccatctttctctctatttcttgcatacccaagtggactccgacgacgatttcgatgtggccgacgagccagctcttctgacacccggctcgcaacgggagcagttcgcggagcgcttcgatcgctggctgcagaatctgcgccagcagcagctccgcctgttcagcagttgcactagtcgggtgggcaatgtcgagagcgataaggatgccgatcccggtccagaaacgcaatctatgcctcaggcagagctggagcatgagtctggctctgacttcgagttagaaaccaaaccagatcctgatcctgaagttgaaaatgaggcggagccggagacggggacagggactgatatggccgtaagcaacacgcacagtagttgattccataagtcagtggcaccgattgaatatacagtattgatttacttagaataatggaatgggaactcaatgatctccaagccatgccacccggagggcccttttcaattgcaaagagaccgcaaacgaattgagcaacttcaaaaagttaattgagatcgcactttacaacctgcaccgcccatctcaattgcccccccccagaatgcactgcaccacaattgcccagttaaagtagccggcaaagtacatgcttaagtcggtcagccggcctagtcacggaacggcggcggcgacgtcaattggagccagagcgatctaaaggttttaattgcctcaaattgaatgtttgtgcacggcgacgcaccgatcaacttagattacatgcttaattaatgcaaatttatggcgcacacagagtatcgaatgccacactgacctctccatccattcatcgcctcttccacaggtggtgccttcgagggagtcatcgacgaccatgtctcaccattcggctacatgaagggcgagggcatcgatgccggctacggagagcacgagtggatctgcaacaaggacaagccgcgcacagatggcatcttcaatgggctgggaccagtcgatggcaagatatccggtgcaagtaagtttgttataactcaaggggaaaatcgaaaacaataatcccattcttcgccacttgcagctgccaagcaggaactcatcaaatcgaaactgcccaactcggtgctcagcaagatctggaaactgtcggacgtcgacggcgatgggttcctggactctgacgagttcgcgctggccttgcacttaatcaacgtcaagctggaaggctgcgagctgcccaccgtgctgccggagcacttagtaccgccgtcgaagcgctatgactagtgtcctgtagcatacgcatacgcacacccgatcacacagcctcacaattcccaaaaaaaaaaaaaaaacacagccgtacacagatgtcgcatagagaccaactcctaggatgcactatgttcgattcttttgacttttagccacacagtgcaggcgactgcccttttatatgtactatactcgttgtgaacgcgccattaatgcgctgggtattaaaacacacaccgtatcaccgtatgaccgaccgtatgagatatcaatcataaattcgtagaatttacacaagcatatagcatatttttggataatcgattgtaaagcaggatgtagagtagcagcctagtggaataagacaaggagtgtgtgttaagcgcctaattgtcattgttgacttaaggaaagtgaagtgtggataaacaattgttcaatgccaatgaaaaaagcatgagttaaactgtatacaatatctaggttaatgtcgatgtgcagcttgaagggccattaatttgcaatcgtaccacttttgatacacaataaatgtatttttgttatactacaaatttacaatcgacggaatcgtgggttacggcatgtatttcctgtatttattttgaaatattattaattgtttgaaatgctcccgcaaggcaggccacttgaaagagaaacgtgcaatttactgcctgtgcttcgactattttgtaattagtgaattcttgaatattaaataatattaaatgtgaaactaatctgatttttaaattgtataaaagaataaaatgaaactattttggaagtgtttgtttggaatgtgaatgggggttcattgttatggtagcttatatttcaagttgatttttctttaatcaacaaagtagctatggcttgaaaaacgtttcaaaagagaatcagttacttttcagtaaactttcaaattttaaacttttcgaaactaactgatttcggtatatttttctgaactgctggtatatttaatcat

SEQ ID NO: 41198 - DNA, 1937 bp, DROSOPHILA
atttttaccaaaaaaaaagcaaatttctattaagtgataatgctagccgcgttttagtgtaaaatcacagaaacaaaagattagtgctttttaacagttgtttgttgcatatattttggaaggcccgtaaatttaacgttttatttgcttactaataaatcaagatgccacgcccagaagcaggcgacagtgtctctggcgtggtcacgttgattggtccgctatctggaccgaaaaaagtcgtattccaaaaataatacgtatacgtacgcgcgtgaatcactcgccacacgacccagcgcagcgcgacaatcgagtgtagacacataacataactgccgtagtcgtcgcctccgtgacatccgcgccagcaccaacccgaatccggccgcgtcccccgtttccaaatccaatttcccctttaatttcggtggctaatattagagtcttgcgacatgtttagctttctgaagcgcgagaagaacacccaggaggtagtggagaatgtgatcggcgagctgaagaagatctatcggagcaagttgctgccgctggaggagcactaccagttccacgactttcactcgccaaagctcgaggatccagacttcgatgcgaagcccatgatcctgctggtgggccagtactccacgggcaagacgaccttcatccgctatctgctggaacgcgactttccgggcattagaattggtccggagccaacgacggaccgcttcatcgccgtgatgtacgacgacaaggagggcgtgataccgggcaacgccctggttgtggaccccaagaagcagttccggccgctgtccaagtacggcaacgccttcctgaatcgcttccaatgcagcagtgtggcctcgccggtgctgaacgccatctccatcgtggacacgcccggaattctctccggcgaaaagcagcgcatcgacaggggctacgacttcaccggcgtgctggagtggttcgcggagcgcgtggaccgcatcatcctgctcttcgacgcccacaaactggacatctccgacgagttccggcgctcgatcgaggcgctcaagggacacgacgacaagatccgtattatcctgaacaaggccgacatgattgatcaccaacagttaatgcgggtgtacggagcactgatgtggtcgctgggcaaggtgctgcagacgccggaggtggctcgtgtctacatcggctccttctgggaccagccgctgcgcttcgacgccaaccgccgactgttcgaggacgaggaacaggatctgttcagggatctgcagtccctgccgcgtaacgccgccctgcgcaagctgaacgatctgatcagtatacgatcgcatccagcgcgagcactccatttctcccggcgacttccccgacatcaagaagatgcaggaggtcctgcagcaccaggacttcaccaagttccactccctcaagccccatctgctggacatcgtggacaacatgctggccaaggacattgcccgcctgatggagatgattccccaggaggagatgaccatggtcgcggacccaatcgtggtgccttcgagggagtcatcgacgaccatgtctcaccattcggctacatgaagggcgagggcatcgatgccggctacggagagcacgagtggatctgcaacaaggacaagccgcgcacagatggcatcttcaatgggctgggaccagtcgatggcaagatatccggtgcaactgccaagcaggaactcatcaaatcgaaactgcccaactcggtgctcagcaagatctggaaactgtcggacgtcgacggcgatgggttcctggactctgacgagttcgcgctggccttgcacttaatcaacgtcaagctggaaggctgcgagctgcccaccgtgctgccggagcacttagtaccgccgtcgaagcgctatgactag

SEQ ID NO: 41199 - protein, 493 aa, DROSOPHILA
MFSFLKREKNTQEVVENVIGELKKIYRSKLLPLEEHYQFHDFHSPKLEDPDFDAKPMILLVGQYSTGKTTFIRYLLERDFPGIRIGPEPTTDRFIAVMYDDKEGVIPGNALVVDPKKQFRPLSKYGNAFLNRFQCSSVASPVLNAISIVDTPGILSGEKQRIDRGYDFTGVLEWFAERVDRIILLFDAHKLDISDEFRRSIEALKGHDDKIRIILNKADMIDHQQLMRVYGALMWSLGKVLQTPEVARVYIGSFWDQPLRFDANRRLFEDEEQDLFRDLQSLPRNAALRKLNDLISIRSHPARALHFSRRLPRHQEDAGGPAAPGLHQVPLPQAPSAGHRGQHAGQGHCPPDGDDSPGGDDHGRGPNRGAFEGVIDDHVSPFGYMKGEGIDAGYGEHEWICNKDKPRTDGIFNGLGPVDGKISGATAKQELIKSKLPNSVLSKIWKLSDVDGDGFLDSDEFALALHLINVKLEGCELPTVLPEHLVPPSKRYD

SEQ ID NO: 41200 - DNA, 6988 bp, DROSOPHILA
ttttccatagactccagtgtattattgtggtaatcgataagcttggttacctgttgatacactcactttagaaactctaaatacaacttttagtcatcatttcataccaaatttacggaaggtacttttgcggatatctgctcattatacgtcgcgacctcctctttgatctgattgcaatgatcgactgtttttttcgaagacatcagcatactcagcaaatcctgatatgtggtacttgccaaaggaaacacttggcctgccagactctcaggactcggatagctctgctccaatttcgtaactgctttctccgcctgtataaggttaatctcgttttcatgcagctccatttctaccctaagcatggtgcactttactgatctcagggtatcatcgatgggaagtgcctgttggagtatgaaaaatttatatcctgtttgcctatggccattgagtctcacatttttggcattgtctaggcaaatttgttcctgttccttaagaaattttaacttggtattgaaatctgattccatttcaaggctgtcctgcattaaaatatccgccagcatatccaagtacaggaatgtcgacggatctgataagtttggctcacacataattttaaaattaactttaaatgaattttatgtattttttgtatgtgtttttgtgacttatgttttgtttgtcactgagtgttaggcaaatcaaagcttgctaaggtatgagttttctgatcgtattctaatctaagggatccttgccaagaggcatcatttattttcatacatcaaggattataatggtgattacagtttttgaagctcttaccctcgagcagagtttgctctttagttcccaactttggagacctccacaagctctcttcgctcgcgagcttggagcgaccttatcgccatttaccactcagttttctcgctgagcgacacagttcgcagttagtttttgccagttcaaatgctgccggcggtcggaagagttgatagctgatcgagcgctccgtttgcgattttgtttcactcgagcacgttgtttatcccggattcgttttgcatcttcgcgacccgtaactatcagcagtgctgcactggtgtgccattcatacatgctccacttctgcagaagatgacgatttgttaagaagcaatagcaaacagttactttcatttatttttgattatcaataaaaaatcaaacatggctgtggattatgtactggaggacctgatggggaaacttggtgagtggaatgggcttttgggagcgaagacttttgaaaggtcagctgttacgttgccaggcgtctccatcccgtgctgataagagcctggcgttatgcttatcattttgagaggtcttatcagcgttgcaagctactatggataatattttgtttcacgacgaccaatgaggtttaccgcccaaccttctgttctgcttttaaaatctataattaatttttccgtattatgcttttaatctccgcctaatctatccggctggctgtccgtcacgtcaagtgctcaaaagaagccgactataatacttttttaattgcaactattttcattttcattttgcactattcttaatttaataaatcgtcgaggccaccaagtgacagacatttatgacagcttgatagagactccgacctgttgctccccttttgactatataccataccaagtatgtatttatgtacacatatagtcgacacatgttcgtgtgggccaagttctgagctggaggctgtctgacacttgttgagcctacttggctttagcacagtgacgctaaaacgagtgtggcggctaacaggcaaacaaaaataaaacgggtgcaaaaggggcggtatctgtcacaagactgtgaagtaggctcgtcataaagatcttgggatctacggatatctgggtatttgcttataatttattatatactctaattgtgcggttcaaacattgcagctagcttgtggaagctacaaaattaagcgtgtttatatgcagtatgcaaaatagttaagattaattgtgggaatacagtggaagatcgatggataaacagttttatttgtcacggctacaaattagaaatttatgagtcacataaaatatgagttggaatataaaatttgtgtcaacgattgtgctgaaattgtcgttaattaaaatagaacagttttttacaatccgaaactggttttgtattaagcattcgcaaaaccgcagcctataagaaagtgacaggagagagggagtaataatcgcattagcgacttttttattcgtaatatattcgcatacatttgtatctgtgaaatgcaaaaaaccttaaactggtttgctcacattcaactatatggcaatacctccctcagccatcaaaattcacatatcgctcttttatttctgtttactttgttgaaggcctattggcgagcagcaactctaattacttcgaatttggaggcgtgttgcattgctgagttggttgttatttgtacgtaagaaggttaccataaaaccagcaacttaaaatgactttgagagcacttccacacgtgctatgtggagagcacagaacagaactaaatcgaccttcagttgttagtaaacgcgggaagtgaaaatgttgaagtacggatgaacaaaaaccgaaggaagccttaaagtggaggtgtaaaaccatgatctacctcaattattcgaatcatgatacttaagcacaaaggaaattttaaaagctttgaagaaatcaactctgaaataaagcaacagttgatagtagaataacagtagattaatatacatgtgcaatattgttagaaatatgactgcattattttttaatattccgtgttcttatccatctcacttatcgctcaaaaagtttgcccagaataaacaacggtccaaacctgcgccatattcattttaatgtgcaaactgttggttttgtacatcataatagatggcttacgattaagagaacaacaaacattgacagggccaaaaacaaatgtcgtattcaagggccacttggcaacaattatacggctagttatattggacggatgcaataaatctgaagcaacaatatcactgatatatgatctagcatttggtggcctctgataatccgctatgagttccacattagtatttactattacgagtttagttatcacaaatttggccaatcgatttcctagattgtgctcaattatacgctgattatgtctattgggggcgtaattgaatttcattaggcgtagagtcaaattttataattgagattaattaagtcaacccgatgacataattttacacttcacgcaatcgttttaataatgaaaaatgaaaattctcagacgttttactcatgatttgtcgattgcaacgtaaccggggtgaacgtaacttttcatttgatggcaagagtttcgtttaaacgatcaataaacgtaacccacaaatcaattgaaacggctgattgaacattggaccgtgatcaagtgtcaaattctcgtatctaggctacatactgtccatgtcgttagaaatttacacagcccctggcctcccatcaacgcgatcgccatggactgactgaccagccaagtcataatcgattcagtgcattctcccaagacatccgagtctcttttcatggcgttcgaaaccaaaaccaaaccaaaccaaactgtgggcaaatatttgacgggctaggcgaatgcgcttcaattgaaatcgaattgaataaattccacttgatttaattgcaaagcctttggagtgacgacaattccagcgatacccattaaaagttcccatctacataaaagtcggctgtttctttgggttgtgtttttatcgcagctacgtgatgttcaaattcaaatactgaaataaaaaaccgttttaaataatttgagctagaacaacttccgttttcagctcaacttactttctttttattatatttaatcgtaaactgggtgattcatgggtgctacagattatcactatctatcatgttgctgaaagctcacatttgttgtgcgctcataacctttcccaagacattaatgattgtgaaatgtctttctatttttttctatccaattgcaggggagtttggaaagtaccagttcctgcagttcttcctgcaggtgctctccggcctgaccgctggcatgcacatgctatcgctggtcacggtggccgccgtgcctgagcatcgctgcttcatcgagggcgtggataacagcagcttgtcggtgacaccatggaactcgagcgctatcctggccgccattccgctgaagcccaatggcgagctagagtcctgcctcatgttcgatcccagtagtcctggcaccaataccaccatcaattgcgaacgttacgtatacgacacgacgtactacaagacttcgcgcaccatcgactggaactttgtgtgcgatcgccgctggatgggagccattgtgcagaccgtgttcatgctgggcgtgttcacaggcgcagtcacccttggcggactcgccgacaaagtgggtcggaaaaccgtgttctgctggtcggccctgttccaattgatcatcggtgtgggtgtggccttcattcccgagtacttctcattcatggtggctcgctacctgctgggcattgtgggatcagcgggtgcctacatctgtgggttcgtgctgaccatggaactggtgggacctaccaagcgtactgtgtgcggcattaccttccaggtgaggaagacttcaatagattttgcattttttaaactggctataccatgcaatacttttaggctgttttcgctggtggcatcatgttggtggccggatggggagcactcatccctgaccgccagtggctccaagtgatctacggactgcatggctgtctgttcctgggccactggtggtggctcgatgaatctccgcgctggctgtggatgcagggacgtgccgccgaggcggtggatattgtggccaagggcctgagaatcaacggatcgggcatcccggtggacaaggagtactatgtgcagaaagccaaacagcaggcggcggccgaagaaaaatccagcgccggattgagcgacctcttccgcacgcccaacttgaggatgaagactttgaacgtgtgcctctgctggttcgccaattctctggtttattacggactatcgctcagtgccggcaagctgtatggaaatccctacctgatcctgttcatcatgggcctcgtggagttccccagctacataaccattgtgttcgtcctagatcgcctgggtcgtcgatcgatcacctccaccctgatgttgggtggcggtctatgctgcattgtggccgcctacattgcccagggcagcaccacctccacggcggtggtaatggcaggaaagctcctcatcgccggttcctttgccgtaatctacaattactcagccgaactgtttcccaccgtggtgcggaactcggccatgggattgggatcgatgtgtgcccgtttgtcgggagcccttactccgctcattacattgctggactcatttgatccgaagataccggccgtgctgttcggcgtggtggccctgatctcgggcttctgggttatgttcctgccggagacaatgaaccagcccatgcccgagtccattgaggatggagagaacttcggaaagggagatacttggttcagtcagtgtgctggtcgcaaaaagcgccagaatagcgtatatcccgacgatccggagcaaatggtgccgctcaagaacatcgagagcaagtagaacctagccaaagacgattgtttcccaagtccaaaatccagcttaaattccttgttaccctgtgttttcttgttaagaattctactcttctgcctagtagtaagatttaatagtttctattcattccaagcgaataaaacgatgtgcagaatatggggaatcctaatttgtggattcactcatttctgagtgtccctttgttgtttgtacggattttttcttttaattttttcggtggtaaaatttagtttaaaggaaatttaaatgcttgacgagcatttttactgattagtgttgtctacttttaggctctatcaatttaggcgcagattcatagcttgaatttcaattttctctacggtaaaaccagtacacaccaaaaaattatttcccaactatttccaattaaagtttattctccgaccgacacagccaattcgggttcgtctggccttgcaaagtttcagtaatttccactcaattgcactatcgaattgccaattgccgacagggatttccaatgtcaaatccataacccatcgcttccctttgctccacatgatgtttaacccgccaattaaagtttgtttaaagagagagttttggtttttcggtttttgtttcttgtttggtaattcttcattttgttttgtttggtacatttgagaacattcatttcgaatttgaatatattttcaatttaaattttaactacacgtaggcatatagatttataaacgtatgtatgtgtatgccgatatctgatgcgatatcgttacacgatttcgctggcttagaattacattaacatttacatagatatagtagctttatatctgggatttcggatcgcggttctcggtagcgcctctgtcagcgatttcccgtcgaaggtacacagagatatatgtagatattgttagcaggtatttgcgatggcttaacatcaatattcttacacatagacacactcaaatcgcgagataaacacatctagatgcggttgttagccaatgaacttgtatcagaagccaactggggtaaatgctacgcttgaaggaagggtgggaaagtatgtcgggtatgggagttcgagtgcctattaatacaaacatacgaacgtagctaaatatatgta

SEQ ID NO: 41201 - DNA, 2036 bp, DROSOPHILA
gaagagttgatagctgatcgagcgctccgtttgcgattttgtttcactcgagcacgttgtttatcccggattcgttttgcatcttcgcgacccgtaactatcagcagtgctgcactggtgtgccattcatacatgctccacttctgcagaagatgacgatttgttaagaagcaatagcaaacagttactttcatttatttttgattatcaataaaaaatcaaacatggctgtggattatgtactggaggacctgatggggaaacttggtgagtgggagtttggaaagtaccagttcctgcagttcttcctgcaggtgctctccggcctgaccgctggcatgcacatgctatcgctggtcacggtggccgccgtgcctgagcatcgctgcttcatcgagggcgtggataacagcagcttgtcggtgacaccatggaactcgagcgctatcctggccgccattccgctgaagcccaatggcgagctagagtcctgcctcatgttcgatcccagtagtcctggcaccaataccaccatcaattgcgaacgttacgtatacgacacgacgtactacaagacttcgcgcaccatcgactggaactttgtgtgcgatcgccgctggatgggagccattgtgcagaccgtgttcatgctgggcgtgttcacaggcgcagtcacccttggcggactcgccgacaaagtgggtcggaaaaccgtgttctgctggtcggccctgttccaattgatcatcggtgtgggtgtggccttcattcccgagtacttctcattcatggtggctcgctacctgctgggcattgtgggatcagcgggtgcctacatctgtgggttcgtgctgaccatggaactggtgggacctaccaagcgtactgtgtgcggcattaccttccaggctgttttcgctggtggcatcatgttggtggccggatggggagcactcatccctgaccgccagtggctccaagtgatctacggactgcatggctgtctgttcctgggccactggtggtggctcgatgaatctccgcgctggctgtggatgcagggacgtgccgccgaggcggtggatattgtggccaagggcctgagaatcaacggatcgggcatcccggtggacaaggagtactatgtgcagaaagccaaacagcaggcggcggccgaagaaaaatccagcgccggattgagcgacctcttccgcacgcccaacttgaggatgaagactttgaacgtgtgcctctgctggttcgccaattctctggtttattacggactatcgctcagtgccggcaagctgtatggaaatccctacctgatcctgttcatcatgggcctcgtggagttccccagctacataaccattgtgttcgtcctagatcgcctgggtcgtcgatcgatcacctccaccctgatgttgggtggcggtctatgctgcattgtggccgcctacattgcccagggcagcaccacctccacggcggtggtaatggcaggaaagctcctcatcgccggttcctttgccgtaatctacaattactcagccgaactgtttcccaccgtggtgcggaactcggccatgggattgggatcgatgtgtgcccgtttgtcgggagcccttactccgctcattacattgctggactcatttgatccgaagataccggccgtgctgttcggcgtggtggccctgatctcgggcttctgggttatgttcctgccggagacaatgaaccagcccatgcccgagtccattgaggatggagagaacttcggaaagggagatacttggttcagtcagtgtgctggtcgcaaaaagcgccagaatagcgtatatcccgacgatccggagcaaatggtgccgctcaagaacatcgagagcaagtagaacctagccaaagacgattgtttcccaagtccaaaatccagcttaaattccttgttaccctgtgttttcttgttaagaattctactcttctgcctagtagtaagatttaatagtttctattcattccaagcgaataaa

SEQ ID NO: 41202 - protein, 557 aa, DROSOPHILA
MAVDYVLEDLMGKLGEWEFGKYQFLQFFLQVLSGLTAGMHMLSLVTVAAVPEHRCFIEGVDNSSLSVTPWNSSAILAAIPLKPNGELESCLMFDPSSPGTNTTINCERYVYDTTYYKTSRTIDWNFVCDRRWMGAIVQTVFMLGVFTGAVTLGGLADKVGRKTVFCWSALFQLIIGVGVAFIPEYFSFMVARYLLGIVGSAGAYICGFVLTMELVGPTKRTVCGITFQAVFAGGIMLVAGWGALIPDRQWLQVIYGLHGCLFLGHWWWLDESPRWLWMQGRAAEAVDIVAKGLRINGSGIPVDKEYYVQKAKQQAAAEEKSSAGLSDLFRTPNLRMKTLNVCLCWFANSLVYYGLSLSAGKLYGNPYLILFIMGLVEFPSYITIVFVLDRLGRRSITSTLMLGGGLCCIVAAYIAQGSTTSTAVVMAGKLLIAGSFAVIYNYSAELFPTVVRNSAMGLGSMCARLSGALTPLITLLDSFDPKIPAVLFGVVALISGFWVMFLPETMNQPMPESIEDGENFGKGDTWFSQCAGRKKRQNSVYPDDPEQMVPLKNIESK

SEQ ID NO: 41203 - DNA, 4314 bp, DROSOPHILA
ccaatcaccgccagtttgcatatcttggcgaaggaagttgagcacaccgcgcccgttccaacgcgatgcctgctcaagttcgtcgtcaaagacgccgacgatctggcagaagtccaccgtgcccgtgggagtgtcgatgcagcccaactgcgggtcctgggcgacgagcaggttctgtagcttggaagtggtactgccatccagactcttgcgccacgggatgttgtctccgaagcacaacccgttgcctgtttgaaaacaatagcgtccgatggcctgcaacaggttcgccggccaggtgggcggtctttggggcttttccgggttctcaatctgctgctttagctctatttctgttttggccaagcgaaaggtcaactcgaaccccatgccagaccgagtgacgccctcctcgcgcaagtggactcgctcgtccccgtgtaggtcgctgagtccgaaactaatgtagtgccagtgcggcggaacgttcctatccacatctccgggatagttgtacatgctaatgtagtccaacggatcctgaccgcccagccagtacttgagcagtgtggtcacctgcagcgggttcggctggttggggtacacctgcccgaggtggtctatgatggccttaaggcccggcggaggcttcacctcaggttttttgtccaaattcgcctcggccatttcatccagtttgatcagtatgacctcagttggaacgttgcggaataccaccgcttgaatataccatgaataaaaatactgccatgtaaagtgcggatttgacaatggaaacttacatgagtttcttttaaaaccattatttatttttaaaaccttttttataataattattactttcttacttttttctgcttatttttaaaatgtagagaaaaacagtgaaaatatatatccatatagctttaaaccaccaccatgtaaaatattgagtatttcttgccgtggtatatttttacatgctgtttatttctgccaaccacctacggtcaccctgttgaccaactatttaatagaaaatttgcaaattttgataaacgcacaaaatggagccttatgatgtcgtcgtcaaccagcccgtcgtcatagataacgtaagtggagatggggctcattaaatgcgggtagctttgtgcaaatctagggttcccaaagttttagccagcaaacagtgacatcacctaccgcccgtccctttgtcaacgagctttcaagccgtcttcaaatggccaacatgactaatcccagagagaatagctccgcaaacgccagagatggttcaattcggaagtgaagacagcgaaaacggggaatttggtctataaagcttgcgtggaatccctttatctgcccagcacacgcacacacggatatctgcgggcggtggctgcatccctgctgttgcgtccctgcatctggaagcctctgtcgaagtccatttggtgcccgtactccattgggtaaaccacgggaatagactccacatgggaggcagcgggtcgctttaagcgctccagttcgggatctatcttcacaccacacttgcccctgtatgtgctgaacatcttggggcgcagcagcttgttgtagggatcgcggaattgatctcggtacttctggcactccaaatagaaggagtccaccttgtacaagctgccgtagctgatgttggtcagtccaactggcggtgcgaactttagtagcgattcccgttcgtattgcgaattctttgacacggtcatcatgtccacttccggcacactaaaggattccatgttgactatatagatttcctgtttgcacgttgaattttaaataaaataagctgacgcaactaactaaatgtattccacatcacttttgacagggctccggtgtgatcaaagccggctttgctggtgagcacattccaaaatgcaggtttcccaattagtaagtgccgtggaccactcacgaaccttaagaacccctagaactaatgccttctcctgcagcattggccggcccaagcatgtccgagtgatggctggtgcgctggagggcgacatattcgttggacccaaggcggaggagcaccgtggcctgcttagcatccggtaccccatggagcacggcattgtcaccgactggaatgacatggagcggatatggagctacatttacagcaaagtaatttgtccataaatgttccataatcttaactaaatgttttaaatggcattgaccaggaacaactggccaccttcacggaggatcatcccgtgctgctgaccgaggccccgcttaatccgcgccgaaaccgcgaaaaggcagccgagttcttctttgaaggcatcaatgcacctgcgctctttgtgtccatgcaggcggtgctcagtctgtaagcattgcaatctcacgaactgcccctatcgatttcatttaaccacactcttgcagctacgccaccggtcgtgtgactggcgtagtgctcgactccggcgacggtgtgacgcatgcggttcctatctacgagggattcgccatgcctcacagtattatgcgcgtggacatcgccgggcgcgatgtgacgcgctacctgaagacactcatccgccgggagggctttaacttccggtcgactgccgaatttgagattgtgcgctccatcaaggagaaggtctgctatctggccaccaatccgcagaaggaggagaccgtggaaaccgagaagtttgcctacaagctgcccgacggcaagatctttgagattggacctgcacgcttcagggcgccggaggtgctcttccggcccgatctgctgggcgaggaatgtgagggcattcacgacgttctgatgtactccatcgagaagtcagatatggatctcaggaaaatgctctaccagaacatcgtgctgtccggcggatcaacgctcttcaaaggattcggcgaccgtctgttgtccgaactgaagaaacactcggctaaggatctcaagatcagggtaattatttctaacaattgtatagttctgtgccatgagttctgaaactcacgaatttatgttaacagatcgctgcgccgcaggaacgtctgtactccacatggatgggcggatcgattttagcctcgctcgatactttcaagaagatgtggatctcgaagcgggaatacgaggaggagggacagaaagccgtgcacagaaagactttttagcctgtttataagcttaaacgccatttgtaaaaggctaattaaaatgtatatcaaatccttgtgtcagctaacatgaagtaccctataaattgaaaagtaaaatgtgtatgttttacgcatcaagggcgcaaagtatttaaaatgctatttattgaaactgctttcccagcctagaaaataaagtactaaaatttataattcacttgcggataattccttcccaggttaactcttaaacaataaaccaagaaatttcaacaagctattgtatatttggatgtacctaacagatagtaatatcttattgctcgaaagattttttacactaccgcggatacattagctatcaaaaaaattgtactttcttcatctgagatagctagtgacgccaacttgggatgtttgtgaccccatgggaatgctaccacccaaaaacatgctcttgttcggaatcaggggaaaaactatgggctgccggtccacagttgcggcaatcgcctgcgtcatcttgatgacgctctggtccagcttgattccgcacttgcccttgtgcaggtggaagaatgccggacagtggaccttgccgtaggggtcacgatagtgatcccggtacttttggcactccaaatagaatgtgtcaatcctgtagatctctgcacgacttatggtggccaggtcgaccgcctcgggcacgaatttacgaatcatctgacgatctttttgggatttcttcgaaacgtcccagtactgagcctctggtatggcaaattccatggttctttttttttataaatctttcaacgaaatatatttaaatttcttttttaaaactcctaactaaagctgtgtgtaaattgtactgttgtgagagactcagctcactgtgatgcaaaccaaaataagaaatataaataaaataaactcaaaatatcatcaaagacataaattaaaggtaagaactggtctttctaccaaaggatatatgagccatatagaacatgctgaatgaaatcaatacattttcaaaccactgccattagtcatggctactcaaaaacactctttccagcttgtagcactctctttctggcc

SEQ ID NO: 41204 - DNA, 1293 bp, DROSOPHILA
caaccacctacggtcaccctgttgaccaactatttaatagaaaatttgcaaattttgataaacgcacaaaatggagccttatgatgtcgtcgtcaaccagcccgtcgtcatagataacggctccggtgtgatcaaagccggctttgctggtgagcacattccaaaatgcaggtttcccaattacattggccggcccaagcatgtccgagtgatggctggtgcgctggagggcgacatattcgttggacccaaggcggaggagcaccgtggcctgcttagcatccggtaccccatggagcacggcattgtcaccgactggaatgacatggagcggatatggagctacatttacagcaaagaacaactggccaccttcacggaggatcatcccgtgctgctgaccgaggccccgcttaatccgcgccgaaaccgcgaaaaggcagccgagttcttctttgaaggcatcaatgcacctgcgctctttgtgtccatgcaggcggtgctcagtctctacgccaccggtcgtgtgactggcgtagtgctcgactccggcgacggtgtgacgcatgcggttcctatctacgagggattcgccatgcctcacagtattatgcgcgtggacatcgccgggcgcgatgtgacgcgctacctgaagacactcatccgccgggagggctttaacttccggtcgactgccgaatttgagattgtgcgctccatcaaggagaaggtctgctatctggccaccaatccgcagaaggaggagaccgtggaaaccgagaagtttgcctacaagctgcccgacggcaagatctttgagattggacctgcacgcttcagggcgccggaggtgctcttccggcccgatctgctgggcgaggaatgtgagggcattcacgacgttctgatgtactccatcgagaagtcagatatggatctcaggaaaatgctctaccagaacatcgtgctgtccggcggatcaacgctcttcaaaggattcggcgaccgtctgttgtccgaactgaagaaacactcggctaaggatctcaagatcaggatcgctgcgccgcaggaacgtctgtactccacatggatgggcggatcgattttagcctcgctcgatactttcaagaagatgtggatctcgaagcgggaatacgaggaggagggacagaaagccgtgcacagaaagactttttagcctgtttataagcttaaacgccatttgtaaaaggctaattaaaatgtatatcaaatccttgtgtcagctaacatgaagtaccctataaattg

SEQ ID NO: 41205 - protein, 376 aa, DROSOPHILA
MEPYDVVVNQPVVIDNGSGVIKAGFAGEHIPKCRFPNYIGRPKHVRVMAGALEGDIFVGPKAEEHRGLLSIRYPMEHGIVTDWNDMERIWSYIYSKEQLATFTEDHPVLLTEAPLNPRRNREKAAEFFFEGINAPALFVSMQAVLSLYATGRVTGVVLDSGDGVTHAVPIYEGFAMPHSIMRVDIAGRDVTRYLKTLIRREGFNFRSTAEFEIVRSIKEKVCYLATNPQKEETVETEKFAYKLPDGKIFEIGPARFRAPEVLFRPDLLGEECEGIHDVLMYSIEKSDMDLRKMLYQNIVLSGGSTLFKGFGDRLLSELKKHSAKDLKIRIAAPQERLYSTWMGGSILASLDTFKKMWISKREYEEEGQKAVHRKTF

SEQ ID NO: 41206 - DNA, 3428 bp, DROSOPHILA
tgataagattgtacatagttcataagcttatatttaaaggaaataatttactccatcgaacggcttatgtttcccaaggcgattttcaagcctaccgtataaacgatcaattatcttgggaaacgtaatcatcattagctttaagtacctcctatagaaaattcagtgagactttatctctaagatcgtatccgtagaaatcaaggtgcaatataatgaccaatcttttggacattcaagagttccaattatttaaagcagtgcaatatttttaaatactattttaaataaaaacatatatactcaacaagaaatatcagtttgtggtttacgtaagtcctgggatgatttagcaatattcaatattctatatatgaatctttgtgtcggaaatgactcctatctcaaaaaaacagtgatttggggaaatccaaggaaaatatagagctctttgagcttatgcgatgtacagtgagtactaatcagagcagaccttttatagtttatgaactataatttgttatatatatatggacaaatataataacaatattttagtgacgcaacacagattggaaccgacaggatctaataatatctgtgatttttataagttttacagattacagatttcactgtaagctgacatgcttaactatttgcttcgtcattctattttgaccaggggatgcgatcgctgactcctaatcaaaaccggagggtcagggtcagaagcaagtcacaaaagcgaaagcccgccggcgagagcacgttccgtcgggaacagatgttgaagctctagccgtcatcccgcccatgggtcatacgtcaaatgggcggaactgataagattatgaagtgctatgtatgtggccgaagtcggcactatgtgggagcgccagctgttggcttctgaatcccaggaaaggcgacgtcgaacgtgatggtggaacggcaaattattcacttgcaatccgccgaccagtgctgaccaacagagatgacaacctccgctgacagtgtgttcgttgcccgatccgatggcatctccgccgaaggagtccgggatcagtacgccgatggcaaggccgccaaggtgtgggaaatcttcatcggtgacaaaaactcgcgtacggacaactacaagaacttcctgatcgatatgctgcgcaataagggatgcaagcgtgtcctagacgtggcctgtggaacggggtaagatgggaaatcatcctcgcattttcatctgaactatggtatagaatcaatacatctagttaatgaatcctttaagaatccctaatttaattatgctctattgtgctctaatcttcaacacttttctttcagtgtggactccctgatgcttgtggaggagggcttcgaagttgtgtccgtagatgcctctgataagatgttgaagtacgccctcaaggagcgctgggcccggcgaaatgaagctgccttcgataagtggggtaagttgggcaatgatcaataagcttagccctgtatctatatctattgttatcctacagtcattgaggaagccaactggttgacactgtacgacgacattcaggagcacattcaggatggtttcgatgccgtcatttgcttgggcaactcctttgcccacttgatggacgggttcggggatcagcgggagcacaagcaggctattggcaacttcgaaaagtgcctcaagcctggaggcgtcctgcttatcgatcatcgcaactacgacaatatcctggaaacgggagctacgcctgccaagagcatctactataatgtaagtaccaatttcccatttaaaatctaatgccgatctgtagaatctaatccaattagcgtgtagttcatacctcctatagtgagttgtacaaattctagcgaatcatctcctcaattaaaaactatctgtgaaaatagcttaatattgtcgcatcatcgcggtgataagaacggatgatcttgtttgtgaaccccacataacacatcataatcatcaatcgccttatcagttacacatctttcgattcaattaatccaataatccaatgatgacttgcttctaattgcagacgagtcacacggcggacatcaagacatccgtgctcttctactgcggtaagcccgccctggtgtcgatggactacctgatcgctggcaacaagttgaccagtgagttccgtctgtcctactatccccacgggctgaaacgattccaggagattctagccgagatcttctccgccaaagccaagcaccagttgtatggtgacttcaaggagatgagccaggtgaagaaccccgccttctacattcacctgatcgaaaagccacaggtttagatttaagtttttagttgtattcacataaggccacaagacacatccatataaatatacataaagttccttcgattcgcacagtctcgagtctcctcagttttcttctaaaccattatgcagaatcgacccacgatggagccaaagcacagggtcaccatggcggcctcgatcacgaacgggaatttggccttcacgtagttgaacatcccggtgtagatgttcgacagggcagccagtagtatcaacgtcatctctcgtccgccgaacttcgctttagactgtcactaaaacgcaatagctatcgaaaccctcaattcttggggcgagtgtcattagccttgcaaatgcttttccattacgttttcaatgggttctgctttgcagagaaaatgagtaacgatcgaaatgcgatactttaaaaaccaaatactagaaaaatttgtggtattctaataacagtggagctgaaagttggaaaactatgttacagcagtactacaatactttgtatttccgaattatgatgtatgaagtctactattattattcattattttattcttattattattttattactattattttactttttgaactataatccggaaaatgggacagtacgtcaagaatagattttactgtagtagactttgtagcacaatacccatgggtatcaaatgtttttgtgtcttcatgaaggatcgtctagcagaaaacgctgacgtatgctcattaaagtgtcatcgaatacaaaaaacagaagccagctaacgaaaataggacttaattgacatgtttattaaaaatacgttttagttctacgcaacggctttactatcacgaaaacgtggtgaaatcttaagagcgtgcttcccaatccgaatttagatgccaacgattttattaatgcgcttgacgtcggtgatctggcgatcgatctccccggttagctgggtaagtatctcggtgatagtgcggtgctgtttctccggcagctcgtacgcgttcttcttgaggtcctcttgactctgggcaatgtggtagcgctgcttgttaaacgtcttctta

SEQ ID NO: 41207 - DNA, 941 bp, DROSOPHILA
atgacaacctccgctgacagtgtgttcgttgcccgatccgatggcatctccgccgaaggagtccgggatcagtacgccgatggcaaggccgccaaggtgtgggaaatcttcatcggtgacaaaaactcgcgtacggacaactacaagaacttcctgatcgatatgctgcgcaataagggatgcaagcgtgtcctagacgtggcctgtggaacgggtgtggactccctgatgcttgtggaggagggcttcgaagttgtgtccgtagatgcctctgataagatgttgaagtacgccctcaaggagcgctgggcccggcgaaatgaagctgccttcgataagtgggtcattgaggaagccaactggttgacactgtacgacgacattcaggagcacattcaggatggtttcgatgccgtcatttgcttgggcaactcctttgcccacttgatggacgggttcggggatcagcgggagcacaagcaggctattggcaacttcgaaaagtgcctcaagcctggaggcgtcctgcttatcgatcatcgcaactacgacaatatcctggaaacgggagctacgcctgccaagagcatctactataatacgagtcacacggcggacatcaagacatccgtgctcttctactgcggtaagcccgccctggtgtcgatggactacctgatcgctggcaacaagttgaccagtgagttccgtctgtcctactatccccacgggctgaaacgattccaggagattctagccgagatcttctccgccaaagccaagcaccagttgtatggtgacttcaaggagatgagccaggtgaagaaccccgccttctacattcacctgatcgaaaagccacaggtttagatttaagtttttagttgtattcacataaggccacaagacacatccatataaatatacataaagttccttcg

SEQ ID NO: 41208 - protein, 289 aa, DROSOPHILA
MTTSADSVFVARSDGISAEGVRDQYADGKAAKVWEIFIGDKNSRTDNYKNFLIDMLRNKGCKRVLDVACGTGVDSLMLVEEGFEVVSVDASDKMLKYALKERWARRNEAAFDKWVIEEANWLTLYDDIQEHIQDGFDAVICLGNSFAHLMDGFGDQREHKQAIGNFEKCLKPGGVLLIDHRNYDNILETGATPAKSIYYNTSHTADIKTSVLFYCGKPALVSMDYLIAGNKLTSEFRLSYYPHGLKRFQEILAEIFSAKAKHQLYGDFKEMSQVKNPAFYIHLIEKPQV

SEQ ID NO: 41209 - DNA, 5643 bp, DROSOPHILA
cgtggtcacttggaaatatgttaatgaaaatagctttggcacacaaatggagaactgcgtgttttatggacagcttggcacgcgatgcagatgccttcaaatgtttcccaatcactttcaatcacttttgactgccatctgtgcgtttgacaaccagcttaaagttgctgcccttttataggtactctaaagggttagtattacagttcggaacttggagatccatccacttccacttccacagccacccacgctctttggctttggttgctcatttgcagcatgattggactgattcgtttggctttacgcatggctaattaaggcggcaattaaatgaatattttgttaagctttagaacagaagccccaaagagaatagttgccaaatcggtgtgttccaaaaaggaaaacccaattcaatggcagcccgcgaatggcggaagttataaattcctaagcgggctgatatcatggctatttatacaaatgtcgccagcagatgagttattacaccagggactagaagttggtcgaacggcgcacggcatatcaattagaagaaagcgccgggcgaggccaacacccttttaactttggactgccacatgtatgtgccactccgcaacggacagacagctaggtgcaacatgtgccacgttccggtcattaaccggaaaagtgcatcattcagacaaatggccattagaagagcccccgtcatcccagtaccctggccattgcgccgatctcgcctctagctcagatcattaattgcaaccatttgatttgtttactccataaaagaaaagaacaagaatccgcgaaaaagcaacaattcgccaaagtgccgaaggcaggaagagccgattcaggcaaacacaaacaattcccgcacttttggcccaagatccgcggaacacggactagaaactacaaactacggactgcttactacggactagtacatcgcgggaaattttaagtgcaaataaaaacaatgacgacagccaaatggatttggcgcttggcgctgagcatcttgctgggtgagtacgaccacctattaccatgttatttttacggcggaccgatgctgattttatggacttttgatcgatttacggtatttttggccggttgtgtaaacgaatagcgtttcgcacatggccccaggaacttgaattccttttacccccgcgtccaatttagccttcgattagaataccgcggcttgttggccacagtgcgtcacgaaagtatgcgatcgccaaatggcataatgtttatttatacaaatgccaaatcagctgtgtcaactggatgtttgcccgtcattcgtatatttcttttagatcacataaactaaggaggaatatatgagtatgcggctattaacaagaaaattaattcccaaatatttccacttaaacaaacgctgaaagataaacaagacgatatatatatatctgatttagtcatgacgaagatggaatgctctgaactaattttattacaaataaaaaaagatctattgccttaattgcaaatatttcaaggtcccttagttaaaatttgaatcgaaaaaatgcctatggtaatggaccacccttcattccaaaatctttataccctttatgactacatttttatctttcgttttccccgcttgtgtcttaataaatcaattgaacatatatgcttttcgccttggtccgtatggcaaatactcgcattcggtttttttttttagattatattcacaaaactttgacaaatcgtgcttgaaaagctgctcaaaatgccgacactcgttcatttacttgtcagctggcctggctgtctccctgctttgacatcccaatcacttctttgccttttggttttgaattggaaacccacaccaagtcgagcagaacttctattacgcatacgcagcgttgactcaacttgggaggctgttggcaggtggtccactgaaagtgaaattcaagcgaatattccgcctgtcactacggagatgctggtgtgtctcacttgggcgaatatataccacactatatagtaaaagtcgcgtcgcatggccgtttaacgagcgtgggaaatttgtcccggcaccttgacgcacttgatgctatttcgggaccgctagtttggccattaataaataagcataacgaatttggctactaatgacaacaatttaaattttatttatcaacatcatttacgacttgcaaatatttcctttcattttttatggccttcttggattgtttgcagtcgtgggctttgtggctgcggaaaagccgactggctatcatcgcgagatttgccaataccgcaagggcaaacatgtgagttgtgccgttttgggcatataaatctctttttgtttacccgactggctttttgcagatccagcccatgagtgtttatcacaatcgcctgatggcgatgcgcgaacaaatgcagattagagccacgctgcagggaccggagatctatggctacatactgccctccacggatgagcatctcaaccaggaggtggcagcgcgagatcagagattgcgatatctgtccggcttctctggagtgcgtgcctttgctgccgtgaccagtcacggagcagccatttgggtggagaacagatatgcccagcaggccgatggagagctggagtgcgactgggagatctatctgaccagcgggaatgtatcagtggccgactggttggggagccatgttcacatcgacaagcgagtgggtgccgatccccatctggtgccgcactccctttgggttcagtgggagcgagagctggaggacaagttccttaagctggtcaggatcaataccaatctggtggatcacatttggggcgatgagcgaccggagatgcccaagaaccaggtgataaaagtgcacgagaagcacttcgccggcgagagttggcaggacaaggtcaaggagttgagaaggcgactggcgcatctgggctgcgatgccatggtggtcacttcgctcaccgagattgcctacttgctaaacattcggggcacagacattccgtatactcctgtgattaaggtgggtttcagttttttgtaacatagcttctataagtaacctccatttcaccattagtcatacgccgtgatcagtcgggatgatatattcttctatgtggaccactcaaagattagtctgggcattgaccttcatctccgcacagactgcttcaatgaagactgcgtgaagtaagctgcatataaaggttatgtcgtaggtttgctaatttgaatccttgcagaatcaaagagtacaatcagatctggagtgacattcgtacctatgctcagatctggaagcgcgtccttgtacccgctccttgtgtacaggatcttggagcgtcggaggcgatatacacctccatgccaggcaaaattgtcgtctgggagatctcacccattatctttatgcgggcacagaaaaactccgatgaacaggccggtatgagaagggcacacatccgggatggcgccgccatttgtgaggccatgagcaacatggagactaggttccataccgagcagtggaccgaggagaagattaagtacgaggtagagctctggcgtttgtcccagaagcacgccaagggcttgtccctgcgaacggtggtggcctatggagaacactccgccctgccctactacatctccagcaatgtgaccaacatcgaggtctccgaccagagtctgctggtcatcgagtctgggggtcagtatctggagggcaccacggacgtgtcgcgcaccttcatttttggtgagcccacgcacgagatgaaaaaggcctacacgaatgttctggctggaattctgcatctggcacaactcaagtttccgtccgatctgaagccctccgaggtggacgccttggtgcgcagcatggtttggaaggacatgacggacttcccgcaggcaacaggtcatggcattggatcctttggatctgtggaagaacgtgagtaattgttttcattttctatttctagatatttctatttaaagatactaatctttcaccacagctcctatatcagtttcctatggcaaaaatagcagttttcacttcaagcagggctacttcttctctagcggtaagttgttctgttacataactaagtcgctgagcttatccagctttgtcctgtagaatccggctactacaaacgcgatgactttggcgttcgtctgaagaacgtgctcgaggttgtggacactggccatacacatcccagtggagcacgcttccttgcattccgggacgtcaccatggtgccgtatgagcccaaactgatcgacagtacgctcctgagtgccgcggagaagcgtctcctaaatgagtacaatgccaagatccggaacgatattggggacgaactgaagcgactgggcaacatgcgggccttctactggatgatgaaccaaacgcgtcacattcgggagtatctgcctgaggatgagtaccgctctgcgaccggagcaggaagctgtggtcactccgccagtcccctgatactactgggactgggactaatggttatcctttctgcgattataccctcgcgatcctaaggaccagagctttcagtgtacactgtctgtaattatgtagatttagttagctatgcaaattttaagagagaatctgggactaacaagaaaacgaaccaatcaataactgcaactgttagtattttagtaacgtcatttggccctaagcatccagttttgatcgaataaagtcgcaccctgccaccgaatttcccctttttaggaataggtatttacttaaaccaaatacgtaatatgaaatgtataatatccttattcgtaatcgaccaaaaatatgttaaacctgtttacattaatacgagcattgtctttatacttaagaaataacattgtatatttttctaaatataatttggaaaataccatttaatgggtttcagttttcactttgcatttgggtctaactaaattaatgtttatttatttatttatacctgtacatataatttaatttaatttgtatttaattttacatgaattcttcatgttaactatcattttacacgaagtctttgtggagctgttaaattttttgttgcatactttacagcagtgctgtaatctgggcatttttcaacaaattgtatataaaacattctttgggctttagccctaataagtttgtactcttagccaaatttttattttggtaggcttatttgcataacaatttccatttacaatgaaagtgtcttcagtagaaccacgttatgtcctgttttggcccaattatattgattcctctcaaatagcgatgcatacaacaactttaccaacactttatcgcatgatcaagtcaataaccccaatagaactagtcaaaattaatggtaagctgatataatatggttgtgtggcagcatctgccagtggatcggattagcacatcagagattacccaacctacttgtgttcgtaatgagacgatttctataagttagttgttattcaacgagggtaatcttctcttgaattgcttttaaagtggtcccaatggctg

SEQ ID NO: 41210 - DNA, 2115 bp, DROSOPHILA
atgacgacagccaaatggatttggcgcttggcgctgagcatcttgctggtcgtgggctttgtggctgcggaaaagccgactggctatcatcgcgagatttgccaataccgcaagggcaaacatatccagcccatgagtgtttatcacaatcgcctgatggcgatgcgcgaacaaatgcagattagagccacgctgcagggaccggagatctatggctacatactgccctccacggatgagcatctcaaccaggaggtggcagcgcgagatcagagattgcgatatctgtccggcttctctggagtgcgtgcctttgctgccgtgaccagtcacggagcagccatttgggtggagaacagatatgcccagcaggccgatggagagctggagtgcgactgggagatctatctgaccagcgggaatgtatcagtggccgactggttggggagccatgttcacatcgacaagcgagtgggtgccgatccccatctggtgccgcactccctttgggttcagtgggagcgagagctggaggacaagttccttaagctggtcaggatcaataccaatctggtggatcacatttggggcgatgagcgaccggagatgcccaagaaccaggtgataaaagtgcacgagaagcacttcgccggcgagagttggcaggacaaggtcaaggagttgagaaggcgactggcgcatctgggctgcgatgccatggtggtcacttcgctcaccgagattgcctacttgctaaacattcggggcacagacattccgtatactcctgtgattaagtcatacgccgtgatcagtcgggatgatatattcttctatgtggaccactcaaagattagtctgggcattgaccttcatctccgcacagactgcttcaatgaagactgcgtgaaaatcaaagagtacaatcagatctggagtgacattcgtacctatgctcagatctggaagcgcgtccttgtacccgctccttgtgtacaggatcttggagcgtcggaggcgatatacacctccatgccaggcaaaattgtcgtctgggagatctcacccattatctttatgcgggcacagaaaaactccgatgaacaggccggtatgagaagggcacacatccgggatggcgccgccatttgtgaggccatgagcaacatggagactaggttccataccgagcagtggaccgaggagaagattaagtacgaggtagagctctggcgtttgtcccagaagcacgccaagggcttgtccctgcgaacggtggtggcctatggagaacactccgccctgccctactacatctccagcaatgtgaccaacatcgaggtctccgaccagagtctgctggtcatcgagtctgggggtcagtatctggagggcaccacggacgtgtcgcgcaccttcatttttggtgagcccacgcacgagatgaaaaaggcctacacgaatgttctggctggaattctgcatctggcacaactcaagtttccgtccgatctgaagccctccgaggtggacgccttggtgcgcagcatggtttggaaggacatgacggacttcccgcaggcaacaggtcatggcattggatcctttggatctgtggaagaacctcctatatcagtttcctatggcaaaaatagcagttttcacttcaagcagggctacttcttctctagcgaatccggctactacaaacgcgatgactttggcgttcgtctgaagaacgtgctcgaggttgtggacactggccatacacatcccagtggagcacgcttccttgcattccgggacgtcaccatggtgccgtatgagcccaaactgatcgacagtacgctcctgagtgccgcggagaagcgtctcctaaatgagtacaatgccaagatccggaacgatattggggacgaactgaagcgactgggcaacatgcgggccttctactggatgatgaaccaaacgcgtcacattcgggagtatctgcctgaggatgagtaccgctctgcgaccggagcaggaagctgtggtcactccgccagtcccctgatactactgggactgggactaatggttatcctttctgcgattataccctcgcgatcctaa

SEQ ID NO: 41211 - protein, 704 aa, DROSOPHILA
MTTAKWIWRLALSILLVVGFVAAEKPTGYHREICQYRKGKHIQPMSVYHNRLMAMREQMQIRATLQGPEIYGYILPSTDEHLNQEVAARDQRLRYLSGFSGVRAFAAVTSHGAAIWVENRYAQQADGELECDWEIYLTSGNVSVADWLGSHVHIDKRVGADPHLVPHSLWVQWERELEDKFLKLVRINTNLVDHIWGDERPEMPKNQVIKVHEKHFAGESWQDKVKELRRRLAHLGCDAMVVTSLTEIAYLLNIRGTDIPYTPVIKSYAVISRDDIFFYVDHSKISLGIDLHLRTDCFNEDCVKIKEYNQIWSDIRTYAQIWKRVLVPAPCVQDLGASEAIYTSMPGKIVVWEISPIIFMRAQKNSDEQAGMRRAHIRDGAAICEAMSNMETRFHTEQWTEEKIKYEVELWRLSQKHAKGLSLRTVVAYGEHSALPYYISSNVTNIEVSDQSLLVIESGGQYLEGTTDVSRTFIFGEPTHEMKKAYTNVLAGILHLAQLKFPSDLKPSEVDALVRSMVWKDMTDFPQATGHGIGSFGSVEEPPISVSYGKNSSFHFKQGYFFSSESGYYKRDDFGVRLKNVLEVVDTGHTHPSGARFLAFRDVTMVPYEPKLIDSTLLSAAEKRLLNEYNAKIRNDIGDELKRLGNMRAFYWMMNQTRHIREYLPEDEYRSATGAGSCGHSASPLILLGLGLMVILSAIIPSRS

SEQ ID NO: 41212 - DNA, 6512 bp, DROSOPHILA
taagaagttataatgttttgtatttagttgatatatctatttttgtagttttcatatcacaaaaaatttaattagtagtcaaacgcttaagaatgtggttcagtgtgtcaagttacgattatcttgcggtcagaaaatatagattacctccacttctgagtgactgactcatggtacctcggcgatcttatcatttccctttgaaattcgatttattttacaactccaattaagttccaaatccgtgctccgattcaatgcaagtgatatccaatatttggttagaccaaccagctcggcccttatggttcctgctctcctttgtgtaggagctctcgtattgtaccaaataaacaataagagtgccgggctgagggcagtgggatggggctagggatagctattggtataggtatagggatagtcgcagggccttaggtaaacccgacctgaacaacttctttagccggatgatggggaggggggagaggttaagaacgccagcggtcgaattggatgccaaccactctcacaatgaggggctcgatgacgatgacgctgtggatgtgaagtgctgctgctagccatagccgggccaaaaagttggtttcagtttgcctttgcttggcttggggccggcgctaggcacttgcacttatcaaaccaacataagtggatatatatgtgtgtgtgtgtgtgtttggggaggcgcagttggagtttatagggccgggcagcccacttacttgcagcagcagaagcagaagccgcctgcctgccaggccctattattacccgagagcaaataaaggcatatgatggatctgccggcggcggtaggggcaagtagggtaggtagctgggaccgacgtcgtcatcaatatacgagcgcagcacatgcattgcctgccgcagcagcagcagcaactacagcaacgacggcagcagcaacacaaaattccagagcgcacgcgttctcaactttagttctttgcgagtggccaacgcgttcggtcgtggtgcgtggtagtcggatgagtagtgaataaaccccgtgaaaaccggagtcaaatcgaagttatagcaacagctgaaagtctcgagaacaggcgaatgcagctgtattccttatctacacatcccggtgtttcagtatctgtgtgcgcatcccgtgtttgatagtcttgctgtgccttgtgcgtgcgtgtgtgtttgtgcgtgttggccagttgatttcgggcccgtcaaactgggagcgacaacctaatcaatcagtcactcaatatggccagtatttctaagagccgcgccagcagctgctcctccagaaagaggctgcatctgcaaccgggatcgctgctctgcgtgatcgtcttctgcctgctggcttcgtgctcggctcagccaagtgagtatgaagtatgaatatagtgagtgtagtgggtatatctccacggagctgtggagcggtatctccagcacaggccccatcatcgtgattgtcgtaatcacttgcagtggctggtggctgctgcggtcgcatcaggcctttgacttatatacatatctgggggtctcctcatcgtcttcttatgatgcggtgtggctttatagcgattttccttgtctgctgggcttttgcttgacataattcaaaacgagcgtaattatgtctgtgccgcggaagagaccccccttttgcaaaaaaccccaaacggtggcacttgggtgtcatacttggtgtacttatgaatgcccatcggcagctgcatttcatgctcgccggcagcgtgcgaaagttcaataatgtttggtaacaggccaattgaggcggtcaaacacttcaaattgtgcgataaggagaagatatcgttgccccctttgggctgggggataaactcgggggagagtttaatgggaattgggtagcggcaataaaatttccgtagtctggggtgaacaaacccatatcgcattattaaattatcaacggacacagctcgaaattaaaggatcattgatcatatggcgtgctgccatgctgtgtgttatgtgttatgtgttggacatgtaatttctctcacttaaacagcacaaaacataattccttggccacacccatcccgaattaaaggaactgacagctgacactggcctacatctagccgaatatatatgtacatatgtacatatatcgtacatctgtatctgccatctggaactgcaactgcggcaaactgcgtagcccagccgaaaagaaaatcgatttatgcttgtatttttcctttaaatgccattttcctcatttggccgcctctttgttttcgtttgtgcggcatgctttgtcccattttaagacccaaagacagtttctgctgatattgtagctattcgttgttcttgggcattcgatgcgttcccaagggatttggaatggaaattggtcatgggcatgggcatggaccgaccgcccatgcatatctcatgcagagcatctaataattccgattttccacgaaacgagttgcatcttagggacagggattcactggatggggggcaggggaatggaatagatgtcccctcataaataagtcagctactttataggcacacaatgcgacaggctgggcgggttgcccggtctcgttggtttgtttatttggttactaatttgggattcctcgatttgttgcttggtgtctgctgtgtgtgtctggaattttaatcactccgacctccatcctactcctcctcctttctcatccgtccaagtggccatgcattttgagtaatgggacgcgggcgtacatatgtacatgtgtctctggaggagaattcgggttgatcgagttgcgtttggctaccaggcgggggaatctcgacctgggacccagttgtgaatgaatgtgtgagaaaatgtgcatcgatgacagcgatgatgagccgccttgatgtggctatgaatgggccgtatcgatgttgcggctcatatgtacatacatgtatgtctgtaatggataatatccagaaagatgcccatctataaagcattaagaatccatcgaaaaggcctaatggcactcgtgtggaatatggctgtaatatttgtttattagcgcgttaaatgggaggtttatcaatgtagcggttcgtccattaacatcgttcgaaaatacattttattaatttccgcttttaaatgcattctgatactttttgggggaaagttagggaggagctctcaatattttccaagcctatttccatttctggttaagtacttgcgacgtgttctcagtttcttgggagaaagccgagcctagtcatcgatgtaaacttaattattcagaaagttcatcacgaattttcgatgctgtttcccaattaatcacacatttttttaagggtcatatttaattcttgttaaatactaaaaagattgttatttaacaagtatcaaaaaccaaaagcctgtgataacaattgaattggtcgcagagcgaatattttgtggtccttattatattttaatacaattttttttttaagaattaaattgatctgcactattttacattttattgacattttacattgagcttactcttctacattttacattaccattacatggggtgggtgtactggctacacaaataaaagcaactatgtgagacaacattggcgtaacaaatgtggaaaaatcgtaactattttgcacattttctcgttttagtcgagtcaacctcattgcctgcagaagtggacgatgtggagggtaccacaatacttcccatccagttggaggagagttcaccaacaccagaacccattatcaagaatgaaacagctactgctcttcctgtcgtggaactcaaagtagctgaatctaatcctgtagatcctgttgaggctacggataattttgtatcggtttacggcggaaatctggagcaggatataaagaacgacgtgaacagcgaagtggaagatgcgccctctccggtggaaccaatcatcgaggaagttcaaaaagtggcagaagctgaacttgaaaatcatgaaattaagcgtaagttctattaatctttcagttggaagaaagtttgcttaatttattatttacgcagttgcggtccaaagtgctcgggagcccaaatccctggatgctgaagaggagtcaaagacaatcgatgaagatcgcttggaaaatcaagataaagcggagacagtaacggataacattgccgtttccagtgagcagatggagagccacatcagaccattacccaacgtgaccagtgacctggtttccgtgattctcaacgaagacaaagccatcactgagcaaccgatcaccaaaacgaaccttctggctttggagcaggagcacgagaaattcgaggaaattgatgaaagtactacagtgccagtttatgaggagcccaagcaccaagtcaccaagaaacaaggcgttgaggacccatctaccgttgaaattccacctgaggtatctgacgaacaacactttgatccttccgaggaaccccagactgttcgcgacgaacgtaatcttgaagagcacgacgacaaccagaatgagataaatgagaacatcattgaaggggaggaggctccagccaaaacgtcaaccaccgcaggtcccttggtcaccgtggaacccactaaatcgattaccgagccaaatgaggagatcgagaaaaaggcggaagctgaggctaaggcggaaatggaggagcaagtggaggtcaacactccttctgtagacgcaactgtggtggcagcggatcctgatgaagcacaagatgaagtaatcgttgctgaaacaacagtagaagctatcacagaagctgccaagattgttgtggaggaggaacccaaggaagatgtttcagttcaacaggagcatctaaaggaacaaagagtccagacagtttccgagtccaaccgtcaagcaagtcccaccgaggaaccaatcaaagaagtgatctttccaaaaggtgatgatgaatccccggtagaaggggatagctccgaatcggatgagaaaccaactgagagagcaatagtggatgacgactcctcggaggagcaaaacgaggacgttgtggatgagggaaagtcctcttccgacgacagcaccgccactccgctggtctcctatcccccacacgatgctggccaaaccttcgatagcaactcggctgacgaacactcggcccagctgtccggagccaccaactaccggtccaccctgatcatagccctgtgctccggcacagcagtgatcttcatcgtggcctcgctggtcatcttcgtggtttccttccaacggcagcacggcaccttggacattgagatgcaggaacagcgtttgggcaaggatattcaggaagaggacaatgtccagatgaagctgctcgatgtggatctctcgtcgcccgtcattctgccgatgggcaacgaggagaccgatgaatgcctgtagactctctcagcacgatgatgccaacaccatggtgccctgtaaatatttattaactttgagatttcgataaaaaacttcaggctgtttctttggccggatgttcattttggttactaaattgttgactgagagcagctgcaagctaagcaaacgaaaactcgaattgaaacgaaagcatttgccatactgtttaattttaaatgcactttagccactaagaatttgcaaaagttcgacaaaaatatttatatttagacttttatagagttaagctcttttttattgtgtctgatggaaagtcagaataaataatttcgattggtcaacgtgtggagtatcttttgggcggttttccttaagcttgttgcatattttttggctgagtaaatgattatgtatgaaatgtatgcctattcagttcattcataatcctatgcaaagaaactgaatctttattttttttttgttttatatttatgtcgactatacctttagtaaattaagatagaccaaaattaaatgaacgaagcctgcagctagaaaaactttgatatttgcaaggctcttagttaaataatgttcgataatattttggctgctttggtaacagtttgacggaaatattctgcaaaagttattgccattttggcatgtcataaaacttaagccaaaaaacaatgccatgtatattaactgtgtaagtgatggccaattagtgaaaaagctagttttctgaggctaccatggcagttaagttccgtagtttagcctccgagttacaaggtgcatatttgtatgtccacaactacccattggaaaactgttgcattatgcatcggaaaaatattaaatgtgtgattgctttgaagtcagttcccctgcccctcaagtcccaagattagactaaaggtcaaccagaaatgatttacggctaagctacataaaagtcagaagaaatggcacccgcacgcctaattgcttgtcaggcgtattgatcaaa

SEQ ID NO: 41213 - DNA, 2123 bp, DROSOPHILA
gccaacgcgttcggtcgtggtgcgtggtagtcggatgagtagtgaataaaccccgtgaaaaccggagtcaaatcgaagttatagcaacagctgaaagtctcgagaacaggcgaatgcagctgtattccttatctacacatcccggtgtttcagtatctgtgtgcgcatcccgtgtttgatagtcttgctgtgccttgtgcgtgcgtgtgtgtttgtgcgtgttggccagttgatttcgggcccgtcaaactgggagcgacaacctaatcaatcagtcactcaatatggccagtatttctaagagccgcgccagcagctgctcctccagaaagaggctgcatctgcaaccgggatcgctgctctgcgtgatcgtcttctgcctgctggcttcgtgctcggctcagccaatcgagtcaacctcattgcctgcagaagtggacgatgtggagggtaccacaatacttcccatccagttggaggagagttcaccaacaccagaacccattatcaagaatgaaacagctactgctcttcctgtcgtggaactcaaagtagctgaatctaatcctgtagatcctgttgaggctacggataattttgtatcggtttacggcggaaatctggagcaggatataaagaacgacgtgaacagcgaagtggaagatgcgccctctccggtggaaccaatcatcgaggaagttcaaaaagtggcagaagctgaacttgaaaatcatgaaattaagcttgcggtccaaagtgctcgggagcccaaatccctggatgctgaagaggagtcaaagacaatcgatgaagatcgcttggaaaatcaagataaagcggagacagtaacggataacattgccgtttccagtgagcagatggagagccacatcagaccattacccaacgtgaccagtgacctggtttccgtgattctcaacgaagacaaagccatcactgagcaaccgatcaccaaaacgaaccttctggctttggagcaggagcacgagaaattcgaggaaattgatgaaagtactacagtgccagtttatgaggagcccaagcaccaagtcaccaagaaacaaggcgttgaggacccatctaccgttgaaattccacctgaggtatctgacgaacaacactttgatccttccgaggaaccccagactgttcgcgacgaacgtaatcttgaagagcacgacgacaaccagaatgagataaatgagaacatcattgaaggggaggaggctccagccaaaacgtcaaccaccgcaggtcccttggtcaccgtggaacccactaaatcgattaccgagccaaatgaggagatcgagaaaaaggcggaagctgaggctaaggcggaaatggaggagcaagtggaggtcaacactccttctgtagacgcaactgtggtggcagcggatcctgatgaagcacaagatgaagtaatcgttgctgaaacaacagtagaagctatcacagaagctgccaagattgttgtggaggaggaacccaaggaagatgtttcagttcaacaggagcatctaaaggaacaaagagtccagacagtttccgagtccaaccgtcaagcaagtcccaccgaggaaccaatcaaagaagtgatctttccaaaaggtgatgatgaatccccggtagaaggggatagctccgaatcggatgagaaaccaactgagagagcaatagtggatgacgactcctcggaggagcaaaacgaggacgttgtggatgagggaaagtcctcttccgacgacagcaccgccactccgctggtctcctatcccccacacgatgctggccaaaccttcgatagcaactcggctgacgaacactcggcccagctgtccggagccaccaactaccggtccaccctgatcatagccctgtgctccggcacagcagtgatcttcatcgtggcctcgctggtcatcttcgtggtttccttccaacggcagcacggcaccttggacattgagatgcaggaacagcgtttgggcaaggatattcaggaagaggacaatgtccagatgaagctgctcgatgtggatctctcgtcgcccgtcattctgccgatgggcaacgaggagaccgatgaatgcctgtag

SEQ ID NO: 41214 - protein, 612 aa, DROSOPHILA
MASISKSRASSCSSRKRLHLQPGSLLCVIVFCLLASCSAQPIESTSLPAEVDDVEGTTILPIQLEESSPTPEPIIKNETATALPVVELKVAESNPVDPVEATDNFVSVYGGNLEQDIKNDVNSEVEDAPSPVEPIIEEVQKVAEAELENHEIKLAVQSAREPKSLDAEEESKTIDEDRLENQDKAETVTDNIAVSSEQMESHIRPLPNVTSDLVSVILNEDKAITEQPITKTNLLALEQEHEKFEEIDESTTVPVYEEPKHQVTKKQGVEDPSTVEIPPEVSDEQHFDPSEEPQTVRDERNLEEHDDNQNEINENIIEGEEAPAKTSTTAGPLVTVEPTKSITEPNEEIEKKAEAEAKAEMEEQVEVNTPSVDATVVAADPDEAQDEVIVAETTVEAITEAAKIVVEEEPKEDVSVQQEHLKEQRVQTVSESNRQASPTEEPIKEVIFPKGDDESPVEGDSSESDEKPTERAIVDDDSSEEQNEDVVDEGKSSSDDSTATPLVSYPPHDAGQTFDSNSADEHSAQLSGATNYRSTLIIALCSGTAVIFIVASLVIFVVSFQRQHGTLDIEMQEQRLGKDIQEEDNVQMKLLDVDLSSPVILPMGNEETDECL

SEQ ID NO: 41215 - DNA, 4350 bp, DROSOPHILA
tgttgagcccctctcagcccccggggattagttaaaaaccagcattgggaatttttaatgctaaattcaagtttatatggtatacataacaatatacatacacatatatatatattatacacaatacacatatttacgaatagtgtacataagacatgcctactacgccctcgctaaatgagtctcgaaagtaggagctgcccctcccattttcccgatcctcagtttcttcgttttgaaccattgcagcggtaatgaagcagcaaataaaataagggagccatcctgaccccaaaatcgatcccttgtaagtgtatgcaaattattgaatattttgaaacagtttagtgaataatattgtacttcgaatcaaattaaaataattcaaaaatattgaactgctgatattatttgaatgtgcttgaaaatgatgcgcaactgaagattaagttgagttttgtataaaatattagcctttttcctagccaattctgcgggatggaagtttgttcttcaactggtcgatgttgaatctatgtagttcccatcatataaaccaggcgaggattaataacaatatgatgaaacaggaaacttcgattgaatgcaaggataattacagttgggtgggtaggtggatcaaaaattgtaaacgataaatggatattttattattctaaatattatatatcatcacaaacaaaagtctcagttgaaataaaggtataggtttcgcgcgctgcaaatctagactagtgatgtgctgccacctatcgacagcaaaatgccaatttgaccattgtaaagttaaaattttatatagaatatattttaatttgttcatattaacaatttaatttttaattaataaattaacaagaaatttaacaagttgtttaatgttaagaattaacttatttattaataaggttaaccgctttagttacggttaaaagtggcaacgctgtgcttgttgattctggcaacgctgtgtcatctgtggattggttcggtttttttgtttttatttatttttggcatggactcggcggaatcccccaccaaaacgcaggccggcgaggacgagaactacagtctgctgtgccaggcgcacgagcagttcaacaagtgagtgttcatccgcgtgtcaccgggaagtgcacccataaccgccactcctttccggctgctcctcattctagctcggagtttgatcgctgcttggaactgctccaggagttggagacgcgcggcgagagcagtggtcctgtcctgcggcacaaccgggcggtggtcagctactacaaaaccgggtgcacccaacactccgtcctgctgaaagaactggaggctctaaccgccgatgcagatgcgcccggagacgtgtccagcgggctgagccttaagcagggagctgccgccgccactgttgctcgttacaaccgggcggtcatctattatcaccgccatatgttcggcacggcactggagaaactagcaccactagtggctcgtctggaagccctggagaaggcaatggcagcgctggtggccacactacagctacagctgctgctggccaccaatcaactaaaccgagccgaggcctttctggattacttgcagtacaagcttaacctggtggccacagcgcctagcagcaatgcggccgaagaggcagctgttgtcggcacagcacctccgtcagcagcgacgaacagttcagtggtggcctcaccaggaggagcagctgtggagggagctgtgcccggtctgggcggtagtctgcagctcttgcagctaataacgctcgtgcttaaccgaaaaccggtggttattcaggaagacggcacgccggagtacgctgctctgaaggctcagcagtactacatcatgaaggattttcagatggccgccaagcagcttatgcgaatcaataacgagtgtacacaagcggggtgagtctgcttcattttaagttcaaagaagacatactattttattgtctatcttaatagcactataaccccccagctgagcacgtgcattgccaacaatatgggagtgatacacttaagagtgcgtcactatgccatcgccgccaagttcttccaaaatgcgctcaactttgaccagcagctggcgcgaaatttgcgccagagtacgctgcaaaccatgagttcggcacggtcctgcgagatcctttacaacctcggtgtggccatgttgcacctacgacgccccaaggaggcgtttcagtgctttctggttcccgttaagcaattccacagcaatccacgtctttggctgcgcatggctgaggcctgcatcatggagcatgaggcggtaagacaactttacactaacatgttctagtacaatagagtcacaatagggtatttatttgtcttaaatctcaaattattttattttgttttaaagaaactagtggaggaggagcgccagtcgcagtcagaaacgccatcaacaaagccatacgcgtaagtgctaattcgttagcttagttcattgctggtagtaaacttttcctaattttagtcctcaatcggcgggagttccagagcccacgctggaattcgctgtcttgtgtctacgtagcgcgttaacgcttacgcagcactacaagacgaggtttcacatggcggcggtctcctcggaggatgtggaagcacccgaacccaaggacccaactcaggagagttggcgtcatccccaggacaataacttctgcaatccctcgaagccagtcagcctagagtctttggaaaacatgatggctgccatatatgctgctcacagcttcgtctcgctgcgcctaggcgatcatgtgaccgcgctcgagatgtcggaaaaactgctggcctgtgaacgcttgtccgatgcacacaagtacaatacagtttctatttaatcttcccatgtttggtttaacatatttacctttttttcttcagattgctaggtcacatgtacgctggcgaggcgttgatgcttatggacaaggccagcgaggcacgcgaccatttggaccctacttttgtgggcacactaaacgccttcgattttgagacgcgtgactggcaactgaagtcggtggacgccgctcagaacgttgtgcggtataatctggccgttgccatggctctacagaacgacctgcctcaagctaaagcactcctggccaatttaactcattcgctggttgccaacaaggcgcttgctttgcgacgcttcatggacctcaaaatgggtcccgttcctggcgggacgccgagttagacaacaaattgtgtatataactagacggaattaaagtgcaagaatgaaatgacgaggaagcgaactatttgtttgacgatcatcagtttttcagcattttacagggtgcaaacaaggtgtataaaacaatgtctgttaactaatccatatgtgcttatatatttgtacacagagaattggtgttggcaatagcaaattatctcacaatattttacgttgaacttttgcatactccagtcattgagactttttcataggaattctacaaattagattaccctctacgttaaagcgttggacacttaaattttaagtatctatctcaggaattttaaaagttgggtcagaattattttgacttgtgcaagttactcttactcgaaatgccgtataaaacgcttgtcattctgagtgtctgtactcaaatagtcaatggaataacttctgtaagtgctttttagtcgataattatagctataggcaagtgctacgctctcttttccaaggccgaaatcatagcctcgcacaactatccggtggaaattcacacagtggtcacacgagatgggtatttactcaacgcgttccgcataccgaactcaatctattgcgagcaatctggaacaaagccggcggttctcttccagcacggaatgaccgcctcctcggatgttttcctagtgaatggacctcgggatgcattgccattcatgttggccgacgcctgctttgacgtttggctgagtaactcgcggggcactcggtattcccgacgccacgtgtctttggatccctccgatgaggacttctggcgcttcagctggcacgagattggaacggaggacgtggccgctttcattgactacattctgggcaccacaaatcaaagtgcggtgcactacgtgggtcactcacagggatgcaccacgctggtggtgctactcagcatgcgtccggagtataaccagtttgtgaagaccgcaatcctcttaggtccgcccgtctttatggggcacacacacacgctgggacaaatttttctcaggacgc

SEQ ID NO: 41216 - DNA, 1997 bp, DROSOPHILA
tggattggttcggtttttttgtttttatttatttttggcatggactcggcggaatcccccaccaaaacgcaggccggcgaggacgagaactacagtctgctgtgccaggcgcacgagcagttcaacaactcggagtttgatcgctgcttggaactgctccaggagttggagacgcgcggcgagagcagtggtcctgtcctgcggcacaaccgggcggtggtcagctactacaaaaccgggtgcacccaacactccgtcctgctgaaagaactggaggctctaaccgccgatgcagatgcgcccggagacgtgtccagcgggctgagccttaagcagggagctgccgccgccactgttgctcgttacaaccgggcggtcatctattatcaccgccatatgttcggcacggcactggagaaactagcaccactagtggctcgtctggaagccctggagaaggcaatggcagcgctggtggccacactacagctacagctgctgctggccaccaatcaactaaaccgagccgaggcctttctggattacttgcagtacaagcttaacctggtggccacagcgcctagcagcaatgcggccgaagaggcagctgttgtcggcacagcacctccgtcagcagcgacgaacagttcagtggtggcctcaccaggaggagcagctgtggagggagctgtgcccggtctgggcggtagtctgcagctcttgcagctaataacgctcgtgcttaaccgaaaaccggtggttattcaggaagacggcacgccggagtacgctgctctgaaggctcagcagtactacatcatgaaggattttcagatggccgccaagcagcttatgcgaatcaataacgagtgtacacaagcgggcactataaccccccagctgagcacgtgcattgccaacaatatgggagtgatacacttaagagtgcgtcactatgccatcgccgccaagttcttccaaaatgcgctcaactttgaccagcagctggcgcgaaatttgcgccagagtacgctgcaaaccatgagttcggcacggtcctgcgagatcctttacaacctcggtgtggccatgttgcacctacgacgccccaaggaggcgtttcagtgctttctggttcccgttaagcaattccacagcaatccacgtctttggctgcgcatggctgaggcctgcatcatggagcatgaggcgaaactagtggaggaggagcgccagtcgcagtcagaaacgccatcaacaaagccatacgctcctcaatcggcgggagttccagagcccacgctggaattcgctgtcttgtgtctacgtagcgcgttaacgcttacgcagcactacaagacgaggtttcacatggcggcggtctcctcggaggatgtggaagcacccgaacccaaggacccaactcaggagagttggcgtcatccccaggacaataacttctgcaatccctcgaagccagtcagcctagagtctttggaaaacatgatggctgccatatatgctgctcacagcttcgtctcgctgcgcctaggcgatcatgtgaccgcgctcgagatgtcggaaaaactgctggcctgtgaacgcttgtccgatgcacacaaattgctaggtcacatgtacgctggcgaggcgttgatgcttatggacaaggccagcgaggcacgcgaccatttggaccctacttttgtgggcacactaaacgccttcgattttgagacgcgtgactggcaactgaagtcggtggacgccgctcagaacgttgtgcggtataatctggccgttgccatggctctacagaacgacctgcctcaagctaaagcactcctggccaatttaactcattcgctggttgccaacaaggcgcttgctttgcgacgcttcatggacctcaaaatgggtcccgttcctggcgggacgccgagttagacaacaaattgtgtatataactagacggaattaaagtgcaagaatgaaat

SEQ ID NO: 41217 - protein, 635 aa, DROSOPHILA
MDSAESPTKTQAGEDENYSLLCQAHEQFNNSEFDRCLELLQELETRGESSGPVLRHNRAVVSYYKTGCTQHSVLLKELEALTADADAPGDVSSGLSLKQGAAAATVARYNRAVIYYHRHMFGTALEKLAPLVARLEALEKAMAALVATLQLQLLLATNQLNRAEAFLDYLQYKLNLVATAPSSNAAEEAAVVGTAPPSAATNSSVVASPGGAAVEGAVPGLGGSLQLLQLITLVLNRKPVVIQEDGTPEYAALKAQQYYIMKDFQMAAKQLMRINNECTQAGTITPQLSTCIANNMGVIHLRVRHYAIAAKFFQNALNFDQQLARNLRQSTLQTMSSARSCEILYNLGVAMLHLRRPKEAFQCFLVPVKQFHSNPRLWLRMAEACIMEHEAKLVEEERQSQSETPSTKPYAPQSAGVPEPTLEFAVLCLRSALTLTQHYKTRFHMAAVSSEDVEAPEPKDPTQESWRHPQDNNFCNPSKPVSLESLENMMAAIYAAHSFVSLRLGDHVTALEMSEKLLACERLSDAHKLLGHMYAGEALMLMDKASEARDHLDPTFVGTLNAFDFETRDWQLKSVDAAQNVVRYNLAVAMALQNDLPQAKALLANLTHSLVANKALALRRFMDLKMGPVPGGTPS

SEQ ID NO: 41218 - DNA, 2627 bp, DROSOPHILA
taaatagagatataataatagagggagataatatattgaaagcttttaattgcttcatacaaattgatgacatctcaatatcaaatacaatgttggattacacacaaaccgtttatgtcaataagaaaataactaaatgggaagatctttctatataagaatatatagagtatatacaagctaaagatatttttgaaatccataataaaacaagtaatacatttcaaataattacaattaatattataatattattagttgtcataataatattttattataattataaatataagaatatagcctaagaaaattaaaatgaagttatgaagttaaaaaaaagcgtgtgtgttcctaccgaaccaccaaatattgtaaacaataatgtaatattttgtatcccaaattattcgcctatataccatatagcatatagcatatgtaccacacacaaacaacacacacacatacatacattactacatagcataagaatcccaattttggtgacaataaaaaattcagcttgtcctaatgtcctaagcattaacatccgctgaaaagccaagggtttgctaagcgtttgctttgcaccttacaatcagatttaattctttcgctctacaaataagacgtgaattgtgaccgcttccacacttgcaattttatttgaataaagattatatatgtatgtttcttaatcaattaccgtggattcgttattacatatataaaaatatattcgtatatactttacttacttttgaacaaacctacgagtaactgatataaaaattgcaaggcacgtgcaaaaaaacgggaacataaaaataaagtctacatggcatggaatattgaactccacaaattaacgaaaataaatcatataaatatagtttttcgtaaataaaaaaccagttttgagtagtgttcgggtgcacaaagaggtaagaaaagtaaatgatatttttcctttagctgaaatatttctcattggtctagcctagtctagctaagtaaatttgtttgacaatatgaagctcggatttctgggcctttttggcatggtgctcagtttgcgggcccatatatgtgcaaatactgttgatacgaagagtctattacaaaaaatgacggacgcaaggcttcaatttgccctcaacctgctgcaaatggaatccacgcatttaaacctggaaaactttgcgatgacgccattttccacgtggtcacttatgatcatgttctacgagggagcagaggggactaccttgaagcagatacgtgatgtcctggcgatctatgtcgattatccaacactgcgcaggtggtacgaggatgtccgagcttatcactagctggactaacggatctgagaaatgagttcgcagatctaggtcgcatgctgattcctaccggggacagaggtgcgtacctctccctctaccaccaattcgccaggatcgtcgtagatgaagagggcttgcctaatgctgttccgcagaaatcttctggaacaaataacatcaagttccatataaacaggccgtttgcataccttgtcctacaaagaacacacaaattgctcattcactccggagtctttcgggaaggtgagatccagtaatgaagataagcagaaaatacattggtcttttctatgacaaatcaccctaaaaacttgtatgttgttcgtatataatagacaataataagcaataattaataataaaaatatgacaacataaataaagccaaaaactatttaaaagagtcggcgtataaattttgtgtgatttgtgggcgtttgagtgggtgtggcaaagtacaacgatgtgcacagtgaaatcttaagaaatagtggtacttatcaaaaatatttgttacaactagtgtaaatttaaatgttattagatacgttgaaaagtatgtaataggtaaaagaaagtgtttttggaaaggtgtatatattcctgatcaggatcaatattcgagtcgatatggacatgaagattccagaggcatagtgcgcctagtgcccaagttttgtttcaaaattaaactgaccacacttttgaaaaatgttttcatattttttttctcattttttttagtcttgtaaatttatatcgattcctctaaaaacatgttacgccgaccatttttaaaaattcttaaacttttttcattatttttttcccctaatttctaccgaaattccagaatttgtttaattttgtttaaaattgtttaattttttaaatatatctcaaccaagatctcattcatatatattcatattcaaccgatatctcgtagaatcgaacgcatgcacaggaagataatacaattcgaataatataatcaataatgcaaaccacgatactcaaattaaaatattaaagtcaagtgcacgaaaatcagctttaaaatgtggagctgtaggtcttgctgtttgcagttcggagagcatggcttggaatattgaacaaagaataggttttgcattcaaataagccagtagaaagtacataagtagtcaatatatacaagatgggcaaagaaaaacagagctccactaaattcgtgttctaatctgaaacataaccgtgaaataatgtgaaatt

SEQ ID NO: 41219 - DNA, 1046 bp, DROSOPHILA
agcctagtctagctaagtaaatttgtttgacaatatgaagctcggatttctgggcctttttggcatggtgctcagtttgcgggcccatatatgtgcaaatactgttgatacgaagagtctattacaaaaaatgacggacgcaaggcttcaatttgccctcaacctgctgcaaatggaatccacgcatttaaacctggaaaactttgcgatgacgccattttccacgtggtcacttatgatcatgttctacgagggagcagaggggactaccttgaagcagatacgtgatgtcctggcgatctatgtcgattatccaacactgcgcaggtggtacgaggatgtccgagcttatcactatttaaattcggaaaacacaaaactgttttcgctgcgttacgcttactacgacgatgtaggagatttagaactcgtgaaagggtacaacagtgtagtcctagaaggagtaggagaaggaaatgtggttcttcgagagggtcggccaaggggtgtggacttcgaccagggggcgagtataattatcaacgacgatatcgacaaagcctctcatgcgaaaatcttcagttcttatagccgtcgttcgttcaatagtacagtaactgtgctggggattactgttagctactttaaggccaaatggaagctacatcgcctccttgaggaactcgaggcctccaagaatgaatctgatgtagaagtcaagcttcccaagttcgatacgcgatccgtactttcactcgaaagatcccgtatatgaggctggactaacggatctgagaaatgagttcgcagatctaggtcgcatgctgattcctaccggggacagaggtgcgtacctctccctctaccaccaattcgccaggatcgtcgtagatgaagagggcttgcctaatgctgttccgcagaaatcttctggaacaaataacatcaagttccatataaacaggccgtttgcataccttgtcctacaaagaacacacaaattgctcattcactccggagtctttcgggaaggtgagatccagtaa

SEQ ID NO: 41220 - protein, 246 aa, DROSOPHILA
MKLGFLGLFGMVLSLRAHICANTVDTKSLLQKMTDARLQFALNLLQMESTHLNLENFAMTPFSTWSLMIMFYEGAEGTTLKQIRDVLAIYVDYPTLRRWYEDVRAYHYLNSENTKLFSLRYAYYDDVGDLELVKGYNSVVLEGVGEGNVVLREGRPRGVDFDQGASIIINDDIDKASHAKIFSSYSRRSFNSTVTVLGITVSYFKAKWKLHRLLEELEASKNESDVEVKLPKFDTRSVLSLERSRI

SEQ ID NO: 41221 - DNA, 4737 bp, DROSOPHILA
cactaaaattactttcacgcaacggcaacactttgtctagaatggcgcgcgaaatcaaaatttttgcttggcgcgaagggagagagagctcaaatttcaatcatagatatgcgcgaataattccttttcaggatatgttcagctgcaaagaaagtgtcccaacccaaaaacattgaaatacattgtattttttttttaacaaattctttatatttgcttgcgtttttaatttttttgttatttttgtgttttttttcggttgttttttcttttataaaactttgttttaagttgttcttttgtttgtttgttttctgcggttttgtatataaataataatacttatggctagtaatatagtaaacgtttttcgatttttcatcaatttctccttgcaagccaaatgctgcatcgtctttaggccaacgtaaacgtaacgtaaacgtaaattttgttaattgatttgggttttgaaaaatttccaacggccttttgttgttcgatttgatgctgttgttgttcttgtgtggtgttgaatcgaaaaactgcaacaattgcaactaacaatgctaaagttacgctaatatagaattttgttttgcttccgtttcaaacttacttggctaggagttcgctgttttgccttaaaactaataatatttacacttagaaaaatttgctaatagttttgcttgctcatttgtcatattcattgttctgccatttcttcgatctctcttaagaatttcattaaagattgcaattaatttgtgtccccgattgcttgtgtgaaggaagggggagaggggtatttaggaccaagactttcgaatatatgtatatatttatattctcatgcacgttcacaacctgagcacaattagcatttaacatcccctcagcccctcccccatttcgtcgattcaatactgcttggaattgctagtgggcgccagcaggcgacgcgaccagcacgccgccatccgctggggatccgtcgccgtcatcgtctacaactgatactaactaccgaccatgatgtgggccgggtgctccagttcgttgtcgtgcaggcgggaggcggtcacaacctgaccgcccaatccgctcttgaacagatcctcggagctgagcttacagctgggtaccagctccgtgaactccgaaccgagtccgaattccatgtccaggaatccgtactcccaggtattggcgcccgccgacacattggagctaatgctgcttacatacgacgaggtcagcgagtgggtggccgaggagatggtcgacagggtggtgaatgtggcggtggtggagctgcttccgcaggaactgctactgccgccgctggcttgtacggtggtgaagcttccactgaatgccagcgtggaccccgaggaggaactggaactactggctggcactgaaactggcaccgctgtaggtgtggccgccgacggaagtatgctaaacaaatcgttgttgttgagcggatccaacgccgattgcgaactgaggctcagcaccgaactccagttgatggatcgcgtggagtcgtcgtccgcataacccgaatcgctagtatcgcagttgctgctgcttgcggtaggtgcaactggcgtggtgccgttgctgctcacggtattcccactactgctgctgatcaccgttgaggaagtggtgttgctgctagtgctgcttgatgcgggggagctgctgatgttgctacttagtgttgttgctgctcctccactggaagctgcggctgctgccgaagctgctgccgctgctgctgttgtggtggggcaggccggaaagggcgttgctcgaccagattgcgactcccgaaagggatagtgatcgtaggggtgcaaactactgttgctgctcgccgccgtcgctgaggagttgttgctgttgccgctggtattgctgctacttgcacccgctgatgtatcacagttgctcggctgcgtggcgaagctgcccgcacccgctgccgcgcccctgtaggcgggttggctgtccagacgctcgtggtagctatgcggctgcgaaggctgctgttgctgctggtgttggggctggaaactgagttgctggtagtgatccatgttggccaaacgagcacagttcaacacgggcgcatagtccatctgctgctgcgtatgtggatgcagaggtgctggcggggattgctgctgctgctgctgctgctggtaggctgggtggtactgagccgcttgtgccgccgctgctgctgctgcggctgctgctgctgccgcctgttggtggtgctgttgcgccgcctggtgcagctccttggcctctgcttcgatctcccgatcaatgcgcttcagcgtattgcaaatgagcaccgagcggtacagcgactgctcagaaacctgccggaaacgggagagtttgaacatggacagattgcgtatcttcaggcgcgtgtccttgtagcaactcctgttggcactgcaccagccaccgggtcgtccatcgcagcaccttttaagaggcaggccatggagaggcaagccggcgaatggaacaacaggcgctgatgagggcggcggactgatgggcgatcctccagcatttccggatgcgccactgctgcagcccaggtccagataggatttgccgttctctgcacaacgaattgtctgctggggcgccgctggcggggcataagctccaccgttggtcggctcgtagaactgttgggctcccgatgagggattggccggactgctacccgctgtcgcccactggggtggagcgaaaccacgcgcctgctgcggtgttggcggtgattgcgtcatgtgctgcggtcctcctgtccgcgagcaattctgctgcgggaaaggctccgaatagtagttgggttgcctgctcccatatccgggggcatagcttcgctgctgctgcggatgttgttgctgctgctgggcgagttgctgctgctggggatgtggttgttgttgggagagctgctgcggctgctgctggtggggatgggacggcagctggtgcgaatgagggtgcggatgcggtacaaagggatgatagcgcatgggacagtaggtgggtatgatgctctcctcctcctcgtagtcgtcctcaaaatcatcatcatcgtcgtccagctcatcggcactgagcaaagtcgttgccagagtggagcgggtggcaatgctaccccaaggatcactgggcaccgcgacggcctgcagcttggagatgcaatccacaggttccgcggatgctgcgggtcctgccaccgcggaaggagtagtgggcccattgctcgtccagggctcacaaggaacggctgaggtgaccacctctaacctggcgatactgtcctccggtatcgccgcactcgctgttggcgggagtggcacctccgcttgacttttcattgctgcgacggcggtagtaacttcatgaccattgctaatacttggctccgttggcttcaacgcatccattgatgcttctaaaacaatgtggttgttgttggactcaacagctggctccgatggcgattgctgttgctgctgctgctcctcgagcgactccaggtagttgttgttgctgatggcccacttgttggccttgacggggggcggggcacagttgcccgtgtaggtggtgttggcatccttgctgtcgaaggtcagctcatgcttccgcttggtggcggctgttgcttgaagacccatcgcggaattcacctgcaataagagggaatataacataaatttagtgatttgccgccaaaatataaggcacgttgcgaacagcacggcaagtaaacttagagaaataattgtgatggacacaaaacctacaattaaatatttctaaagtagaacacagatctttaagctacaatcgttctcatataaatttctttatttataagttttcggtttggtattttccctctgtgcatcataaatttcctcacggttcgcacgagccaacaaaggacacacagccagctaaaaacttatcaagaaaatggaagtcaggcagggacttgaactcccccctttcgcccactcaaccagccaacgcaccaccctcgttccttccacccactcgagccatgaaaatggaatggaaaatgccaggcggcaacaataacagcagccaagccagccaagtcgaggctgtctttccgtcagtcagccaccctgcgcctcaccccagccacccactcatccactctccaccaccccagccacagtcccacctccgcctcctttcgactgatggcattgctcatcgacgctgctcgaaatcttcttaaaataaaacgcacagagacgaaaagagagggcggaacctcgagaatcgtgtgggctgccacgattgccgtagtcttcccattctgaatgctcttcttttgctggcactttcccatcaacttccgccacatttgctgtgggacttttttccgtttcttttttctgttttgaaactatttttaagttttcgagttctgctccagtcaagatttttgatcaacagtgcaaccaaacaatgccggagaatactttctcgggaaaactaaatatacatatatatccattaaatgtacgttatatttaaaggtttaaaattgtagataaagttttttttttttggagatatagttcttacttatcagaatgtacatatatgttattttgggatctcaattacataaatctagat

SEQ ID NO: 41222 - DNA, 2737 bp, DROSOPHILA
atgggtcttcaagcaacagccgccaccaagcggaagcatgagctgaccttcgacagcaaggatgccaacaccacctacacgggcaactgtgccccgccccccgtcaaggccaacaagtgggccatcagcaacaacaactacctggagtcgctcgaggagcagcagcagcaacagcaatcgccatcggagccagctgttgagtccaacaacaaccacattgttttagaagcatcaatggatgcgttgaagccaacggagccaagtattagcaatggtcatgaagttactaccgccgtcgcagcaatgaaaagtcaagcggaggtgccactcccgccaacagcgagtgcggcgataccggaggacagtatcgccaggttagaggtggtcacctcagccgttccttgtgagccctggacgagcaatgggcccactactccttccgcggtggcaggacccgcagcatccgcggaacctgtggattgcatctccaagctgcaggccgtcgcggtgcccagtgatccttggggtagcattgccacccgctccactctggcaacgactttgctcagtgccgatgagctggacgacgatgatgatgattttgaggacgactacgaggaggaggagagcatcatacccacctactgtcccatgcgctatcatccctttgtaccgcatccgcaccctcattcgcaccagctgccgtcccatccccaccagcagcagccgcagcagctctcccaacaacaaccacatccccagcagcagcaactcgcccagcagcagcaacaacatccgcagcagcagcgaagctatgcccccggatatgggagcaggcaacccaactactattcggagcctttcccgcagcagaattgctcgcggacaggaggaccgcagcacatgacgcaatcaccgccaacaccgcagcaggcgcgtggtttcgctccaccccagtgggcgacagcgggtagcagtccggccaatccctcatcgggagcccaacagttctacgagccgaccaacggtggagcttatgccccgccagcggcgccccagcagacaattcgttgtgcagagaacggcaaatcctatctggacctgggctgcagcagtggcgcatccggaaatgctggaggatcgcccatcagtccgccgccctcatcagcgcctgttgttccattcgccggcttgcctctccatggcctgcctcttaaaaggtgctgcgatggacgacccggtggctggtgcagtgccaacaggagttgctacaaggacacgcgcctgaagatacgcaatctgtccatgttcaaactctcccgtttccggcaggtttctgagcagtcgctgtaccgctcggtgctcatttgcaatacgctgaagcgcattgatcgggagatcgaagcagaggccaaggagctgcaccaggcggcgcaacagcaccaccaacaggcggcagcagcagcagccgcagcagcagcagcggcggcacaagcggctcagtaccacccagcctaccagcagcagcagcagcagcagcaatccccgccagcacctctgcatccacatacgcagcagcagatggactatgcgcccgtgttgaactgtgctcgtttggccaacatggatcactaccagcaactcagtttccagccccaacaccagcagcaacagcagccttcgcagccgcatagctaccacgagcgtctggacagccaacccgcctacaggggcgcggcagcgggtgcgggcagcttcgccacgcagccgagcaactgtgatacatcagcgggtgcaagtagcagcaataccagcggcaacagcaacaactcctcagcgacggcggcgagcagcaacagtagtttgcacccctacgatcactatccctttcgggagtcgcaatctggtcgagcaacgccctttccggcctgccccaccacaacagcagcagcggcagcagcttcggcagcagccgcagcttccagtggaggagcagcaacaacactaagtagcaacatcagcagctcccccgcatcaagcagcactagcagcaacaccacttcctcaacggtgatcagcagcagtagtgggaataccgtgagcagcaacggcaccacgccagttgcacctaccgcaagcagcagcaactgcgatactagcgattcgggttatgcggacgacgactccacgcgatccatcaactggagttcggtgctgagcctcagttcgcaatcggcgttggatccgctcaacaacaacgatttgtttagcatacttccgtcggcggccacacctacagcggtgccagtttcagtgccagccagtagttccagttcctcctcggggtccacgctggcattcagtggaagcttcaccaccgtacaagccagcggcggcagtagcagttcctgcggaagcagctccaccaccgccacattcaccaccctgtcgaccatctcctcggccacccactcgctgacctcgtcgtatgtaagcagcattagctccaatgtgtcggcgggcgccaatacctgggagtacggattcctggacatggaattcggactcggttcggagttcacggagctggtacccagctgtaagctcagctccgaggatctgttcaagagcggattgggcggtcaggttgtgaccgcctcccgcctgcacgacaacgaactggagcacccggcccacatcatggtcggtagttagtatcagttgtagacgatgacgg

SEQ ID NO: 41223 - protein, 904 aa, DROSOPHILA
MGLQATAATKRKHELTFDSKDANTTYTGNCAPPPVKANKWAISNNNYLESLEEQQQQQQSPSEPAVESNNNHIVLEASMDALKPTEPSISNGHEVTTAVAAMKSQAEVPLPPTASAAIPEDSIARLEVVTSAVPCEPWTSNGPTTPSAVAGPAASAEPVDCISKLQAVAVPSDPWGSIATRSTLATTLLSADELDDDDDDFEDDYEEEESIIPTYCPMRYHPFVPHPHPHSHQLPSHPHQQQPQQLSQQQPHPQQQQLAQQQQQHPQQQRSYAPGYGSRQPNYYSEPFPQQNCSRTGGPQHMTQSPPTPQQARGFAPPQWATAGSSPANPSSGAQQFYEPTNGGAYAPPAAPQQTIRCAENGKSYLDLGCSSGASGNAGGSPISPPPSSAPVVPFAGLPLHGLPLKRCCDGRPGGWCSANRSCYKDTRLKIRNLSMFKLSRFRQVSEQSLYRSVLICNTLKRIDREIEAEAKELHQAAQQHHQQAAAAAAAAAAAAAQAAQYHPAYQQQQQQQQSPPAPLHPHTQQQMDYAPVLNCARLANMDHYQQLSFQPQHQQQQQPSQPHSYHERLDSQPAYRGAAAGAGSFATQPSNCDTSAGASSSNTSGNSNNSSATAASSNSSLHPYDHYPFRESQSGRATPFPACPTTTAAAAAASAAAAASSGGAATTLSSNISSSPASSSTSSNTTSSTVISSSSGNTVSSNGTTPVAPTASSSNCDTSDSGYADDDSTRSINWSSVLSLSSQSALDPLNNNDLFSILPSAATPTAVPVSVPASSSSSSSGSTLAFSGSFTTVQASGGSSSSCGSSSTTATFTTLSTISSATHSLTSSYVSSISSNVSAGANTWEYGFLDMEFGLGSEFTELVPSCKLSSEDLFKSGLGGQVVTASRLHDNELEHPAHIMVGS

SEQ ID NO: 41224 - DNA, 4725 bp, DROSOPHILA
caagcagcggcgatatcttgagcaggctgcgattggtaaccaacgattcaacgcccagcggcacaatgttgaggataactaggtggcaatggtcgatgaccagtcccttcttggagggcggagctgctagggtgttctgctgcaccagcacggtgttaaagatgtcctccaggcttttcatgctggtattgtcacgcgctgaagttatgcagatgacgcgacccttgttgggaatgcgcggcagttcgtcggtcccaaagtcggccattgccgccaactgctcatcggtgggctccgccagcgcttcgatggcggcccgcaggccatggattaccgagtagtcagaagatgtgggtacgttgcgcgacggcacgcccacaattagcattgcgttcatcacgtgcgccatattttgcgtgctgggcctccaggtgttcacgatatgcgccgccgtgtccgagacaataaaccgcacatgctttttgccgggaaagagatcccagaccacgcggcagtactcgatggaggattcgcaggcgcatgtccacaggctcttgctgaattgggatccaccgctgccggttgcatttcccgccgctcctgttgcgccgccgtctgcagatggttttccctttaggaagtccatcgagatgtactcctcgctggcgatgctaaagtatcgggtgtggtccagcacaaagatggtcttctggttgcgttcgaacatggtggactcgtggacaacttaaattgccgggaaatcaaacaaacgcaaacgttgaatcctaattgtttacaatctttgttcaccacgaacagctgttttcgaattccaaattcaccacagctaatttttttttatttttttaaatttactaaactgtgttaaaaagctcttttctcaaattcaacaaaaaagcacacatttaaaaaaaatatatcgatgtatttataacttcatttcaatttgtccgtctccaatttaccgaatctggcagcgctgctcagtagtaagaatcacgttgttaagcgaaagctgtctaaatttcataatattttctagattgtttttttttcccatacactgagtgaaaagcgcgagaagcgcaagccaacatattaggaaaatgtcgtggcttttgggcaggaaccgccaacagcctcagccggatcagaccgccggcttttcggaaggaggaggagctgccgatccggagggcaggacggccggcgagaagtccggggattcgcaactgagccgggcggagcgcaaggccatggaagcgtaccgcttcgattcgtcggcgctggaacgtgcagcggatgctgccaaaaccctggagcgctcaagtaagaacaaaatttcatcagccaattgcataaccggcatgcgccacgctatcacaacgtgcgtatgcgtcagagtccatgtccataacccatgttaatcttgtgcagaacacgcccgggaggccctcgagctgtccaagatgcaggaggccacccgccaaacggagtacaacaccaaggtcaaggagtacgaagcccatatcgagcaggccaaggtcgagcagaagcgcatcgaccacgaggagcgccgcaaaactctcatcgaggagaccaagcagcagcagcagcgtgcccaataccaggatcagctgtcccgcaagcggtatgaggatcagctgttgcagcagcagcgcgtacaggaggaaaacctgcgcaagcaggaggagagcgtccagcgtcaagaggccatgcggcgccagaccatcgagcacgagatcgagatgaaggagaagaaccggcttaagcttctagaacacgaactgcgcgccaaggcacgagtggatcgcgagaaccgggatattaatttggagaagatccgtctcaaggcgcaggagcatcgaacaaccgtactggagggcatcaagtgagtgataccccaaactaggcaggatgaaataactgattttgtgttacttattcacagaaccgctggtactgttatcggtgccggtgctgaggctatgcttaccgactgggacaaggtgctgaccgccgccggaggactttcgttgttggccctgggtgtgtacacggccaagggcgccactggagtggtctctcgatatgtggaggcgcgcattggtaaacctacgttagttggcgagacgtcgcgctttgcttttctggacgcccttaagaacccgctgcactacctgaagaggctgcgcgccaagccgaccgatgcgctgcagggcgttgtgctaaatccgaagctggaggaacggcttcgtgacattgccatcgccacaaagaacacacgtatcaacaagggcatgtacaggaatgttttgatgcacgggccgccaggaacgggcaagaccatgttcgccaagaagctggccgaacactctggcatggactttgccatcatgaccggtggcgatgtggcgcccatgggcaaggagggcgtaaccgccatccacaaggtgttcgactggtcgcacacctcacgccgcggacttctgctctttgtggacgaggcggatgcattcttacgcaaacgttcttctgagaagatctcggaggatctgcgtgccgccctcaacgccttcctgtaccgcacttccgagcagaatcccaagttcatgcttgtgttggcctccaacactcccgagcagtttgattatgccatcaacgatcgtctggatgaaatggtggagttcacgctgcctggcctggaggaacgggaacgcctcttgcgcttgtacttcgacaaatatgtgctgcagcctgccgctgcgggtgccaagtgagtattgcaagagctcttgcagttggaacattttttgataattgttcacaaccatttataatcttctaggcggttcaaactggacacctttgattacggaaagacgtgttcgaagatggccgctctgtgcgagggtatgtcgggtcgagaaatctccaagctgggcgtgtcctggcaggcggcagtctatgcctccgaggatggtctgctcaccgagaagatggtcctggacaggtgctactccgctgctcagcagcataagcagaaggtgggtttgaaaatgtgtattaacttatgtgctttggtaaccttcaatcatgtatcctttgcagatggcctggctttcggatcaggagcgtgctgatcacaaatccatcacaggcacagctgccccacccctcaccctaactgcaaagaaactgtaaagcgcggaggaaccgatgctgaagtagatgcaacctgcattcaaaacttgtttagttttctaatcacttaactttaagttggtacgcacagggctttatcttactaacgaccaccaaccagcagccgagacaccaaaatagtgcatatcggttacgtgtatgcatttaacagcctgtacataatcgttggcgggaagatgtgttcgtctatagatacaattaagtttgacccacagataattgtattataagcctacatccactgtctcaatagaatatacaataagaagtatatattttaactgctgtcgttgcatttcgtatgttaaagctttggacgtagactgtaaattgaattcggtcgcgccagcactgtgagagatttatattaaacttctcgctggctcttccaccaatttcacttgtccgcagtgtttcctatatgtgagtatgaagtaaatatatataaattacctgttaaaaattgcatttttatttcgcctttaataaaaggacgaataatgtttaggaaattggttataagaaaatcgttcaatgctcaaaaacacatcatgggttttatttatttttttttaaatttattaatttgaggttaaaccaaatttaaataaaccatctcatgactattttggagtcagttgctacaattatttaatttattatgtgaaataatcgcactacgttacgttacgtgttttgcaccacctagcggatagtaggtgtagtaaggacgagttgccaactatatttgtcagtgcctaatgaagcgacacctaagggccaaagcgaacaacacttctgccatgtcaactttatgtttgcaaatgtaagtgtacttactgcaaattctcctcaataggtgtcgcaaagtctaagtgcaaaaaaactattaagcggaacccacggtatctaatttaacatcaaataataataatttaatatcaaataattcaataaaatgaattcctttactgccaaaaaaatattgctaattttagaacaacagcttccttgtttcaccaaaaacacttttacaaattctttactcatacatacatatacatatacatctacatatgtatgaaattcataatttcctgcatcgcaacaatatgtagagtagagtggagtagaaatacaaaagactctttaaattttaatcgataacaaaaaagattttaagaacaccaagctagcttatcgggtgcatccactagacaagcagtgtaaactgctttgtgtagcagagacccgaacctagagaaatattttacaagtaacggcagcactaaaattactttcacgcaacggcaacactttgtctagaatggcgcgcgaaatcaaaatttttgcttggcgcgaagggagagagagctcaaatttcaatcatagatatgcgcgaataattccttttcaggatatgttcagctgcaaagaaagtgtcccaacccaaaaaca

SEQ ID NO: 41225 - DNA, 2423 bp, DROSOPHILA
ctgctcagtagtaagaatcacgttgttaagcgaaagctgtctaaatttcataatattttctagattgtttttttttcccatacactgagtgaaaagcgcgagaagcgcaagccaacatattaggaaaatgtcgtggcttttgggcaggaaccgccaacagcctcagccggatcagaccgccggcttttcggaaggaggaggagctgccgatccggagggcaggacggccggcgagaagtccggggattcgcaactgagccgggcggagcgcaaggccatggaagcgtaccgcttcgattcgtcggcgctggaacgtgcagcggatgctgccaaaaccctggagcgctcaaaacacgcccgggaggccctcgagctgtccaagatgcaggaggccacccgccaaacggagtacaacaccaaggtcaaggagtacgaagcccatatcgagcaggccaaggtcgagcagaagcgcatcgaccacgaggagcgccgcaaaactctcatcgaggagaccaagcagcagcagcagcgtgcccaataccaggatcagctgtcccgcaagcggtatgaggatcagctgttgcagcagcagcgcgtacaggaggaaaacctgcgcaagcaggaggagagcgtccagcgtcaagaggccatgcggcgccagaccatcgagcacgagatcgagatgaaggagaagaaccggcttaagcttctagaacacgaactgcgcgccaaggcacgagtggatcgcgagaaccgggatattaatttggagaagatccgtctcaaggcgcaggagcatcgaacaaccgtactggagggcatcaaaaccgctggtactgttatcggtgccggtgctgaggctatgcttaccgactgggacaaggtgctgaccgccgccggaggactttcgttgttggccctgggtgtgtacacggccaagggcgccactggagtggtctctcgatatgtggaggcgcgcattggtaaacctacgttagttggcgagacgtcgcgctttgcttttctggacgcccttaagaacccgctgcactacctgaagaggctgcgcgccaagccgaccgatgcgctgcagggcgttgtgctaaatccgaagctggaggaacggcttcgtgacattgccatcgccacaaagaacacacgtatcaacaagggcatgtacaggaatgttttgatgcacgggccgccaggaacgggcaagaccatgttcgccaagaagctggccgaacactctggcatggactttgccatcatgaccggtggcgatgtggcgcccatgggcaaggagggcgtaaccgccatccacaaggtgttcgactggtcgcacacctcacgccgcggacttctgctctttgtggacgaggcggatgcattcttacgcaaacgttcttctgagaagatctcggaggatctgcgtgccgccctcaacgccttcctgtaccgcacttccgagcagaatcccaagttcatgcttgtgttggcctccaacactcccgagcagtttgattatgccatcaacgatcgtctggatgaaatggtggagttcacgctgcctggcctggaggaacgggaacgcctcttgcgcttgtacttcgacaaatatgtgctgcagcctgccgctgcgggtgccaagcggttcaaactggacacctttgattacggaaagacgtgttcgaagatggccgctctgtgcgagggtatgtcgggtcgagaaatctccaagctgggcgtgtcctggcaggcggcagtctatgcctccgaggatggtctgctcaccgagaagatggtcctggacaggtgctactccgctgctcagcagcataagcagaagagatggcctggctttcggatcaggagcgtgctgatcacaaatccatcacaggcacagctgccccacccctcaccctaactgcaaagaaactgtaaagcgcggaggaaccgatgctgaagtagatgcaacctgcattcaaaacttgtttagttttctaatcacttaactttaagttggtacgcacagggctttatcttactaacgaccaccaaccagcagccgagacaccaaaatagtgcatatcggttacgtgtatgcatttaacagcctgtacataatcgttggcgggaagatgtgttcgtctatagatacaattaagtttgacccacagataattgtattataagcctacatccactgtctcaatagaatatacaataagaagtatatattttaactgctgtcgttgcatttcgtatgttaaagctttggacgtagactgtaaattgaattcggtcgcgccagcactgtgagagatttatattaaacttctcgctggctcttccaccaatttcacttgtccgcagtgtttcctatatgtgagtatgaagtaaatatatataaattacctgtt

SEQ ID NO: 41226 - protein, 599 aa, DROSOPHILA
MSWLLGRNRQQPQPDQTAGFSEGGGAADPEGRTAGEKSGDSQLSRAERKAMEAYRFDSSALERAADAAKTLERSKHAREALELSKMQEATRQTEYNTKVKEYEAHIEQAKVEQKRIDHEERRKTLIEETKQQQQRAQYQDQLSRKRYEDQLLQQQRVQEENLRKQEESVQRQEAMRRQTIEHEIEMKEKNRLKLLEHELRAKARVDRENRDINLEKIRLKAQEHRTTVLEGIKTAGTVIGAGAEAMLTDWDKVLTAAGGLSLLALGVYTAKGATGVVSRYVEARIGKPTLVGETSRFAFLDALKNPLHYLKRLRAKPTDALQGVVLNPKLEERLRDIAIATKNTRINKGMYRNVLMHGPPGTGKTMFAKKLAEHSGMDFAIMTGGDVAPMGKEGVTAIHKVFDWSHTSRRGLLLFVDEADAFLRKRSSEKISEDLRAALNAFLYRTSEQNPKFMLVLASNTPEQFDYAINDRLDEMVEFTLPGLEERERLLRLYFDKYVLQPAAAGAKRFKLDTFDYGKTCSKMAALCEGMSGREISKLGVSWQAAVYASEDGLLTEKMVLDRCYSAAQQHKQKRWPGFRIRSVLITNPSQAQLPHPSP

SEQ ID NO: 41227 - DNA, 3995 bp, DROSOPHILA
gcagtcaggtgcctttaagtgtgtgcgttcagctttgaatggcaaacgcaaacagctgagcagcgaacggtcatgtgacggcgaaaattttcaataagcgttaaccatgattatgggctgctccccattacgatctgatcagcgtagaacatttaaagctctatatgaaatattattctataggtttcattctgttacgttgttaattgtgtgtttttgtgggtgtcgcaagaatttattgattttttctctacttcgcctcacaccagattcgtgcaaactgtcatggcggactttcttggcattttcttattgggttttttttttcggtcacttgattgggttgcgaatgcatttcttgatatttcacttatttgcaaattccgtggattactcactcaagcggggctgggagataaagtcccgggagacggcgaggacatgttcccgctgggcttgttgggcgttcatcttggatagactttttctgcgcctctaccttgaaagtgcactgcaaatttcgagctgcaattagatacgattttagcttttagccactattcggacgtggtcttttacaagcacatacaatttttcagctacgaaacagtactgagcgacacacacgcaaaattttggcctgcgaagtcgttgcgagtacgatgaaaaattgccctggaactgaaagtattgctgaatgtgaatctgctgtgacgtcacgtgccgtcacatgacccgtcacgcgttaggaactttccgtttcgcgcgctttacaacactaattgttagtgttgccatttagtggagttccacaccgcagcagggctgccacattgccatatggtatcaaatgaaccggtgacgaaatcggtatggcagctacgcactcacaagtctgtttacctacactggagttagcagtgtttttcacccacagagagctgccatatcgccgtatgttatcgataaatttggaagcattgatttgtaccacccctactgttaactcacacagcacagttctgttaattattggaaagttttttaatggaacaaatttaattaaattacaaaagttgtttacccgctgcggcacttggacacccagaaagtaaaacaaagcagtgctcggggacagcaattgaatagtaccagaatccgggacatcggaggcagcgagccgcgacaaagaagtgcacaaagagagatagccagtgcaaaacccgtttcttccaaccgataaaaggggcgtctatagctctgccgatccggagcccctggcattgcaccactatgatggttgagtccgatggaaccgccgacgccacccgccgcctaaacgtgaagaagcaaacactggacgatgcgtacgccgtgcccgccaacttcctggagatcgacgtggtcaatccgctgaccaccatggcggcgggcaagaagcgctacacggactacgaggtccggatgcgggtgagtgatcgtagtacatgtacatgggggcaccacctatgcaccttccaaaattcaccgaaaaaaccattgataatcgctggaattcgctcacacacttgtgtgcatgtgttcgtgcgactttgtctcgctgtgcatgtgtgtgtgcgtgcgtgtgtgtgtgtgtgtgtgtgtgtgagtgcgggtgatacgcctataaagcgagccggccgataaacattagtcacaagtgcagagcactgattccagtgtcacggcttgagtcacggaaatgcggcatgcgggtgcctttatgcggcaccgacctttcattgaattactctataagattggccaccacatatgattaaccatcgctccttttttagaccaatctgcccgtctttaaggtaaaggagtccagtgtcaggcgacgctacagcgactttgagtggctgcgaaacgagctggagcgggatagcaaggtacggacaagtgtgatccaggcggtagtctttcgttttcactttaatagattcaaaatccgcactattcagaatctatttagatagaattacgaaacaatacattgtaattataagaagccactagaaaagtttcaatccttaagaggaaacttaaccctgagttttataagtgaaaacggaaacttcgataagcgcctgaagagtatttaatcatgaacatacatatccccgcagattgtggtgccaccactcccaggaaaggcatggaagcggcagatgcccttccgcggcgacgagggcatctttgacgaaagcttcatcgaggagcggcgcaagggactggaggccttcatcaacaagatagccggacatccgctggcgcagaacgagcgctgcctgcatatgttcctgcaggagaatgtcatagataagaactacgtgcccggcaagattcggaacacataagcagcttagtccggcgcaatcgaaaccccctaaccatagcaatgcaatgaagcaaaaactcgaacgaacaaacctgctacgaaatctttatgggaagccgtgtgaatgtgtgtgcttgcccggattggaggaggatggagcagatgagcgatgatgtaggttggtggagaagggatctgttatgcgacgcgatacgaggcgggaagtgctgctgctcagttaatgttgagcccctctcagcccccggggattagttaaaaaccagcattgggaatttttaatgctaaattcaagtttatatggtatacataacaatatacatacacatatatatatattatacacaatacacatatttacgaatagtgtacataagacatgcctactacgccctcgctaaatgagtctcgaaagtaggagctgcccctcccattttcccgatcctcagtttcttcgttttgaaccattgcagcggtaatgaagcagcaaataaaataagggagccatcctgaccccaaaatcgatcccttgtaagtgtatgcaaattattgaatattttgaaacagtttagtgaataatattgtacttcgaatcaaattaaaataattcaaaaatattgaactgctgatattatttgaatgtgcttgaaaatgatgcgcaactgaagattaagttgagttttgtataaaatattagcctttttcctagccaattctgcgggatggaagtttgttcttcaactggtcgatgttgaatctatgtagttcccatcatataaaccaggcgaggattaataacaatatgatgaaacaggaaacttcgattgaatgcaaggataattacagttgggtgggtaggtggatcaaaaattgtaaacgataaatggatattttattattctaaatattatatatcatcacaaacaaaagtctcagttgaaataaaggtataggtttcgcgcgctgcaaatctagactagtgatgtgctgccacctatcgacagcaaaatgccaatttgaccattgtaaagttaaaattttatatagaatatattttaatttgttcatattaacaatttaatttttaattaataaattaacaagaaatttaacaagttgtttaatgttaagaattaacttatttattaataaggttaaccgctttagttacggttaaaagtggcaacgctgtgcttgttgattctggcaacgctgtgtcatctgtggattggttcggtttttttgtttttatttatttttggcatggactcggcggaatcccccaccaaaacgcaggccggcgaggacgagaactacagtctgctgtgccaggcgcacgagcagttcaacaagtgagtgttcatccgcgtgtcaccgggaagtgcacccataaccgccactcctttccggctgctcctcattctagctcggagtttgatcgctgcttggaactgctccaggagttggagacgcgcggcgagagcagtggtcctgtcctgcggcacaaccgggcggtggtcagctactacaaaaccgggtgcacccaacactccgtcctgctgaaagaactggaggctctaaccgccgatgcaga

SEQ ID NO: 41228 - DNA, 1390 bp, DROSOPHILA
tgttaactcacacagcacagttctgttaattattggaaagttttttaatggaacaaatttaattaaattacaaaagttgtttacccgctgcggcacttggacacccagaaagtaaaacaaagcagtgctcggggacagcaattgaatagtaccagaatccgggacatcggaggcagcgagccgcgacaaagaagtgcacaaagagagatagccagtgcaaaacccgtttcttccaaccgataaaaggggcgtctatagctctgccgatccggagcccctggcattgcaccactatgatggttgagtccgatggaaccgccgacgccacccgccgcctaaacgtgaagaagcaaacactggacgatgcgtacgccgtgcccgccaacttcctggagatcgacgtggtcaatccgctgaccaccatggcggcgggcaagaagcgctacacggactacgaggtccggatgcggaccaatctgcccgtctttaaggtaaaggagtccagtgtcaggcgacgctacagcgactttgagtggctgcgaaacgagctggagcgggatagcaagattgtggtgccaccactcccaggaaaggcatggaagcggcagatgcccttccgcggcgacgagggcatctttgacgaaagcttcatcgaggagcggcgcaagggactggaggccttcatcaacaagatagccggacatccgctggcgcagaacgagcgctgcctgcatatgttcctgcaggagaatgtcatagataagaactacgtgcccggcaagattcggaacacataagcagcttagtccggcgcaatcgaaaccccctaaccatagcaatgcaatgaagcaaaaactcgaacgaacaaacctgctacgaaatctttatgggaagccgtgtgaatgtgtgtgcttgcccggattggaggaggatggagcagatgagcgatgatgtaggttggtggagaagggatctgttatgcgacgcgatacgaggcgggaagtgctgctgctcagttaatgttgagcccctctcagcccccggggattagttaaaaaccagcattgggaatttttaatgctaaattcaagtttatatggtatacataacaatatacatacacatatatatatattatacacaatacacatatttacgaatagtgtacataagacatgcctactacgccctcgctaaatgagtctcgaaagtaggagctgcccctcccattttcccgatcctcagtttcttcgttttgaaccattgcagcggtaatgaagcagcaaataaaataagggagccatcctgaccccaaaatcgatcccttgtaagtgtatgcaaattattgaatattttgaaacagtttagtgaataatattgtacttcgaat

SEQ ID NO: 41229 - protein, 167 aa, DROSOPHILA
MMVESDGTADATRRLNVKKQTLDDAYAVPANFLEIDVVNPLTTMAAGKKRYTDYEVRMRTNLPVFKVKESSVRRRYSDFEWLRNELERDSKIVVPPLPGKAWKRQMPFRGDEGIFDESFIEERRKGLEAFINKIAGHPLAQNERCLHMFLQENVIDKNYVPGKIRNT

SEQ ID NO: 41230 - DNA, 4872 bp, DROSOPHILA
gatgtgtttgcccagcaaattgaacctaatgcggctcacggatggcatttaaataagccagctgcgaagctgtggagttcccccaagccttttcccatccgcagaactggcaaaacaggcaaaaacaggccccaagctacaggatacaatgcgaagacaactgtcaacatttaaataagattgatcgattggcagcgtcaacggcattgacattgcccccattgtggtgggtgttgggcctaatgccatcgccatcgccatcaggggcgtgatggactttacacgcgctcagatttccattaaacaggatgccccacgattacgctggatacacttaaaagaaaataatttgagaatacctgtgtcccattgctaagagggcatttaatccatatccattattattatgaattatatgattattcagaagctttttatatacgtcataataaaagggtttggtttaatttatttatgtcatacttttgacaacctatcaacttatatttaaatctgcatctgtgggtttatcagtaagcaagcatttagctcgtttattaagccgctataataaaatatttcgtggcttatcaacgaatacctgcaacagtcagtttaaatatcatcagactaaagtgataacccggaaattgaggtaaagcccatataaaattcgtattaaaatgtattttttgattttgttgtaatttttcccactgcagactttacaattagcttcccaatttgaatgccagtcactcattgaatcctatttttcacttgctctgtgggcgacaaattggtggcgcttccgtttgggatttgccgcttgattcgcttgtttacgctgaccagcgggctgccttttggccggtattagagtgcataacaaatcacttagcacccgtccatcagggacctaatcaggctcgcatggggccgctagcatttggctatataacttgctatctgccgcgctgctggcatcagttgtcccgcaaagcagtcccaaagcgcaacgcggttccattcgatcgtccgactattaagttaatagttccagcgcttccggagtgtcctgtcctgtcctgggaggtcagtcgctcgtaaacgccagaaaacacctagcagcgaacacagttggcccagttatgtgtggtcctagttattgcacactgctgctaatcgcggcttcctgctacatccttgtttgcagtcatgcgaagtccttgcaggtgagtctcgggcaaagtgggaaaaatgtggtggtgttggtactgtggcttgttggccaaacaagcgccacttaattagtgttatttgcccaggcacaagttcgccagcttagcgtgataattttcaaccagtgctgaaattcttggatttttggaacggaaattttggggcgaaaagttttcactttgacgtgtgccttacagcattatgtggcgcactcgtttcccgtctgtcaactgcatttgaagtgctaccaattagtttgcagatactgcaactattttttttttctgccagcaggcaatcaattggcatccaattaacatttcggttgcaatcgcagcaacactgcgtatacgtgttgcgcaacttattctcgcaccactaattaaaataactttccatgcttggcagtgcagatgtaataaaacctagtaggccttaattaatcaaaaagacataattatatcaagtttatgcatagttcattgggttgggaatttgtggtgttgtatttggttttaggtaaattatatcgtttgatatcgaatccgcaagtgttttgtattaaattctggacattacaaaatgcttagtgttattacaattcaaactgtaactattattaattatttaattacaaacttattctttttcgtttattgtcagggaatattatacgaatatgtttcataatatttttatttaaacggggaaactaaaagaaactaaagaaataaccaataaattcacgacagctacaacattgctctttttcatatcagcttagaatattgcaaaatatatcgactgtgctgagtgtattcgaaaatgctgagccaaatgaaggtttaatatcaagtatacgcccacgcagacatccgcttagagtgagcgtttattggcgaattgcgatttacaagccgatttcaggtgttggcatttcaatctacattgagttgtctaatcaagcggcacacgctgatctgccttccatgcctgggtgtaaattgaaacaataaagtgcttgactcgcacattcacactcacatccatagacacccacacgcacacatacaggcacacccgcaagtcggttggaaggacctttatgcgtgtgtgcagctcacgtacgagtatgagcataaataggcggcataaaaataacttaacacgtgtcgacagtttggcagcgtgggaaccctcagtaaaaaaaaacaacatcctccaaggaaatatctcaaatatttagctccttttttcgcctgcttttttggcccctgcttttatggcattttttatttgtgcagggcacgagcaaactggatttgggaaatcacatcagcgccggctctgccagaggatcattatcaccagcttcaccagcgttgagcgaggcacgtcaaaagcgcgccatgggcgactacaaagagctgacagacatcattgacgagctggaggagaatagcctggcccagaaggccagtgccaccatgcaggtggctgccatgccgccgcagggccaggaattcgatttggacaccatgccgccactgacctattacctgctccttcaaaagctacgacagcgtaagttgcctatggacacctgctgaaatgtgaaggatatatgtatgaagagggcaagtcgctctaattggtttccgaatcacgttcccatttcacgcaaccatctccataatgttcgcatactttatacataagcttttcctcattttttgcagagagaaaaacataatatgaaaatgttattttcatttaatatgcatgtcgtttctttacttcacaagacattggcatatttaaatgaatattttatattcagaaaaaaaagaacaatctccatacgtaatgacaataccgtacaaaagtccgagaaatctgcaatttttactagaaaaattccttcacagtgacttaggcaatgttcaatgtttttcaaattgagttaaccattcattcatttatgttattcaatcatggaaactattacttatccaaagaatgttggatacatttgaacaaaattgtttgaaaatttcgcattcattttttccttatcaaaatgcttatacatatattatgaaatactctccctatttccatttggacagtgcagagtaatggggagcccgcttatcgcgtgcggacgccacgccttggccgcagcattgactcctggcgactactggacgcggagggggcgacgggaatggcgggcggcgaggaggccatcggcgggcagttcatgcagcgcatggttaagaaatcggtgccgttcaagccacgcctgggcaaacgtgctcaagtgtgcggtggcgattgagtcacgacaagggcgcgaggacatggcacggcacggaatcggactgcggatggaggacggaggacgagcccaggacaaggttgaggccaggcgactggcccttgagttaacataaccaagccataatggccagctgaattcgacgcgacgcaaaaataatccacatatatgcatagtgaatgactactctactagttactagcgctataaccctgatttgagaggaactaatgatgtgtatataccgtacatatatttattatttatttaaataaattgtgtagcccccaaaagtagcgttgattttacattccaaatgagccgggaattaaataaacatggcaatttcattaacgacctgcgcttcctagggttctatgtccactatacactatattgccattttccagttaaatttatgagaatttcataaccaatggtagggcgcgtaaattggaaaaatgcggccaacatccgttgccacaaaatcgcccatgagtgttgaccatggcaactgccgtttgcagttggcccatgtgtgtgcattttgactgataaaatatcttggttcccttgccgcgccctttcaaaaacccagtgccacaattgtggtccggtcaaaagcttctggctttatttggcctgatgaagcatagaaaattgtgcggggcttgcaatgaatgcggaaacggaaacattttatgaatgctttttcagtggagaactttaatttaaagtatccatgttctgaggcttttatcaaaagtaactacctctttattttacttccataaatgcaataaataattcgatgctgtgcattgaaaactgtaatcgtaatcaggagtgtacaatcatcgtagcatataagacaatttatccataattctttaacttttttccaatgccacaccgcttgatgctttaatcttgtaataaattaaaacggaaagtcatttaattccgtttccattgctaactcgggctgacgcagctgtttttgcacaacctcagcagctggaagtttgtgcaactcattaggaacttgccacacgccaattagttggcctaaccaggcgttctccatccgccccagtggccgtgatccacaatcccagcttatgccagcttcaattattgaccccaggtggttaaggaaagactggaacttaaccattcgaaatgagcgccgagtcgaaggtttaggattccattgcatcctggattggatcatacatcacgtagtcggcaatctaaggagcaactaaacacaggatatatatgtgcat

SEQ ID NO: 41231 - DNA, 1016 bp, DROSOPHILA
aagcagtcccaaagcgcaacgcggttccattcgatcgtccgactattaagttaatagttccagcgcttccggagtgtcctgtcctgtcctgggaggtcagtcgctcgtaaacgccagaaaacacctagcagcgaacacagttggcccagttatgtgtggtcctagttattgcacactgctgctaatcgcggcttcctgctacatccttgtttgcagtcatgcgaagtccttgcagggcacgagcaaactggatttgggaaatcacatcagcgccggctctgccagaggatcattatcaccagcttcaccagcgttgagcgaggcacgtcaaaagcgcgccatgggcgactacaaagagctgacagacatcattgacgagctggaggagaatagcctggcccagaaggccagtgccaccatgcaggtggctgccatgccgccgcagggccaggaattcgatttggacaccatgccgccactgacctattacctgctccttcaaaagctacgacagctgcagagtaatggggagcccgcttatcgcgtgcggacgccacgccttggccgcagcattgactcctggcgactactggacgcggagggggcgacgggaatggcgggcggcgaggaggccatcggcgggcagttcatgcagcgcatggttaagaaatcggtgccgttcaagccacgcctgggcaaacgtgctcaagtgtgcggtggcgattgagtcacgacaagggcgcgaggacatggcacggcacggaatcggactgcggatggaggacggaggacgagcccaggacaaggttgaggccaggcgactggcccttgagttaacataaccaagccataatggccagctgaattcgacgcgacgcaaaaataatccacatatatgcatagtgaatgactactctactagttactagcgctataaccctgatttgagaggaactaatgatgtgtatataccgtacatatatttattatttatttaaataaattgtgtagccccc

SEQ ID NO: 41232 - protein, 191 aa, DROSOPHILA
MCGPSYCTLLLIAASCYILVCSHAKSLQGTSKLDLGNHISAGSARGSLSPASPALSEARQKRAMGDYKELTDIIDELEENSLAQKASATMQVAAMPPQGQEFDLDTMPPLTYYLLLQKLRQLQSNGEPAYRVRTPRLGRSIDSWRLLDAEGATGMAGGEEAIGGQFMQRMVKKSVPFKPRLGKRAQVCGGD

SEQ ID NO: 41233 - DNA, 2833 bp, DROSOPHILA
gctttttcatctacttcgagcaacagctcaccttgctgagttctctgaatttttcgtacgtatcttctcagtttgcttaggctcgggtccgatcttagtttccggagcatctctgcgtacgaagactcaccgtcttcttcacgaccgtgctagcattcttggcgacatatgcgtagctgcctggcttggactcgtttgttctggatgtcacctttccttcttcgttgctaccagtcgtgtgctttgggcacttgcccctttttggtatgcttttgtacctcagtctgggaggcaatgctcatcaagcggaggtcgctagtgaccccttcgtacaactctatcgccctgttgttaagggctgagagttcagaagctacgcccttggtccctcttctgacgtgccgttgagtttcaagtgtggaaagcagcttatcttgcttatcctatcttatgtttatcttgccatacatcctggtgagtatgcacttcaggtccttgttctgaagagccgtggtcaggtcccgatcgatgaggggatccagctaggcaattcactcctgccttatgcggtgcactgctgcatctggttaccgactcctctagtgtgggacctcggaagcctggtgctcctcctgagcaggtcgttgcgatcagggggacttccccccactgcgctatccatcaactataagatggcctacggttacctatgtgaagcaccagctttagtaagggctctcacgtaggccacggatttaaccctggcttttaccgttggaggtatgttccgcctcgaatcggacacaccagagccactgcttaggcaccagcacggtgagaggatgattaaattaaatataacggttcacatttacgtctcactctcaagatcccccactgcgccaaatgggcagcgctgccagctgttttatgagctgcagaatatcgcaaacttatagttttgctatgtaacgccgtctgcacggcgatgtagacttggtgtccccacttttggtgtgccccatgcgatacgccgccgttctcgtagaggtaggcggaactcaccgctgcctgcccttggattccgatgtgagtttgcacattgctttttcgcagcttgattgttaattgaaatccttgtttctcaccagggcgacttgaacatcgtggcttctttcgatcgcagaggcaaacacatctacacaggcaacgccaagggaaaaatactcgtactggatgctgaaacctttgaggtggtcgccagttttcgcattattgtaggcacctcaagtgcaacggctgtaaaaagcatcgagtttgcgaggcgtggagagtgggtactaataagtaatcgggatttcataacgtaacaaatttatctttcagcgcatttctaatcaacacctcagatcgagttattcgtgtttacgactcaaaagaaataatcattctaggcaaagacggcgaaccggaacctatacaaaagctacaggacttggtcaataagtatgatatgaaacaaacccttgataaacatttgattgaccaatattaattccatctagaaccacctggaaaaagtgctgcttctccggtgatggggagtacatttgcgctggcagtgctcgccagcatgctctttacatatgggaaaagtctattggaaacctggtgaagatcctgcatggcaccaagggtgagctgcacaaacagaaacgcatccgctcatttctagaaaggctagcaaaggacgtaccaagaattaaaaaccatttgacattgcctaatcggtttctttttagctcttatcgatattatatacgaacaatataaaagtgtttaaagtgatttgtcatagaaaaaaccaatgtattttctgcttatcttcattactggatctcaccttcccgaaagactccggagtgaatgagcaatttgtgtttcttttgtaggacaaggtatgcaaacggcctgtttacatggaacttgatgttattttttccagaagacttctgcggaacagcattaggcaaaccctcttcatctacgacgatcctggcgaattggtggtagagggtgaggcacgcacctctgtgaccgatagcaatcagcaatttatctagatctgcgaagtcgtttcctcagatccgttagtccagcctttggaagatgttcattatgacgaaagctttgtattttttagagacttttacgtacgtcatatacggtatcttcgagtgaaagtacggatcgcgtatcgaacttgggaagcttgacttctacatcagtttcattcttggaggcctcgagtttctcaaggaggcgatgtagtcccaggttcttcaattggtagagcaccaggttaactccctgggatgacttcggcagtaagacgatcattactagctcatgttccccaaaaggtagctccaggacatccgcttgcagaccctttacattattgacgtaggcatacttccccgtttgcaccatcatctccaccttacctgccggcgagccgccgtcgttgtaaaactgttccactttcgtctgggacttatcgaatggatactggagtcatgatatcagatatattaaatacaatacaagcgaggatgaatctggctctgggtcttaccttccatttggccttaaagtagctaacagtaatccccagcacagttactgtactattgaacgaacgacggctataagaactgaagattttcgcatgagaggctttgtcgatatcgtcgttgattattatactcgccccctggtcgaagtccacaccccttggccgaccctctcgaagaaccacatttccttctcc

SEQ ID NO: 41234 - DNA, 659 bp, DROSOPHILA
tgtccccacttttggtgtgccccatgcgatacgccgccgttctcgtagaggtaggcggaactcaccgctgcctgcccttggattccgatggcgacttgaacatcgtggcttctttcgatcgcagaggcaaacacatctacacaggcaacgccaagggaaaaatactcgtactggatgctgaaacctttgaggtggtcgccagttttcgcattattgtaggcacctcaagtgcaacggctgtaaaaagcatcgagtttgcgaggcgtggagacgcatttctaatcaacacctcagatcgagttattcgtgtttacgactcaaaagaaataatcattctaggcaaagacggcgaaccggaacctatacaaaagctacaggacttggtcaataaaaccacctggaaaaagtgctgcttctccggtgatggggagtacatttgcgctggcagtgctcgccagcatgctctttacatatgggaaaagtctattggaaacctggtgaagatcctgcatggcaccaagggtgagctgcacaaacagaaacgcatccgctcatttctagaaaggctagcaaaggacgtaccaagaattaaaaaccatttgacattgcctaatcggtttctttttagctcttatcgatattatatacgaacaatataa

SEQ ID NO: 41235 - protein, 211 aa, DROSOPHILA
MRYAAVLVEVGGTHRCLPLDSDGDLNIVASFDRRGKHIYTGNAKGKILVLDAETFEVVASFRIIVGTSSATAVKSIEFARRGDAFLINTSDRVIRVYDSKEIIILGKDGEPEPIQKLQDLVNKTTWKKCCFSGDGEYICAGSARQHALYIWEKSIGNLVKILHGTKGELHKQKRIRSFLERLAKDVPRIKNHLTLPNRFLFSSYRYYIRTI

SEQ ID NO: 41236 - DNA, 1502 bp, DROSOPHILA
gacgaaaagcatcgccagcgcataccctctagaaatgctctggagagctacgtgttcaacgtaaagcagtccgtggagcaggcgcccgctggcaaactggacgaggccgacaagaactccgtcctggacaagtgcaacgaaactattcgatggctggacagcaacaccaccgccgagaaggaggagttcgaccacaagatggaggagctcactcgccactgctcccctatcatgaccaagatgcatcagcagggagcgggagcagctgggggtccgggagccaactgtggccaacaggccggaggatttggcggctactctggacccacagtcgaggaggtcgactaaagccaataagaaaattatttcggcttaagtttttaaaagtgatcttaatagttgagtgccataaaaaaatgtacatatcttcaactatagtattatactcatatgttagcaacccattgttttaactacaaataatagcaaaaataataataaatgcaatactcttaagcattataagtaaattatttgaataaaataagaaaataagtattaaatgtacatgacgatttttaatttaaacttaaatcgcgttcttaagattcgaatgttcatttcgaaactttgctttggaagttttctcgtttgaattgtttttaaaacacgttagtttcacactttaatttgcaatattttagttcagcaagtacattgaaatacatagcgatacatgaccctaaatacttagatacacaatacattgtacagatgtttagacgggatgcatttcctactcaatgcaagccaattcaactagaaatacaatcaatttcctttactatcacaaaagtcgtcgcaactcaggagagaggtgaatccaaatagaaatcgaactaactaaattgaaataagtgaatcgtttttgcagcgaatggcgaaatttcctacagcttgccaattgttttggttgttcgcagttcattctttttactcattggtaagattgtctttctgcatgaaaattcataacgtcagctacacaattctcttccattcaatattttgtccatacataatttcgattgcgtaatttgtaattttcaataactctgttatgtagatttggtttgctagttttctaggttacatatgtatgatacttagagctagaggtaacattatgggattgcactttttccatgatttaggctagttctatctgtaacaacattaaaaagtgtgtttaatatgaaataaaagcagggagttcattccgctcaggatttgcaatcctaatatacgatgatgacacatgtgaataatccaattttggatcgtattaatactccaaaaatcgatggaaaaagtgtttcgccttcgacaagccgaagtggtgtacataattcttagatgattcatttgacaacatttcacttgaagttggaacttttctacgcaaagagtcgctcgatttctaattggctttcgctctgcca

SEQ ID NO: 41237 - DNA, 351 bp, DROSOPHILA
gaaaagcatcgccagcgcataccctctagaaatgctctggagagctacgtgttcaacgtaaagcagtccgtggagcaggcgcccgctggcaaactggacgaggccgacaagaactccgtcctggacaagtgcaacgaaactattcgatggctggacagcaacaccaccgccgagaaggaggagttcgaccacaagatggaggagctcactcgccactgctcccctatcatgaccaagatgcatcagcagggagcgggagcagctgggggtccgggagccaactgtggccaacaggccggaggatttggcggctactctggacccacagtcgaggaggtcgactaaaataaa

SEQ ID NO: 41238 - protein, 67 aa, DROSOPHILA
MAGQQHHRREGGVRPQDGGAHSPLLPYHDQDASAGSGSSWGSGSQLWPTGRRIWRLLWTHSRGGRLK

SEQ ID NO: 41239 - DNA, 7820 bp, DROSOPHILA
cttcggcggcctgggcaactttcccaatcacatcgaggattattcatttgaggaatgccgtttgcagcattacatggctcaacaggaggatcgcctcactatttatgagttgcagtatgctcgcgaaattgacttggccaccatgaaaattatttgattaagatgtcgccccaaaaactactggaaacattgattgaaatttacgatcagcctctaatcgacagttcctctgtcgcatccgtcagggaccagacttcggacgagagaaaatgccaagttcagcctcaaagcttcccaggttttcaaaccaacttttcaaaccaactgccagttaaacatctccggtgacacggcgaggccgtccaacagagcatgcttaagatgctggaaggcagcgtggttagcctaaccgaccgggaacaactgttttaaaactaatataattttgtttaaagttttttgtttttaatttctttgcagtacaagtgatctgtttttagaaaaagattatccaaaaagttagctttaatttgaaactcaaattgaatatgaaattttggatgcttggagattttggagacttgaaaataaatgtattttcttattaggcgaattaagagcaaaccttgttaattacatatagctcgaactttgttttcagtgtaataactgataagccattcaactaaacagtcgatatgttcgttgaatgtatagatttttgttacatctatgaacggtcatacgaaaaggatattcatttgtttattttagtttggcacatctttgaaaataatgcataatgctttgtgaagatctaggaaactgcagactactccatcggaatttttccatcagcgcccgagaacccagcacttacatcgccaacagccgatgagccgcaatccgcccgtgttcccattccgactgtcgattgatttgtacggcgacaagcggcggcggagaaaaggaccgataaagcagaactggaggagcaaccatgaccggcagagaagcgcaatccttccacacacgctgtggccgctccatccggctgtacaataacaaccggatggcccagcgctcaatgcgggatttcagtcatgccctggtgttcagtgctgagcccctggaggacgatgtacttttcgaggtcgtcatcgagaagaaggtgagttagccacacgactgcagcagatagagctgcggataatgatcgtcttgcagaatacctactggggcggaagcattgagattggtgtcaccgcggagtcgccggatgacctggaactggtggcatgcgccactgccatgcgaaatggcacatgggtcatgtccggcatcgacgtgcgcaaggatggacgacgcctattcgagttctatggcaccgatctggagacgctcaacgagaatgatcgcgttggcgtcatgcgcacctctggtaacgatttggtcttctatgtgaacggagagtcgcaaggcgtggctgcaaagaacatgcccaagcctctgtgggctcttgtcgatctctacggacgttgtgtgcaggtttccttgtgtccgcgcgatggaagtggttccggagaggtaacaattcagctaatccaaatgaataggtaaacaaaaactcgttttctttgtacacagcttttggattctccgctgcagcaaccactgcaacaggttgttcaaaacttggacgtggccatgaacgtaaacattgtcgttgactccgacgcctggatgcaaggcaatggctccgtatccggtgctgatgaccgactgtgcttccacacccgctgtgggtcgttggtgaagctttcgcccaactttcgatccgccgaacgccgtcgacccctggacgagttcaataacggcgtggtgatgacccacaggcctctgagggacaacgaactgtttgagattcgcatcgacaagttagtggacaaatggtcgggatccattgaagtgggcgtcaccacgcacaatcccgcagtgctgcactttccggcaaccatgaccaacatgcgctcaggcacaattatgatgtccggctgcggcattttaaccaatggtaaggggacacgccgtcagtacggcgagttcaacttggatgagcttcgcgagggagatcgcgttgggatgatgcgcaaggccaacggcaacctacacaattacattaacggtcaggaccagggtgtggccgccaccagagcaccgtccactttgtggggcgttatcgatctctacggaatgactatcaaggtaacaatagttgatcgcgatgaacgtgagcagcagaatctcgtgacacggcgaaacaacatagtagcaggcatgactgcatgttccagtggtgctggtgctcagcacacccagcaccagcagcattccggcaccccaaccctgagcctcctaagtccagagagcgagatgaatgccgctggcgctgccggcggcctaagtgagaccatttccagcacgcgagccatagccaggaacgatgaccggctaaccttccaccacatttgtggtactcacgccaccgtcacccagagcgggcggacagcgctgcggcccaagtgagcattgttgtttacggcagaagatttttatgaatttcaattccccaatttgtatgcagtgctgccgatgattttaacaatggtgtagtgctcacaaggagacctctgcgccccaacgaactcttccaagtgcgactcgaacgcgtcgtgaccaaatgggctggctctgttgaaatgggagtgaccacgcacagcgccgacgaactggactttccattcacgatgactaatgtgcggtgagtcctggcttctagcccaactttagttgttttaaacaaccattttccaaaccagttccggcacttggatgatgacgggaaacggggtcatgcagaatggagtcaccgttatcgaacagtatggtcaaaacctggatcgcttgcaggtgggcgatagagtgggtgtggtgcgcaaggacgacggcaccttgcatttctgggtaaatggagtggatcagggtccagctgccaacaatgttcccgagcgcgtttatggtgtaatcgatttgtatggacaggcagcacaagcaagcatcgtggacacttcggagtgcggtagtccggacactggaaactctaccatctcaaacacgacgttgtacagtgaagttccgctgcgatttcacagcatccacggcgccaatgcgggcatatcgaatagtggcctaacagcgtcgcgtcccaattccctggcggagttcaatgacgcaattgtgttcagtaaccgaccgctaaggcagagggaattgtttgaagtggagctggagacaatggttcgtcactggtcgggcaacattgagatcggggtgacgggcactcggcccgaggacatccagttggctccaaacgccaccgatctggaggccagcgacaccatcatcttatgcggcccgatgatttttcacaaccgcaagactatacgcacgaatattctgctggatttggataccctaggtcctagcacgcgtgttggtgtgatgcgcaatggtgacttcattcacttctttgttgatggaatggatcaagggccggcctgcgagtgccacgcaccgaacatttgggccattatcgatttgtatgggcagtgcgcgcaggtgagtcttacccagacgcagctggacatccgtgctccgtacgcgaccagcgaaaattcccagagctgccaagccacatcggtaattcagcatccggccatggagacaaaacaccgctggacttgcgtctccggaaatgtaagcctaaccaaggattggacggaggcctcgcgctttacgggagcggcggcaccactatcccattgtctggtattttcggaacatccgctcagcgtgggatcaccttttgagattaagctgacatcggttaattccatgtttgctggtaagctcccccgttgtagatatctacatacatgtagaggattttaaaaatttcttttaatggtccgtaggttgtctaagtatcggggtcactgatttgaatctaagcgacgaaagcgtacgcaagaaactcccaaccagtattcgccggattcccgcaaacgtgtggtatgttagcggaaacgaggtgtgctttaactcaagctgcctgcagcgctcgctggcctccctggaatggttaagggttgacgataggataactctggaacgagtggagaactcgttaaacattctgttgaactcggagaacgtgaacatccactttcacaacgtgcccaacgatgtctacgtggttgccgaactgagaggttcgacgatgggaattcaagtgatttccgctcaaggaccggcgtcgccactacgtccatgcagtttgcgtctgcaggactcaatggactttggagtggatccactgaacaagcaggatagctccatgctggaatcaatcgattccgaggcactgaactacgagtttttggatgtctcacaaaagaacgcacgactcagcgatgatcgcagaagcgtgaccagaatcaagtcctataaccagtccatcgtctgtctcaataagccgctgtgtaagggtgagagcatcagcatcaaggtagatgccctaaacaacaagtggaagggtactgtcggtctcggcgttttgtccgcaagtccccaaactgttcccatttccctgttggactttaaacggagctgctggttggccacccacgactacgtgaacatcaacggtcaagtgatgccctccaaatacggcgatgcccttgagcagatccaagtgggaactgtgatcaccctgacactaacccatgccggaatgctaagtaagttaaatttaaaaagttaaaagttatttttaattatcaaaatttattcagtcattatgattgggtcaacgaatctcgaggatctggccagcggactgcccaaccatgtgtatcccgtgttcgatgtgtacggcaaatgcgagaagataacattgataactggaaatgatgctggccgcactgggaatgccaatggtactccaattctcgaggctccggaggccctggaattggataatggtatgccacagcaatgtgaaaaggcgcatctggaaatgcacgagaaggaaaaggacacggagcaggtgtgcgaatcgggcccgtccacctctggtgctccttcaaacgccatgtaagcgtatcaataaataggtctactccggttttctgtacggaatcattttgcaggactcgatcggttatggagagcgtttcggagaacttgctgttgaacatttccattaagaatcgaactctggagcagcagcgaaatgaactcggtggatcatcgtcgacttggtaagcatgacaatggaaatgcggataagaatgtaattcctaattttctgaatttctttagttgccttcgcgagtctctgcagctgcagcacaatactaatttaaatatacaacgcagtcagagcacacagagattccagaactctttgaacacatctgcaacggcagcgggatctagtggcaccagcggctgcacggccaatacgcaacacctgagtaactcgggtgtatatgacacgaataaggagtatgatgatctacccaatcctccaaacccgttagtcaattccgtcgacgaagcaagtggagcaattacgtctgtatccacaacgatcgatcacagtgaaaacaatgcggaggccttggaactgagtgctagcaatgaacgcgaaatgtccggcgagcccgcgctcaacgataatgtattggaggacgatgagatcgactacatgaaccacctgttgctgctgcagcaactccagcagaacgaatatacgcggcatcatcttatgcccgatcaggcgtcactactcaatctcgacctgccatcccttaattccatggaatccgacacgaattctgtcggccagacgcggccgagtggaggaacagattccctgcgatccactgccaccggggccagtgtggagcagaacgactgcgagtatttgcgtcaggtgagacgcttctgtgcatcgctagttctgccgcaggccttttttgatagccgacttgagccggtgtgcttctgcctgaagtgcagtggacccagcatcggaggaaatggtgataaactggagggttgggtttatttcaaactaaaccagcagacggttaatgtgctgagcacttcgacgtcgactgcatcggccggtggtggcgcttcctcggcgaccgctccccaagtgcattttgatctcaacggagactggctgcccttctactacatgacacgggtggacaagattcgggcgatactggatcgtgggcagccgcttccgctagaaacggatccggacgaggaaccggccgctgcagcgctcaaggatgagcctggtacacgtctggagctgtactattcgcccaatgccacggtcattgagcccgtgctgccgcagcatcactttgcctctgaacagggactccaccgcatctccacttccttcgaggtctacgttcggcggcagtcgatttcgggtgtgaccactggcaaggctgcggccgaggcgaaaaggcgcagcctgggatccaccgaccacgatcatggtggaactggtcaaggtgccgacggcgtgggagtcactccgtccgctactctcaacgagtcgtctgttcatctgctaaacgatctctgctggtttactaaggaggctggcgcctgcataatcaacgctttaattattaaactggacaggatcgaggagtcggaatctcattgagcgcacaacaccatactcgcagtagtcacgcctgtccctatattcaccacattttaatcccgctcagcagctacccacaccaaatcgcagtcgcattcctctttgtaaacgagtttgtatttgtattgtaagctctaataaaattatcgcaaagttaatacagattacaaatttattggtaatgaaccaaaccaaagcacatacaaaactttcggttcattgatactaaacaatttctttcacaaacaatcccaaaaattaaaacactagagtaagaacagaaatgcatgattggaattatcattgtttttatttgattattttaattccattcatttagtgtcgctttgttgattttgttattcaaatatatgaaaaatggtcgattagaaattgttttagggttgtgtttatgtttctgtttctgtttcgttttgtatcatcaacacggcagcagcagaagtaaaggattcatcctcgccagttctatctttttctaccactctcgcccacatccgttttactgatttttgtatacagccgcggccgcagaagcattttatcaaattactcttacacttgtaggttggttgtttgcattttgtttgttatgtttattttgttgtattctctgctagtcctgaagcaagtgcatatacaaatatgttgattcatatatgtttaccgtttaagttatcgttattattattatcattaatcgttagccaataccgctgatagccgggaacaaccggatatcggaatgagcctaatgggctcactccacttccatggagggatcgtttccggccgcgctctggccattgttatccacatccattttgtcgccagaattggccgctggctcgccgccattctgttccgcattcgcctcgtccttgggcggtgttgctgtcttggccggagttggcttcggtttcgccctgttgatcaccgaactgacgcacgaatttagagtttgcacctcttggcgcacggc

SEQ ID NO: 41240 - DNA, 5343 bp, DROSOPHILA
atgaccggcagagaagcgcaatccttccacacacgctgtggccgctccatccggctgtacaataacaaccggatggcccagcgctcaatgcgggatttcagtcatgccctggtgttcagtgctgagcccctggaggacgatgtacttttcgaggtcgtcatcgagaagaagaatacctactggggcggaagcattgagattggtgtcaccgcggagtcgccggatgacctggaactggtggcatgcgccactgccatgcgaaatggcacatgggtcatgtccggcatcgacgtgcgcaaggatggacgacgcctattcgagttctatggcaccgatctggagacgctcaacgagaatgatcgcgttggcgtcatgcgcacctctggtaacgatttggtcttctatgtgaacggagagtcgcaaggcgtggctgcaaagaacatgcccaagcctctgtgggctcttgtcgatctctacggacgttgtgtgcaggtttccttgtgtccgcgcgatggaagtggttccggagagcttttggattctccgctgcagcaaccactgcaacaggttgttcaaaacttggacgtggccatgaacgtaaacattgtcgttgactccgacgcctggatgcaaggcaatggctccgtatccggtgctgatgaccgactgtgcttccacacccgctgtgggtcgttggtgaagctttcgcccaactttcgatccgccgaacgccgtcgacccctggacgagttcaataacggcgtggtgatgacccacaggcctctgagggacaacgaactgtttgagattcgcatcgacaagttagtggacaaatggtcgggatccattgaagtgggcgtcaccacgcacaatcccgcagtgctgcactttccggcaaccatgaccaacatgcgctcaggcacaattatgatgtccggctgcggcattttaaccaatggtaaggggacacgccgtcagtacggcgagttcaacttggatgagcttcgcgagggagatcgcgttgggatgatgcgcaaggccaacggcaacctacacaattacattaacggtcaggaccagggtgtggccgccaccagagcaccgtccactttgtggggcgttatcgatctctacggaatgactatcaaggtaacaatagttgatcgcgatgaacgtgagcagcagaatctcgtgacacggcgaaacaacatagtagcaggcatgactgcatgttccagtggtgctggtgctcagcacacccagcaccagcagcattccggcaccccaaccctgagcctcctaagtccagagagcgagatgaatgccgctggcgctgccggcggcctaagtgagaccatttccagcacgcgagccatagccaggaacgatgaccggctaaccttccaccacatttgtggtactcacgccaccgtcacccagagcgggcggacagcgctgcggcccaatgctgccgatgattttaacaatggtgtagtgctcacaaggagacctctgcgccccaacgaactcttccaagtgcgactcgaacgcgtcgtgaccaaatgggctggctctgttgaaatgggagtgaccacgcacagcgccgacgaactggactttccattcacgatgactaatgtgcgttccggcacttggatgatgacgggaaacggggtcatgcagaatggagtcaccgttatcgaacagtatggtcaaaacctggatcgcttgcaggtgggcgatagagtgggtgtggtgcgcaaggacgacggcaccttgcatttctgggtaaatggagtggatcagggtccagctgccaacaatgttcccgagcgcgtttatggtgtaatcgatttgtatggacaggcagcacaagcaagcatcgtggacacttcggagtgcggtagtccggacactggaaactctaccatctcaaacacgacgttgtacagtgaagttccgctgcgatttcacagcatccacggcgccaatgcgggcatatcgaatagtggcctaacagcgtcgcgtcccaattccctggcggagttcaatgacgcaattgtgttcagtaaccgaccgctaaggcagagggaattgtttgaagtggagctggagacaatggttcgtcactggtcgggcaacattgagatcggggtgacgggcactcggcccgaggacatccagttggctccaaacgccaccgatctggaggccagcgacaccatcatcttatgcggcccgatgatttttcacaaccgcaagactatacgcacgaatattctgctggatttggataccctaggtcctagcacgcgtgttggtgtgatgcgcaatggtgacttcattcacttctttgttgatggaatggatcaagggccggcctgcgagtgccacgcaccgaacatttgggccattatcgatttgtatgggcagtgcgcgcaggtgagtcttacccagacgcagctggacatccgtgctccgtacgcgaccagcgaaaattcccagagctgccaagccacatcggtaattcagcatccggccatggagacaaaacaccgctggacttgcgtctccggaaatgtaagcctaaccaaggattggacggaggcctcgcgctttacgggagcggcggcaccactatcccattgtctggtattttcggaacatccgctcagcgtgggatcaccttttgagattaagctgacatcggttaattccatgtttgctggttgtctaagtatcggggtcactgatttgaatctaagcgacgaaagcgtacgcaagaaactcccaaccagtattcgccggattcccgcaaacgtgtggtatgttagcggaaacgaggtgtgctttaactcaagctgcctgcagcgctcgctggcctccctggaatggttaagggttgacgataggataactctggaacgagtggagaactcgttaaacattctgttgaactcggagaacgtgaacatccactttcacaacgtgcccaacgatgtctacgtggttgccgaactgagaggttcgacgatgggaattcaagtgatttccgctcaaggaccggcgtcgccactacgtccatgcagtttgcgtctgcaggactcaatggactttggagtggatccactgaacaagcaggatagctccatgctggaatcaatcgattccgaggcactgaactacgagtttttggatgtctcacaaaagaacgcacgactcagcgatgatcgcagaagcgtgaccagaatcaagtcctataaccagtccatcgtctgtctcaataagccgctgtgtaagggtgagagcatcagcatcaaggtagatgccctaaacaacaagtggaagggtactgtcggtctcggcgttttgtccgcaagtccccaaactgttcccatttccctgttggactttaaacggagctgctggttggccacccacgactacgtgaacatcaacggtcaagtgatgccctccaaatacggcgatgcccttgagcagatccaagtgggaactgtgatcaccctgacactaacccatgccggaatgctaatcattatgattgggtcaacgaatctcgaggatctggccagcggactgcccaaccatgtgtatcccgtgttcgatgtgtacggcaaatgcgagaagataacattgataactggaaatgatgctggccgcactgggaatgccaatggtactccaattctcgaggctccggaggccctggaattggataatggtatgccacagcaatgtgaaaaggcgcatctggaaatgcacgagaaggaaaaggacacggagcaggtgtgcgaatcgggcccgtccacctctggtgctccttcaaacgccatgactcgatcggttatggagagcgtttcggagaacttgctgttgaacatttccattaagaatcgaactctggagcagcagcgaaatgaactcggtggatcatcgtcgacttgttgccttcgcgagtctctgcagctgcagcacaatactaatttaaatatacaacgcagtcagagcacacagagattccagaactctttgaacacatctgcaacggcagcgggatctagtggcaccagcggctgcacggccaatacgcaacacctgagtaactcgggtgtatatgacacgaataaggagtatgatgatctacccaatcctccaaacccgttagtcaattccgtcgacgaagcaagtggagcaattacgtctgtatccacaacgatcgatcacagtgaaaacaatgcggaggccttggaactgagtgctagcaatgaacgcgaaatgtccggcgagcccgcgctcaacgataatgtattggaggacgatgagatcgactacatgaaccacctgttgctgctgcagcaactccagcagaacgaatatacgcggcatcatcttatgcccgatcaggcgtcactactcaatctcgacctgccatcccttaattccatggaatccgacacgaattctgtcggccagacgcggccgagtggaggaacagattccctgcgatccactgccaccggggccagtgtggagcagaacgactgcgagtatttgcgtcaggtgagacgcttctgtgcatcgctagttctgccgcaggccttttttgatagccgacttgagccggtgtgcttctgcctgaagtgcagtggacccagcatcggaggaaatggtgataaactggagggttgggtttatttcaaactaaaccagcagacggttaatgtgctgagcacttcgacgtcgactgcatcggccggtggtggcgcttcctcggcgaccgctccccaagtgcattttgatctcaacggagactggctgcccttctactacatgacacgggtggacaagattcgggcgatactggatcgtgggcagccgcttccgctagaaacggatccggacgaggaaccggccgctgcagcgctcaaggatgagcctggtacacgtctggagctgtactattcgcccaatgccacggtcattgagcccgtgctgccgcagcatcactttgcctctgaacagggactccaccgcatctccacttccttcgaggtctacgttcggcggcagtcgatttcgggtgtgaccactggcaaggctgcggccgaggcgaaaaggcgcagcctgggatccaccgaccacgatcatggtggaactggtcaaggtgccgacggcgtgggagtcactccgtccgctactctcaacgagtcgtctgttcatctgctaaacgatctctgctggtttactaaggaggctggcgcctgcataatcaacgctttaattattaaactggacaggatcgaggagtcggaatctcattga

SEQ ID NO: 41241 - protein, 1780 aa, DROSOPHILA
MTGREAQSFHTRCGRSIRLYNNNRMAQRSMRDFSHALVFSAEPLEDDVLFEVVIEKKNTYWGGSIEIGVTAESPDDLELVACATAMRNGTWVMSGIDVRKDGRRLFEFYGTDLETLNENDRVGVMRTSGNDLVFYVNGESQGVAAKNMPKPLWALVDLYGRCVQVSLCPRDGSGSGELLDSPLQQPLQQVVQNLDVAMNVNIVVDSDAWMQGNGSVSGADDRLCFHTRCGSLVKLSPNFRSAERRRPLDEFNNGVVMTHRPLRDNELFEIRIDKLVDKWSGSIEVGVTTHNPAVLHFPATMTNMRSGTIMMSGCGILTNGKGTRRQYGEFNLDELREGDRVGMMRKANGNLHNYINGQDQGVAATRAPSTLWGVIDLYGMTIKVTIVDRDEREQQNLVTRRNNIVAGMTACSSGAGAQHTQHQQHSGTPTLSLLSPESEMNAAGAAGGLSETISSTRAIARNDDRLTFHHICGTHATVTQSGRTALRPNAADDFNNGVVLTRRPLRPNELFQVRLERVVTKWAGSVEMGVTTHSADELDFPFTMTNVRSGTWMMTGNGVMQNGVTVIEQYGQNLDRLQVGDRVGVVRKDDGTLHFWVNGVDQGPAANNVPERVYGVIDLYGQAAQASIVDTSECGSPDTGNSTISNTTLYSEVPLRFHSIHGANAGISNSGLTASRPNSLAEFNDAIVFSNRPLRQRELFEVELETMVRHWSGNIEIGVTGTRPEDIQLAPNATDLEASDTIILCGPMIFHNRKTIRTNILLDLDTLGPSTRVGVMRNGDFIHFFVDGMDQGPACECHAPNIWAIIDLYGQCAQVSLTQTQLDIRAPYATSENSQSCQATSVIQHPAMETKHRWTCVSGNVSLTKDWTEASRFTGAAAPLSHCLVFSEHPLSVGSPFEIKLTSVNSMFAGCLSIGVTDLNLSDESVRKKLPTSIRRIPANVWYVSGNEVCFNSSCLQRSLASLEWLRVDDRITLERVENSLNILLNSENVNIHFHNVPNDVYVVAELRGSTMGIQVISAQGPASPLRPCSLRLQDSMDFGVDPLNKQDSSMLESIDSEALNYEFLDVSQKNARLSDDRRSVTRIKSYNQSIVCLNKPLCKGESISIKVDALNNKWKGTVGLGVLSASPQTVPISLLDFKRSCWLATHDYVNINGQVMPSKYGDALEQIQVGTVITLTLTHAGMLIIMIGSTNLEDLASGLPNHVYPVFDVYGKCEKITLITGNDAGRTGNANGTPILEAPEALELDNGMPQQCEKAHLEMHEKEKDTEQVCESGPSTSGAPSNAMTRSVMESVSENLLLNISIKNRTLEQQRNELGGSSSTCCLRESLQLQHNTNLNIQRSQSTQRFQNSLNTSATAAGSSGTSGCTANTQHLSNSGVYDTNKEYDDLPNPPNPLVNSVDEASGAITSVSTTIDHSENNAEALELSASNEREMSGEPALNDNVLEDDEIDYMNHLLLLQQLQQNEYTRHHLMPDQASLLNLDLPSLNSMESDTNSVGQTRPSGGTDSLRSTATGASVEQNDCEYLRQVRRFCASLVLPQAFFDSRLEPVCFCLKCSGPSIGGNGDKLEGWVYFKLNQQTVNVLSTSTSTASAGGGASSATAPQVHFDLNGDWLPFYYMTRVDKIRAILDRGQPLPLETDPDEEPAAAALKDEPGTRLELYYSPNATVIEPVLPQHHFASEQGLHRISTSFEVYVRRQSISGVTTGKAAAEAKRRSLGSTDHDHGGTGQGADGVGVTPSATLNESSVHLLNDLCWFTKEAGACIINALIIKLDRIEESESH

SEQ ID NO: 41242 - DNA, 4619 bp, DROSOPHILA
aatatgaccagtttactttagctccgaagtagttatctgtggggtatgaaagaatccggttaaaatggagcctcaatcacttggtggtatgatatttttaggggagtttttcgggcagaccgaccacccccgatacgcggatgcagcgaagaggtttcacgggatgcacaggacatcgcggtatacatatagtggctatagtatatatatggtcgatatatgtgtgtctaccagatgaacgtttgtactctgtaggcgtgcgtacatatgttttactacaccagagcacgaaataccggctgctggaagggcctcggtctcgactcggttcgcaataccgggactacggaccggggagcacggccattacgggggattggtccgtggtcggcctccgggagccacagccagcagctgatacgaccgaccgaccgtctggcctgcgcgtgctcgcttttctgcgtcgaacgtcgcaacgccgaggggctcagtttacggctttcctttttaactgcgaccggtaaatggatcttaaactgggtgcgctcggttaaagggatccgcccgtgcagttaggggaaagaacggttcaatttttaccatatttttcaaaatcaatcaaaatttcttggcgtcaattagagctgggttggccactcgcgatagtatcgatacatttaacactgatgggggcaaggactatcggtgtcttggatttgatagaccctggtttgcgaaatttaacggcactatagaattaacagggctgtcgcatttccttggaattacttattacacattcttgttaacacataattttctgacatgctttattttaaacgggcttcgaaataaacaacaattttaagatataaaaataaaatattaaacatttgcattttggctgtttttagtggaaacacaacaaccacaacgatactatcgcttaggactcggaaaacaggtgtgccatcactgactgtctaggtctattcttcagaaaaatcaatttttccaatttgattgtaaacacgatgccagacagaaagaggccccttggtctttagtaatagatctcaggatgccgagcttctacctattcgccgccagcagtgaagggcgcgtctacacgctgtccaccaactccggagcgtggcgcgaacttccctatctgggattggagttcaagaagatctgcgctgtgcccaactttttgtgggccattggcggcgaccgccaggtgtacgttcatgtgcacggtctggacgtgcccattcggattcgggaggagtcgtacgagaacgagcgctggctgcccatcgaaggattttcgaagacgctgctgcccactgatcggtacagatattcctccgccgatggcagtgtggagcgtggtgtggacaaaatccgactgccctcgatggcgtggcaatgggacggcgactggcacctggacttagagctcgatggacagccgctgaccgaggatggctggatgtacgccctggactttccggccacgtactcggcaaagaagtcttggaactcgtatgtgcgacgacgcaagtgggtgagatataggaggtatgcagccttgaatagctggtgcgcggtggcaccactacacaaggatcccacgcaggagcccttcatagacgtggctataggcggcacttgtgttcccaacgctcctgccggcactttgtgtgtctgggccattaccgcccatggcagggctatgtttcgcacgggggtgtccaaaacggcgcccgagggtcttcgctggacagctgtacccacgcccacgggcagtgaactcgcgcagatcagcgtgggacccacaggattggtatgggcggtactccataacggccgagttatcgtacgtactggtgtaaccagagacaacctagtcggtgactcgtggttggatgtcaaaacccccgtggccgccagtagcttgcgcattgttcacgtttccgtgggcaccgatgctgtgtggtgtgtaaccaatgatcatcacgcctggttcaggagaggcgtcaagggtgaagcagcgggcataagcgaggattcggccattggcaagggctgggtggaaatggtgggaaacatttcaatggtctctgtggcggccaacgatcaggtaaaccagtgttagatctacccaattatcttagatatgaacatactctttcgcaggtctttgccattggagccgctgaccgttgtttgtaccaccgctctggggtgacctctgccgaccctactggcaaaaaatggcgtttaattcaatgtcccatgcaaatcagccgcacttctagctctctatccatagtctctcgtaaaagcggcggaagtagttcaacgccaggctcaaagcaccagagcttctccaatttgtactccaaggagaaggagaagggtgtggtagagacgtgtgcagttatagaaactgtgctcaacagctctacgggctcctgctctagtaatggcggtccacctggtcttcttaagaacgaacgttggaaactcagtgccgattcacctccgacaattggaagtctgaatctcaacgatcgccacaagcagagaacggcggcgcttcgcgaaacttcacatgcttccagtgctcccgcagcggatgtggtggaggtggtaactggcaagtttgagacccagctgaggaatccaagagcttggtctcccgtccgaagtgttgggtccgtcgtgggcactgaagcgcatccagagagcgattcgaccgtgtttgagtcggactccacgcaccatggatcggatgtgtttctgggagaagatgacgaccatacgggatcacaattttggacagaatgcgggatactatggagctgcgtagcttcaggtgctgtgactgtggatgccagcaacatgcccaattggtttaacgagcagacgagcgacagtaaagtggacgtgaatgccaattggcgaaaggatattgtgaacaagttgcagcgacgtcaggagaaactggccaagcttcagactgtggccaagttcgagaaggcagtggagctttcttcgtgggtcaaatcggcggatgcgcgctatcagcgacctggaggcgagtttgaggattgtatcatcgaacttgagtgggtaagcagtggcagtggcactgacacaaatagtagtgaaaactcgcgatccggggactctggaacttttacggtacttagtccggatggagccgccacgaagattcagttcccgttgtcagacatcacctgtgttcagtgctgcagtgaagccggagcaccgcggatcgctattcatgctcctcatcttcccgtaaactgttcgcccgttaagctacagttctccagtgactcggaaatggaggactggttgtcccacctgtcgtcagtctgtagccagatcaacactatggtgggaaaaccggctggcaatgcgatctggataaccagcgagttgggcgatgtctttgtgtttgatcccgccaacatgaaggcacatcagacaagtgaacccagcgagggatacgtggagaagatggatgtttccacttgcgaaactccatactacaatactctttacaatgggtaagtgggcttaaaaacttacctgtcggtcgaagattctattaaaatttatgtggtaggattgttttgtgaagtatgtaggtattatattgtttaaactgctatgatagaaaaatatttttgagtgatggataaatctagcgctggagttttgttgaattcaaattgttcaatttatccaagcaggcaatttaccagaagcttcgtattccatttaattctaaaagcttaattttttaataattacctcctgtatatgttaatttcagaatgccatgtggtactgagctagagatatctggctgtgtgtacgatgacgctgatcagattcgtttcgacttgcagtcgcattctgcagtaaaagttcagcctcatcgcgtggagaagcatcgggtcattgctctgcacctgaatccccgtttcaacgaacgcaccacggtgctcaactcgatgaaggagtccgaatggctggacgagattcgcaatgacaaaatggcctttgctcccggagcaactttttcgttgaaaataaggtaggaatagaatcctgggaatgaaatcgaatgcctaatacatacttgaatatccttacagggctctgcaagatcactacttgatcatcgtgaacaatgccgtatataccgactacaagtaccgcatcgatccggaaagcgtgacgcggctttatgtgagtggccgtattaagcttttcaatgtactctaccgctgcccctccctaattgtctcaatggagcgcatgcactggcgccaaatgggcggtcacattaagaggattttcaacagcggcgtggatgtggtgtggggcatatcctgtgacaacactggctgggtttacaacggaggctggggaggaatgttcctaaagggcttggaggggtccggcaaaattaacccaatgattgacacacacacctactatgtgtacgaaaatcaacgttggaatccaatcagtggtttcacggcgaagagcctgccgacggatcggcacatgtg

SEQ ID NO: 41243 - DNA, 2563 bp, DROSOPHILA
aaaaatcaatttttccaatttgattgtaaacacgatgccagacagaaagaggccccttggtctttagtaatagatctcaggatgccgagcttctacctattcgccgccagcagtgaagggcgcgtctacacgctgtccaccaactccggagcgtggcgcgaacttccctatctgggattggagttcaagaagatctgcgctgtgcccaactttttgtgggccattggcggcgaccgccaggtgtacgttcatgtgcacggtctggacgtgcccattcggattcgggaggagtcgtacgagaacgagcgctggctgcccatcgaaggattttcgaagacgctgctgcccactgatcggtacagatattcctccgccgatggcagtgtggagcgtggtgtggacaaaatccgactgccctcgatggcgtggcaatgggacggcgactggcacctggacttagagctcgatggacagccgctgaccgaggatggctggatgtacgccctggactttccggccacgtactcggcaaagaagtcttggaactcgtatgtgcgacgacgcaagtgggtgagatataggaggtatgcagccttgaatagctggtgcgcggtggcaccactacacaaggatcccacgcaggagcccttcatagacgtggctataggcggcacttgtgttcccaacgctcctgccggcactttgtgtgtctgggccattaccgcccatggcagggctatgtttcgcacgggggtgtccaaaacggcgcccgagggtcttcgctggacagctgtacccacgcccacgggcagtgaactcgcgcagatcagcgtgggacccacaggattggtatgggcggtactccataacggccgagttatcgtacgtactggtgtaaccagagacaacctagtcggtgactcgtggttggatgtcaaaacccccgtggccgccagtagcttgcgcattgttcacgtttccgtgggcaccgatgctgtgtggtgtgtaaccaatgatcatcacgcctggttcaggagaggcgtcaagggtgaagcagcgggcataagcgaggattcggccattggcaagggctgggtggaaatggtgggaaacatttcaatggtctctgtggcggccaacgatcaggtctttgccattggagccgctgaccgttgtttgtaccaccgctctggggtgacctctgccgaccctactggcaaaaaatggcgtttaattcaatgtcccatgcaaatcagccgcacttctagctctctatccatagtctctcgtaaaagcggcggaagtagttcaacgccaggctcaaagcaccagagcttctccaatttgtactccaaggagaaggagaagggtgtggtagagacgtgtgcagttatagaaactgtgctcaacagctctacgggctcctgctctagtaatggcggtccacctggtcttcttaagaacgaacgttggaaactcagtgccgattcacctccgacaattggaagtctgaatctcaacgatcgccacaagcagagaacggcggcgcttcgcgaaacttcacatgcttccagtgctcccgcagcggatgtggtggaggtggtaactggcaagtttgagacccagctgaggaatccaagagcttggtctcccgtccgaagtgttgggtccgtcgtgggcactgaagcgcatccagagagcgattcgaccgtgtttgagtcggactccacgcaccatggatcggatgtgtttctgggagaagatgacgaccatacgggatcacaattttggacagaatgcgggatactatggagctgcgtagcttcaggtgctgtgactgtggatgccagcaacatgcccaattggtttaacgagcagacgagcgacagtaaagtggacgtgaatgccaattggcgaaaggatattgtgaacaagttgcagcgacgtcaggagaaactggccaagcttcagactgtggccaagttcgagaaggcagtggagctttcttcgtgggtcaaatcggcggatgcgcgctatcagcgacctggaggcgagtttgaggattgtatcatcgaacttgagtgggtaagcagtggcagtggcactgacacaaatagtagtgaaaactcgcgatccggggactctggaacttttacggtacttagtccggatggagccgccacgaagattcagttcccgttgtcagacatcacctgtgttcagtgctgcagtgaagccggagcaccgcggatcgctattcatgctcctcatcttcccgtaaactgttcgcccgttaagctacagttctccagtgactcggaaatggaggactggttgtcccacctgtcgtcagtctgtagccagatcaacactatggtgggaaaaccggctggcaatgcgatctggataaccagcgagttgggcgatgtctttgtgtttgatcccgccaacatgaaggcacatcagacaagtgaacccagcgagggatacgtggagaagatggatgtttccacttgcgaaactccatactacaatactctttacaatgggtaagtgggcttaa

SEQ ID NO: 41244 - protein, 823 aa, DROSOPHILA
MPSFYLFAASSEGRVYTLSTNSGAWRELPYLGLEFKKICAVPNFLWAIGGDRQVYVHVHGLDVPIRIREESYENERWLPIEGFSKTLLPTDRYRYSSADGSVERGVDKIRLPSMAWQWDGDWHLDLELDGQPLTEDGWMYALDFPATYSAKKSWNSYVRRRKWVRYRRYAALNSWCAVAPLHKDPTQEPFIDVAIGGTCVPNAPAGTLCVWAITAHGRAMFRTGVSKTAPEGLRWTAVPTPTGSELAQISVGPTGLVWAVLHNGRVIVRTGVTRDNLVGDSWLDVKTPVAASSLRIVHVSVGTDAVWCVTNDHHAWFRRGVKGEAAGISEDSAIGKGWVEMVGNISMVSVAANDQVFAIGAADRCLYHRSGVTSADPTGKKWRLIQCPMQISRTSSSLSIVSRKSGGSSSTPGSKHQSFSNLYSKEKEKGVVETCAVIETVLNSSTGSCSSNGGPPGLLKNERWKLSADSPPTIGSLNLNDRHKQRTAALRETSHASSAPAADVVEVVTGKFETQLRNPRAWSPVRSVGSVVGTEAHPESDSTVFESDSTHHGSDVFLGEDDDHTGSQFWTECGILWSCVASGAVTVDASNMPNWFNEQTSDSKVDVNANWRKDIVNKLQRRQEKLAKLQTVAKFEKAVELSSWVKSADARYQRPGGEFEDCIIELEWVSSGSGTDTNSSENSRSGDSGTFTVLSPDGAATKIQFPLSDITCVQCCSEAGAPRIAIHAPHLPVNCSPVKLQFSSDSEMEDWLSHLSSVCSQINTMVGKPAGNAIWITSELGDVFVFDPANMKAHQTSEPSEGYVEKMDVSTCETPYYNTLYNG

SEQ ID NO: 41245 - DNA, 3056 bp, DROSOPHILA
gcagaatccgtgcggcgatgcctggcaacaagtggaggcacccgcgggtgtgacctttaaagcgataagcgtgggtcgggctgggatttgggcgctggacaaccagcaacgtttggctgtgcgtaaggagatttcgaggactttccctgagggctcccactggcagtttctgcccaatgccgccaatgtgccaccgcacacggatcagcattgtggcttccgctcggtgtccgtgggctccgaggtgtgggccatctccctcaatggtatcatttgcaggcgctgcggaattacagaggaaaatcctgcaggcgtaggatggaaccttggcattgcggtatgcaatctaaacattgggttggttgaatttataattaaaaaaaaataccctctccatttcagggccaatggcaaaatgtctctgtcgaaggatatatgtgatggagttgaatactttatttgtgcattcctatttacttacggacgatcctgtttgttgtatttattcatatttacaagcttatatgtgaccatgccaacgctttttccaaagtatatgaaaataagatgtttcctatttaagctatttgaaacgtattatttacacatatttatttataatttataataataatttataaaagtatgtatctaagtcaaatgtttagtttaagtcttttgtttagtttaacaaatccagcagccgtgattgtatttcctttttgtaagcaaatatataatgaattacgagaataaatatatgtatgtgatgaaagatgaaatatgtcttatctctcacagatcaaaaatcatttgattttaatttttttaccaagttaatgaatggtttgagtccgtactttttaaaatgtacgcttacagtattttattggtaagatatcgatagccgatagaccagctcatctgcgatgttgtatcgcatgtttgtttattgtgttgtaaaccaaaactatatcaacaatttacctattttgtgacgatgtcagactacgatcatgcacgcattaagaaattggttctaaaaggcgagaaactcaagtatgtaactacaaatctgccaatagcatcaattgaaattctcgatttgtagaaagagcaaaaaacgcaagaaggaaaaggatgaggctggatcttccaaaaaggccaaggtagtagtggatgaggatgccgtgaagcacggcggttggtgggcagcaaagacagcggccgacatcaccggtacagtgtccatagagtttggcgataggagttacctaaaggccatggacaatgggtaatagtgaaaaagatctgcccattggtactttaattataccgggtgtccattaacattttagtctcttcacattgggagcaccacacaacgctggcgatggcccagatcccgaggagattttcacggcttttcccatcaacgaccgaaaggtagcgtttaagtctggctatggcaagtacttgaaaattgagaaggatggaatggtcacggggcgctccgaagcagtgggcggcatggagcagtgggagccggtttttgaggtaagtcttacctatatacaaatgttttgaaacgataaaactaatcaacgtaattaaaggaacaacgaatggctcttctatccgaaaccggacactttatgtcgatcgatccccaagacgacgcctgcgtggcattgcgaaagaaggtgggtcagcatgagatctgtaaagtgcggagtaatgcgagcagggatgtggtcatcgatacggagcccaaggaagaaaagggagacttgggcgaagtcgagaagaactatgtgtaagttcagctgatgattatgatttataggacttaaaaaggttgaattccgcgttacccatttcaaatttcgaacctttcgcattttttaggaaaaaatttcaaaagttccaggacaagaagatgcggattaatcagaacgatgtcaaagaactcgagcaggcaaaagctcagggatctttgcatgaaactcttctggatagacgcagtaaaatgaaagccgatcggtattgcaagtaaaccgacgcgaagtgttcatcattcattaaaaaaagttacctctaaaataaggtacgggttttatttttataaatatatatgtatatttattggtatctgaaaatatctgaatacttattggtttaaatatttaaaagcaatatatttcgttcaggctttcaagcttaggcttttaaataacaaatgataggtaaactgtgttcatattcatagtttcaagcagaatcagtatttacctagttaatttcccagtttacaaccaaaattcaatatcaatctatgtaggcagcacacagatttgagcatgcagatgcgggatttaagctggccaagagttcaactggccggcaacagcctttccaccccctttcgcccgccttgctgtagtaaaactagcagcagacggcgtcacaacatgacaattcgcgctggatgtcctccacaccacccaactacttcagccaccccctcgtcgggtgggaaatcaaccaccatgcgttgcatccttggtgcccgtgcccgctctcatctcggtctctcgcccgctctctcggcgcagtcctcacaccatcgttggcgtgcgcctctcgctttttccacgaggagtccgcttgaagtgccgaatccggttcacgtcctggtggctcgtgctcgtctgtgcgctcgtggctttattttggctctggccggtggctcaaagtcgcgtggcaatcagtttgctgccgtctgtgttcgtgggtgaaagtccgcaccgcttggctgttcggattttttgccgcatctcgtagatacttcatatggaaaacgcttctatcggttggaattgtatctcgtgaattgtgccgccgccgtcaagttacacttgaaaattgtcaaaattgaattcaccgaacgttagtgaacaaaggtcctccaaatggccataacgagtgctgcggtctttgtctcgattcggttttcaaaccaaactactggcgttgccgggttaagtcaaaaggtt

SEQ ID NO: 41246 - DNA, 789 bp, DROSOPHILA
atgtcagactacgatcatgcacgcattaagaaattggttctaaaaggcgagaaactcaaaaagagcaaaaaacgcaagaaggaaaaggatgaggctggatcttccaaaaaggccaaggtagtagtggatgaggatgccgtgaagcacggcggttggtgggcagcaaagacagcggccgacatcaccggtacagtgtccatagagtttggcgataggagttacctaaaggccatggacaatggtctcttcacattgggagcaccacacaacgctggcgatggcccagatcccgaggagattttcacggcttttcccatcaacgaccgaaaggtagcgtttaagtctggctatggcaagtacttgaaaattgagaaggatggaatggtcacggggcgctccgaagcagtgggcggcatggagcagtgggagccggtttttgaggaacaacgaatggctcttctatccgaaaccggacactttatgtcgatcgatccccaagacgacgcctgcgtggcattgcgaaagaaggtgggtcagcatgagatctgtaaagtgcggagtaatgcgagcagggatgtggtcatcgatacggagcccaaggaagaaaagggagacttgggcgaagtcgagaagaactatgtgaaaaaatttcaaaagttccaggacaagaagatgcggattaatcagaacgatgtcaaagaactcgagcaggcaaaagctcagggatctttgcatgaaactcttctggatagacgcagtaaaatgaaagccgatcggtattgcaagtaa

SEQ ID NO: 41247 - protein, 262 aa, DROSOPHILA
MSDYDHARIKKLVLKGEKLKKSKKRKKEKDEAGSSKKAKVVVDEDAVKHGGWWAAKTAADITGTVSIEFGDRSYLKAMDNGLFTLGAPHNAGDGPDPEEIFTAFPINDRKVAFKSGYGKYLKIEKDGMVTGRSEAVGGMEQWEPVFEEQRMALLSETGHFMSIDPQDDACVALRKKVGQHEICKVRSNASRDVVIDTEPKEEKGDLGEVEKNYVKKFQKFQDKKMRINQNDVKELEQAKAQGSLHETLLDRRSKMKADRYCK

SEQ ID NO: 41248 - DNA, 3516 bp, DROSOPHILA
gatatccaagatccttccatgcaacttactccgctgcagcgccgttctgaaagtaataggcaaaggactgcaagagctcgtcctcgttgttcacgaccgcccgagatcctgtagtggctgctgcgactggaatccggcgcccatagtagcgatccagaaattcagtggcgtttatctgcaagtccgtgcaggctccgtagccgatggccaccttgggtgccggttccaacgcggtccgcttcagggatctgaaatacaaatgcatatatagctagtgctgcagtgtagccgaatgaactcacccctcgattgccaggagaccggtgagcaggacagtcgtcctgttaagcgtctgcagggcgatgaatgcctgccaaattatggaaacaaaggccgttaggacggaacagccggtgatccatcccatgtatcgcagggcggtcattgtgggcgtggattgttgtgtgattggttcgcctcagtttgggctttccaaactattttgtatgtgacaatccgccttccggctacgccaactttcttatcagaattatcgctctttttcctttgagatgcttcaaagctagcgatgacactatctgcagttcttggactacagcgatagtccaaccaacagttacatttgaatgctatactgctatactatatttgaatatattaaaataaatttaaattgaaatgtgcacttataagagcgccctctcaatgtgttaatttgttcaatgcatagaacagcttacattgtgtttaaacatctttttttgagcatattttttcgctaacatattgggaatatgtatgtttatttgatcctcgtagtttatattttaattttttaagcaaacaaataaaattgcaattgcttatcgatgacaacaatggtttgagccacagctactcgaagctggacagttcagtattgagcaactgtagtttcgataaacgatatgttccgaaataacgccttctgctatcgaagacagtcttgcgtctgtaaagtgataaaataattttacaattgagtcgccttgggaatttcagtcactctccacacaccaaatacatagctcgtgtaacagcctgatttagtcgaacagcacatcatttgccggaatcgttagcgaatagcagcactctccgctaagtcggcacgctaattggcaaaaccgattcgattccagggaaggagacacactgatagacgggtgaagaacaaaaggagaaggaaaacaacagttaatcgtcaaattttacaggcaaaaggtgagcaactacgccttgcacacaaacaaccgcatcgacgagcaaacgcacgcacacacaagccttatcgcctgcgtagtggttggtgtatataaaaaattaaaacaatatttgcacatccgattattactataatatttcgcgtccacatatattagcaagtgtgcgtgcgcctgccctggatttacgtgccagtgtttgtgcgagcctagcgcgtttgtgtctgtgtgtgtgtgtaatgaaatgcaattttctcttggcattttgcgcgcctccgattttcgctgcccctctgcaattccgccgcctccccctccttttgccatttaagttctcccgtgtcgccattgtcgcaccttggctaatcccagtactatcacccgtaggcagcacacaatgagctccgcggaagaaaacagcaacagcccggccaccacgccccaggacaccgagaccaccgagcaggctaacctcacggatctcgagaagatcgaggaggagaaactcaagtccaagtatcccagcggaatgcgcgtgccgggcggacactcggccttcctccagaaaaggctgcagaagggggtaagtgattagcacaattcgaaaacaatcaaacaataagtttactaactttcggtgttcggggatacccaaaccctgtaatatgaatatcaattaaaaataataataataatattatttagtagtatttagtacccgttgtttaaaggaaaataacaattcatgtttcctctattctaagatccatactatttggcaattgctttctgaaatcaatgaaactcaataatcacagcgcatagtttatatcaacttgatgatctggtaaacgaaatcagattgttacattaagtttgcatttggaagatatctccgttttagttctaaaaagctatttgattatataagagaaatctaatatgtattccttcatatccttcccacagcaaaagttcttcgactcgggcgattaccagatggccaagcagaagggtggcggcgtcaagcaggtctttgccaacaaggtgaccaccggggaggccattcccacgcccgaaaccgtgccggcgcgcaagacttcgatcatccaaccctgtaacaagttcccggcgacgagctaatttactcaccactcaacactcacctctactgtatccacaacctcaagtgcagccagttctccgttccccacttcaaatgctctatacctaattttaatgaaaaacctaatgctaagatggctgctgccggattgtgcgggcatttcgcgacagtttaaactgaaattctagcaccatgttccgtgtttcccccgttaaattcaatcgccatccgcactggccaatcaatctcaagatcaactcatcagtccatctctcaggccggggaagcgaagatggcgagccgagcagcgcgaaatttattgcaacagttatatatatctctatctttgtaacattaaactaacttaccctcgtcgtacatagttgtaagtattacgagcataataaatttaagttggagcagccagccacacacacacacacgttctcgtacattactgggattccatcaaaagtttttaaaagttcaccatgttctatggaaaatgtttttatatttttttttttgcattcattctataagcagttgacggaatttcaccaactaattgataataacataggtactgctgcttgcagagctaaatttttgatgcaaaaaccaaacagtcgagttaaaatgaatttgtaaatcaagcagagctaaaataaatgtatgtacgtatacttataaatgtgttgatttcctggggcgctaacccaacaactgaatcggaaatgtgccatacaaatgtttacttaaattataagtgcccggagtggagtctaattaactaggaaacgttccttcgagcggtgtggtatggtaattggttgttcaaattggacgggaacgaaatgaaatcaccaaaataggtgggaaatacacaatatttaatacaaatagatgggttcatatattttcatacgaacatcgtgttttagttaaaagttaatcgaacttgcaaagtgagttttaggcccaattaaaaaagttttaaccaataaaatcgctttttggaccacagtacaaatgaaatcaatcaaatatccaagttttccaccaatcgataccagcagattaagcatccatattgccacacttctg

SEQ ID NO: 41249 - DNA, 744 bp, DROSOPHILA
acagtcttgcgtctgtaaagtgataaaataattttacaattgagtcgccttgggaatttcagtcactctccacacaccaaatacatagctcgtgtaacagcctgatttagtcgaacagcacatcatttgccggaatcgttagcgaatagcagcactctccgctaagtcggcacgctaattggcaaaaccgattcgattccagggaaggagacacactgatagacgggtgaagaacaaaaggagaaggaaaacaacagttaatcgtcaaattttacaggcaaaaggcagcacacaatgagctccgcggaagaaaacagcaacagcccggccaccacgccccaggacaccgagaccaccgagcaggctaacctcacggatctcgagaagatcgaggaggagaaactcaagtccaagtatcccagcggaatgcgcgtgccgggcggacactcggccttcctccagaaaaggctgcagaaggggcaaaagttcttcgactcgggcgattaccagatggccaagcagaagggtggcggcgtcaagcaggtctttgccaacaaggtgaccaccggggaggccattcccacgcccgaaaccgtgccggcgcgcaagacttcgatcatccaaccctgtaacaagttcccggcgacgagctaatttactcaccactcaacactcacctctactgtatccacaacctcaagtgcagccagttctccgttccccacttcaaatgctctataccta

SEQ ID NO: 41250 - protein, 119 aa, DROSOPHILA
MSSAEENSNSPATTPQDTETTEQANLTDLEKIEEEKLKSKYPSGMRVPGGHSAFLQKRLQKGQKFFDSGDYQMAKQKGGGVKQVFANKVTTGEAIPTPETVPARKTSIIQPCNKFPATS

SEQ ID NO: 41251 - DNA, 8751 bp, DROSOPHILA
acaccgaacaagtactggaaataggactcctgccggaaaacgtagtccacgtcggtgttgtacaggctctggtccttgccgccctcgaggagcaccagcaggttgccgtcgttgaacttgaggcccggcagcagctccttaaggatggccttgccagcacgatccctgttgttccggaagagggtcatgggcactgcgtaacccgatcccatctgaaaggcggccatggtgttgcgacggaggacaaagtttaactggcgctctggacaacaatgagtgctcgagcaagtgagattagctgataatagccaataaccgggctaacaaaggcagtaaattatgtgggttttatcagtgttttttgttttctgttttcgcaaaagtatgaccgagaactgaacgcgaaaaaaaacaagcttaaattacaattcatcgatcgggaattttatttttttaaatatattctttaatatttttaattagctcaattcatttatttatcatacggttttcctttttggcagccgaccttgaaaataaaggatttccctaaataaacacagattaacattttgttcaaatgagctagcaattgaaactagttccgcagagcgaggcacagaaactatcgataacctacagcatcggcatcattcccaagtctggtcacactggaagtggctttttttgcaaattttattttcataattgagaaaaatttgcattttaaagcgaaacagcaacggattaagctctcgaatctcaacaatataacagccagcttgtgggcgcagccagcagagcatcaccagtattaagtatagggcgaacgcagcccagtgaccgttttccacctactatccaatttcaatgtcggcgtcacaacgcggcggatgcaacaacaaatgagtcgttgttctgttccaagctaattaagtacacgctgtgtgggccgccgactccaatgcgccgctagcggggatcacgagcagttggcgtcatgtccagttcggtgtttacggaggcgcccagcgcccggccggcggcagccgaagccgactccaatctggttgtggtctacagcaagagcggaatctccttcgacgagcgtgcgattgggaacatcatgggtaagtgggtccaataggcctgacacacgctcattgctccccacactgacatgggcttgttgcagaggaaaaatcgatttccaccattagcgtggtgcggattacatcgcccacgccgagcatggtggaccaagaggaagacgaacggctggaggagctggcgaactttatggaaactgccaccgactcggagctggacagtgacaatggcagccaaagtggtggcgataatgccagtgagatggatgaacacgacgaggagaaccataacaccggtgacgacaacaatagcgactccacggagacggaagccgatgccccgcgcacacgcaagcgagttggccgaaagcccaaggccatcaaaaagcgaaagcgacgcaaacccaaggagcgtccacaaattgtgggtttgcgagtggagcagttttatgcggacaacacggctgatatggttgtgaaaaatgcactgagtaaataacgtacatcgatgtggtccaaatgataaagcaaaacaacatcattatttcgagcacaacgaaagtaaacgaactttagctttcaactaatttgtattctatttacagagcttgccggagtttccgtctacaaaaggactgcggagacagacgctcttatggaagttattcgaaatgaccacaactacacaccgtttacctcgccagagcagctgaagaaccacaagcgcgatgagaagatggccatggaaatgcaggcccaaagccgcaaaatcataatgcaggcaccgggcagtgtcaagctaatcaatgccaaaaaacgagtccaggccatacccttaagcccggtgcaggtcaaggtccagagactgccagtcaagccccaccaagttcagcaggcagcgcagctgcaaccgaaagtgcagctgatccgcaagcccatccattcgccactgccaagacagaagccagagattatcgcgaacaattcggtcaatgccaggctgaggcccactcgtgctccagtcaaagtgattgctccgcctgtgcaggaatacatcgaagatgatgatgacgcccaaagctcggattccgccgaagaggaaaatgccgacaaggcctatgattcggaggaaatgagtgaggagagcgatgagttccaggaatcggacaacgacagggacagtgacatggacttcgatatgaggcatagcaatagacgtaatccgaataagaggaagcgggttagaaaggtggttaggcagactcccagcaaaccaatgaagccgctgcctccgccacccacaacgccgcagcacttccccgagctgaagaaacgcaaggaagttttggagccgaaggcgccgcaaattgggcaaataatccagatgcctgccacaaaatcagtgcccgcagtgtttgccctaggcagaggtcttccaagcacatcgtttctcaaaatccggcccacacatcaatcgctgcctgtgaagagacctccactgccaacgacaccggccaattccaatgttcgtcgtatgcctgccgtgcaattgggaaggatcgtaaactcgccgcaggaagttaaagagattattatcaacaagaatatggccagtcccaaaggagtgtttaccaatctcaacactttgctgggtgaggacaacaatgcagccacaaaatcttcgccagttccactccgacaccgggccgtcatgtcgccaagcacgccgagatcgagctacaatcagcagatgtcgccaattgtggttccggttcctgctcaggcacataccccatccaagggcttcatgcccatcggcgtggacacagctcagtcgcataaactgcccgcccaaatagtaatcgagacgcaccagagttcctccgagctggcagcagaaaatgacaagcagctcgatctgatcaactcgattgtgcaggacgagctacttaagtccacgcttgtggagcagccggtagtaaatgcggacgaggatataccgaaactggttaagatgctggagagtacagcggcggatctagatccgccaccagtgtccttgcctacgaatatttttccagctcccgagatgcagggagtgggaaatgcagctgcagccgatccgaataatataatggatacggcgaatgaggatgagattacagctgattttctccagcacgtggtcggtctcatcgaggaggacaaacagtttgaggccgaggtggttaagcaagtattggctagtacagagcccggaaccctggacgccatcgtatctatgcctacgtccattgagcccgtagacgtgccgcaagtacaggcaagtgtagaatatcctggttattgattttgctagctaactgcattgctcctttacaggcacacacgaacctactgccgaatgcaagtcttacggagcccgcacaatcgatgacctcattgccgattgcctgcagtacaccctcgaggagcgtggcagcaagcactccgcccacctccgcgaaggttgtgcgcggctacggtcgggtcatatacctgcctcccattgaagcccccaccacgcgggccaagcgacgagcacagtttccttcagctccgggcatggctgcgaccagttccagtgatgcaggcaacctgtcgtttggtgaatcttcgttggatgcgagcatcaatcagccgctcaataccagcagcctgagcaatgacagccagccgggaagtgggccgaaacgacccaatcctagagagccatcgatggccagacgttcaacggcacccagaagatcaaagaagcttgatgcaagtcagaacaatgatcccgacgcttcagagtctcaggaggatgacgatgaccccaacaagtaagattatagttggatatttcatagatgcaaatctgtgcgtttgttgaaaaccttttttgtttttttttttttttttttggtttaggctctggtgcatttgtcgtcagccacacaacaatcgtttcatgatctgctgcgatttgtgcgaggattggttccacggcacatgcgtgggggtgaccaaggcgatgggcacagatatggaaaacaagggcatcgactggaagtgccccaaatgcgttaaaaggcaggaggagagggtaaagtcatacaatagacataaagttaccttttattgattcgttatctttgtagagccaaccacgaataacagacatgttggtcaccagaccaaccactcaacctgagcagaggccgagtgaaaccaaagtactaactacgacagcagaaattgttcaggtcgcggctccttcggctcccagaagaacactaccggtggtcttaactgtagccagttcccccatgcgtattccaatggcaaagccggccaaaaagttcccaaccggtgcaatctctcaccagcagcagcagcagctgaactttatcagactgggcccatcacctggcaaacgaatttcggagacgttatgtgtggtctgcaagcgaccggcgagcacctcttccgtctattgtggcgaagagtgcatccggaagtatgcccaaagtgcaattcaagcacatgctgctaccaaaggcccattgccacagaatgccggtgctcagtctttgctgaacaactccttcgatgccaaaaagaacaagaagaaggacttgtttgaggacgtgctgaggcaagcggacactgtgtcaaaagtggaacgggtatgcaataaaggttaatttaattagaactatacaacaaataatgtgcacactttgctttgcagattaatgtgtttgagcgtaaaagtggtcgggttatcaccgggcacatggccccttctgcacatcagtttcggaaatggcttcaggagaatccctccttcgaggtgctgccctcaggaaccgttcagtcagccgacgcagagaagcgtttgctgaaaggggcaccggaagccgccacctcaacttcagaacccgccgtgctaggagttgcaaaaaagccacctgaaggtcctgccaaattgtcccatccccaaaacaccacagttcaggcaagccaccaacttggaatctcttccgtgcgtcctttggccaaaaaggataaagagaagacaacacctacagtacaggcgccaacccctaatcgtatcgcagcgggcaaacccgagccggttcgaatcggcatccggcgatcactcagggagcaactactagcgcgaatcaaagaagctcaggctgccgaggagaactctggccagccaacgactcagtggccgaccgtacttgaggtggatcagtttgtcaagaacgtggagctggaaatgttcaactcgtttggccgagacgtgggagccaagtacaaggccaagtatcgatcgcttatgttcaacataaaggatcgcaagaaccgaacgcttttcgaaaagatttgtgccaagcaagtggagcccaggcagttggtgcggatgacgccggaacagctggccagccaagagttggccaagtggcgggaggaggaaaaccgtcaccagttggatatgatcaagaaatcggagctggacttgttggcatgtgcccaaaactatgtggtgaaaacacacaagggagaggaggtaatcgccaccaaagtggatgttacgctgcccgaagagaacgttagtgaagcatcatctatggcggacacaaaacagacgtcgctggtcagtgagccgtctacctccacactggaacgttccacgtccagggaaaaggcgggttcatcgaaggaaaagcgacacaagagccacaagcatcatcatcgaaagcgcagtcgaagtcgttccaatagtcggggtcgaagcgtcgataagcgccatcgcaggcagcacaacgaaggaggagagcagccaggcagcggggagcgtgagcatagatcgcgtgagaaacagagccgggaaagggatgagatcgttccatcacccttgcccaagaagagggacgaaaacgaccaatcgccggtacccaaaaagacggcggaaaagaaaaccgaggcgagtgcttacaacttggttgatcaaattctggaatcggagaaaacagtcgagcaggcggcgaatctaggcaaaccaaagccgtcacccaagccacttccaacgcttccgagttctttgaaggcacctgagccaatggacaactactcccgctacttgcacggcctgacgacgagttcactgtggtccggtactctcaagatgatcgatttggccgacttcgaaatcgtcatgtaccccgtgcagggtaactgccatcaattgggtaacctgatgccaagtcagatggacgtaatcggtcgcataacccgcgttaatgtctgggaatatatcaagaagctaaagaagagtcccacaaaggaagtggtcattgtgaacatattccccgcctcgcccagcgaaacgtataagtttgatctcttcttcgaatacctggactcgcgtcagcgtctgggcgtcctgggcgtggactcggatcagatacgcgacttttacatattccccttgggtagcggcgataagttgccaccagcgctgcagaccgcggagccagttcccttctacgaagaagcgcaaagacccaacacgctgctcggcatcattgtgcggtgtctcagcaagcgacctgcagacgctgtgccatcgactccgtctgtgcctactccggttcccgccctcagtagcaaagtggcaaaggtaaggaaatagcaaattattccatattgaaagtatgtactattattcccctttgcagagatctcgcagctcgatctcgtacccggcgcagagcagtcccaaacgcaagatcagcacacactccaccagctccaaggacgatgagttcgatatcgatgccattatcaaggcgcccattgctaagctgcagaaaagtaagtttaacatctatacgtaagaggatgatgttaatggttttgtaccttcagctgccccgaaggtggtgccacagccatcggtgccgaacgacgccgatgaaccctactcgcctggtggctccgacgacgaactggtgccaagtgctccgcaaaggccgaacgatctggaacggcaggtgaacgaaatcaacaaacaaatagctgcgcaacaaatggaaattgccggcctgcttaaagtggagcccacagtaagtgctgacctcaggcgacgcaaaatgtttccaatccattgcattcatatccctgctcgttttttcccagggatccgcgtcctcatccaatgtgctagccgccatatcaatacccgcaaatctttcaaagatcctggccagcatcaaggacaagactaatctgccttccagtgctgatgatggagacgaggaatacaatcccgaggacgacatcaccgcaaccagttcatttggtacgtcagctgtgcttactcaaatatcaattggcattagtatcaacgattcctttcctgtagcatcgaagaagccgaggagcaaaggccgtttggcgcatctaagtgaagctgagcttcttagcatggtgccggacaatctggcaggcgtgattcccagatcgtctaggacccgccaccagcttgctcagtcgccgctcacaccaacaccactaccaccaccgccgccgccgccgggtgtttaggttacccccatccggacggacgctggctaacccgcgcgccaatccgtttttcattcttgatttgaattgccgcccgcccgcccgcctcattgtgtacattgtcattaagcaaattcaacgccatctctgtattatatctggccaatcggaattttttagttttcaaagctaaagccacaaccccatcatcccgccacaacccaacccgccccgagctccaaatggatcatccttcgcattgcaatgcaaatttagattcggtttttacattacgctctaacaaatcgtgtacatttcctccgaaaataaaaagtgctacgtaacatttgttttagggatacgataatcgtaacgctgcactttatttccaaacgcacttagttgatctcgcagggatcgtccttgccgctgaagtgggcgcatgtgatcttgggtccgttgtgtaccctgggtatggcgatccggaagagcgttccatgcggcatgcacacgcaaatcttgtactgcacactgcccgtgcggagacccagctcggagctgacgatgggaatgcggtccatgtccagaaagatacccgtgcctgcctccaggatggtggcgccctgcgtggagttgatgagaatgtggtgctcggcctgcatgtcaacgctggctccgtcgaagtagacgccctcggatcccctgatggccatgcgtccgtcgctctccagcaccagggactcgtcgatgggactgacgatgccgctggcactaaccactttggcctgcagcgcctccactccgcccggaatgttatactgcggacgatgggtggtgaaaatcggctgcttgtcgacggggtccttgacctcgaacaagttcgtggcctgcacgaggataccctccctgttcaggacgatcctatcgcgttcgctggctgctccattgccattgcggaagacgcgcacatggacgccgccctcgccgtcaccagcatcactgctgatggtcaccgggacat

SEQ ID NO: 41252 - DNA, 6051 bp, DROSOPHILA
atgtccagttcggtgtttacggaggcgcccagcgcccggccggcggcagccgaagccgactccaatctggttgtggtctacagcaagagcggaatctccttcgacgagcgtgcgattgggaacatcatggaggaaaaatcgatttccaccattagcgtggtgcggattacatcgcccacgccgagcatggtggaccaagaggaagacgaacggctggaggagctggcgaactttatggaaactgccaccgactcggagctggacagtgacaatggcagccaaagtggtggcgataatgccagtgagatggatgaacacgacgaggagaaccataacaccggtgacgacaacaatagcgactccacggagacggaagccgatgccccgcgcacacgcaagcgagttggccgaaagcccaaggccatcaaaaagcgaaagcgacgcaaacccaaggagcgtccacaaattgtgggtttgcgagtggagcagttttatgcggacaacacggctgatatggttgtgaaaaatgcactgaagcttgccggagtttccgtctacaaaaggactgcggagacagacgctcttatggaagttattcgaaatgaccacaactacacaccgtttacctcgccagagcagctgaagaaccacaagcgcgatgagaagatggccatggaaatgcaggcccaaagccgcaaaatcataatgcaggcaccgggcagtgtcaagctaatcaatgccaaaaaacgagtccaggccatacccttaagcccggtgcaggtcaaggtccagagactgccagtcaagccccaccaagttcagcaggcagcgcagctgcaaccgaaagtgcagctgatccgcaagcccatccattcgccactgccaagacagaagccagagattatcgcgaacaattcggtcaatgccaggctgaggcccactcgtgctccagtcaaagtgattgctccgcctgtgcaggaatacatcgaagatgatgatgacgcccaaagctcggattccgccgaagaggaaaatgccgacaaggcctatgattcggaggaaatgagtgaggagagcgatgagttccaggaatcggacaacgacagggacagtgacatggacttcgatatgaggcatagcaatagacgtaatccgaataagaggaagcgggttagaaaggtggttaggcagactcccagcaaaccaatgaagccgctgcctccgccacccacaacgccgcagcacttccccgagctgaagaaacgcaaggaagttttggagccgaaggcgccgcaaattgggcaaataatccagatgcctgccacaaaatcagtgcccgcagtgtttgccctaggcagaggtcttccaagcacatcgtttctcaaaatccggcccacacatcaatcgctgcctgtgaagagacctccactgccaacgacaccggccaattccaatgttcgtcgtatgcctgccgtgcaattgggaaggatcgtaaactcgccgcaggaagttaaagagattattatcaacaagaatatggccagtcccaaaggagtgtttaccaatctcaacactttgctgggtgaggacaacaatgcagccacaaaatcttcgccagttccactccgacaccgggccgtcatgtcgccaagcacgccgagatcgagctacaatcagcagatgtcgccaattgtggttccggttcctgctcaggcacataccccatccaagggcttcatgcccatcggcgtggacacagctcagtcgcataaactgcccgcccaaatagtaatcgagacgcaccagagttcctccgagctggcagcagaaaatgacaagcagctcgatctgatcaactcgattgtgcaggacgagctacttaagtccacgcttgtggagcagccggtagtaaatgcggacgaggatataccgaaactggttaagatgctggagagtacagcggcggatctagatccgccaccagtgtccttgcctacgaatatttttccagctcccgagatgcagggagtgggaaatgcagctgcagccgatccgaataatataatggatacggcgaatgaggatgagattacagctgattttctccagcacgtggtcggtctcatcgaggaggacaaacagtttgaggccgaggtggttaagcaagtattggctagtacagagcccggaaccctggacgccatcgtatctatgcctacgtccattgagcccgtagacgtgccgcaagcacacacgaacctactgccgaatgcaagtcttacggagcccgcacaatcgatgacctcattgccgattgcctgcagtacaccctcgaggagcgtggcagcaagcactccgcccacctccgcgaaggttgtgcgcggctacggtcgggtcatatacctgcctcccattgaagcccccaccacgcgggccaagcgacgagcacagtttccttcagctccgggcatggctgcgaccagttccagtgatgcaggcaacctgtcgtttggtgaatcttcgttggatgcgagcatcaatcagccgctcaataccagcagcctgagcaatgacagccagccgggaagtgggccgaaacgacccaatcctagagagccatcgatggccagacgttcaacggcacccagaagatcaaagaagcttgatgcaagtcagaacaatgatcccgacgcttcagagtctcaggaggatgacgatgaccccaacaagctctggtgcatttgtcgtcagccacacaacaatcgtttcatgatctgctgcgatttgtgcgaggattggttccacggcacatgcgtgggggtgaccaaggcgatgggcacagatatggaaaacaagggcatcgactggaagtgccccaaatgcgttaaaaggcaggaggagaggagccaaccacgaataacagacatgttggtcaccagaccaaccactcaacctgagcagaggccgagtgaaaccaaagtactaactacgacagcagaaattgttcaggtcgcggctccttcggctcccagaagaacactaccggtggtcttaactgtagccagttcccccatgcgtattccaatggcaaagccggccaaaaagttcccaaccggtgcaatctctcaccagcagcagcagcagctgaactttatcagactgggcccatcacctggcaaacgaatttcggagacgttatgtgtggtctgcaagcgaccggcgagcacctcttccgtctattgtggcgaagagtgcatccggaagtatgcccaaagtgcaattcaagcacatgctgctaccaaaggcccattgccacagaatgccggtgctcagtctttgctgaacaactccttcgatgccaaaaagaacaagaagaaggacttgtttgaggacgtgctgaggcaagcggacactgtgtcaaaagtggaacggattaatgtgtttgagcgtaaaagtggtcgggttatcaccgggcacatggccccttctgcacatcagtttcggaaatggcttcaggagaatccctccttcgaggtgctgccctcaggaaccgttcagtcagccgacgcagagaagcgtttgctgaaaggggcaccggaagccgccacctcaacttcagaacccgccgtgctaggagttgcaaaaaagccacctgaaggtcctgccaaattgtcccatccccaaaacaccacagttcaggcaagccaccaacttggaatctcttccgtgcgtcctttggccaaaaaggataaagagaagacaacacctacagtacaggcgccaacccctaatcgtatcgcagcgggcaaacccgagccggttcgaatcggcatccggcgatcactcagggagcaactactagcgcgaatcaaagaagctcaggctgccgaggagaactctggccagccaacgactcagtggccgaccgtacttgaggtggatcagtttgtcaagaacgtggagctggaaatgttcaactcgtttggccgagacgtgggagccaagtacaaggccaagtatcgatcgcttatgttcaacataaaggatcgcaagaaccgaacgcttttcgaaaagatttgtgccaagcaagtggagcccaggcagttggtgcggatgacgccggaacagctggccagccaagagttggccaagtggcgggaggaggaaaaccgtcaccagttggatatgatcaagaaatcggagctggacttgttggcatgtgcccaaaactatgtggtgaaaacacacaagggagaggaggtaatcgccaccaaagtggatgttacgctgcccgaagagaacgttagtgaagcatcatctatggcggacacaaaacagacgtcgctggtcagtgagccgtctacctccacactggaacgttccacgtccagggaaaaggcgggttcatcgaaggaaaagcgacacaagagccacaagcatcatcatcgaaagcgcagtcgaagtcgttccaatagtcggggtcgaagcgtcgataagcgccatcgcaggcagcacaacgaaggaggagagcagccaggcagcggggagcgtgagcatagatcgcgtgagaaacagagccgggaaagggatgagatcgttccatcacccttgcccaagaagagggacgaaaacgaccaatcgccggtacccaaaaagacggcggaaaagaaaaccgaggcgagtgcttacaacttggttgatcaaattctggaatcggagaaaacagtcgagcaggcggcgaatctaggcaaaccaaagccgtcacccaagccacttccaacgcttccgagttctttgaaggcacctgagccaatggacaactactcccgctacttgcacggcctgacgacgagttcactgtggtccggtactctcaagatgatcgatttggccgacttcgaaatcgtcatgtaccccgtgcagggtaactgccatcaattgggtaacctgatgccaagtcagatggacgtaatcggtcgcataacccgcgttaatgtctgggaatatatcaagaagctaaagaagagtcccacaaaggaagtggtcattgtgaacatattccccgcctcgcccagcgaaacgtataagtttgatctcttcttcgaatacctggactcgcgtcagcgtctgggcgtcctgggcgtggactcggatcagatacgcgacttttacatattccccttgggtagcggcgataagttgccaccagcgctgcagaccgcggagccagttcccttctacgaagaagcgcaaagacccaacacgctgctcggcatcattgtgcggtgtctcagcaagcgacctgcagacgctgtgccatcgactccgtctgtgcctactccggttcccgccctcagtagcaaagtggcaaagagatctcgcagctcgatctcgtacccggcgcagagcagtcccaaacgcaagatcagcacacactccaccagctccaaggacgatgagttcgatatcgatgccattatcaaggcgcccattgctaagctgcagaaaactgccccgaaggtggtgccacagccatcggtgccgaacgacgccgatgaaccctactcgcctggtggctccgacgacgaactggtgccaagtgctccgcaaaggccgaacgatctggaacggcaggtgaacgaaatcaacaaacaaatagctgcgcaacaaatggaaattgccggcctgcttaaagtggagcccacaggatccgcgtcctcatccaatgtgctagccgccatatcaatacccgcaaatctttcaaagatcctggccagcatcaaggacaagactaatctgccttccagtgctgatgatggagacgaggaatacaatcccgaggacgacatcaccgcaaccagttcatttgcatcgaagaagccgaggagcaaaggccgtttggcgcatctaagtgaagctgagcttcttagcatggtgccggacaatctggcaggcgtgattcccagatcgtctaggacccgccaccagcttgctcagtcgccgctcacaccaacaccactaccaccaccgccgccgccgccgggtgtttag

SEQ ID NO: 41253 - protein, 2016 aa, DROSOPHILA
MSSSVFTEAPSARPAAAEADSNLVVVYSKSGISFDERAIGNIMEEKSISTISVVRITSPTPSMVDQEEDERLEELANFMETATDSELDSDNGSQSGGDNASEMDEHDEENHNTGDDNNSDSTETEADAPRTRKRVGRKPKAIKKRKRRKPKERPQIVGLRVEQFYADNTADMVVKNALKLAGVSVYKRTAETDALMEVIRNDHNYTPFTSPEQLKNHKRDEKMAMEMQAQSRKIIMQAPGSVKLINAKKRVQAIPLSPVQVKVQRLPVKPHQVQQAAQLQPKVQLIRKPIHSPLPRQKPEIIANNSVNARLRPTRAPVKVIAPPVQEYIEDDDDAQSSDSAEEENADKAYDSEEMSEESDEFQESDNDRDSDMDFDMRHSNRRNPNKRKRVRKVVRQTPSKPMKPLPPPPTTPQHFPELKKRKEVLEPKAPQIGQIIQMPATKSVPAVFALGRGLPSTSFLKIRPTHQSLPVKRPPLPTTPANSNVRRMPAVQLGRIVNSPQEVKEIIINKNMASPKGVFTNLNTLLGEDNNAATKSSPVPLRHRAVMSPSTPRSSYNQQMSPIVVPVPAQAHTPSKGFMPIGVDTAQSHKLPAQIVIETHQSSSELAAENDKQLDLINSIVQDELLKSTLVEQPVVNADEDIPKLVKMLESTAADLDPPPVSLPTNIFPAPEMQGVGNAAAADPNNIMDTANEDEITADFLQHVVGLIEEDKQFEAEVVKQVLASTEPGTLDAIVSMPTSIEPVDVPQAHTNLLPNASLTEPAQSMTSLPIACSTPSRSVAASTPPTSAKVVRGYGRVIYLPPIEAPTTRAKRRAQFPSAPGMAATSSSDAGNLSFGESSLDASINQPLNTSSLSNDSQPGSGPKRPNPREPSMARRSTAPRRSKKLDASQNNDPDASESQEDDDDPNKLWCICRQPHNNRFMICCDLCEDWFHGTCVGVTKAMGTDMENKGIDWKCPKCVKRQEERSQPRITDMLVTRPTTQPEQRPSETKVLTTTAEIVQVAAPSAPRRTLPVVLTVASSPMRIPMAKPAKKFPTGAISHQQQQQLNFIRLGPSPGKRISETLCVVCKRPASTSSVYCGEECIRKYAQSAIQAHAATKGPLPQNAGAQSLLNNSFDAKKNKKKDLFEDVLRQADTVSKVERINVFERKSGRVITGHMAPSAHQFRKWLQENPSFEVLPSGTVQSADAEKRLLKGAPEAATSTSEPAVLGVAKKPPEGPAKLSHPQNTTVQASHQLGISSVRPLAKKDKEKTTPTVQAPTPNRIAAGKPEPVRIGIRRSLREQLLARIKEAQAAEENSGQPTTQWPTVLEVDQFVKNVELEMFNSFGRDVGAKYKAKYRSLMFNIKDRKNRTLFEKICAKQVEPRQLVRMTPEQLASQELAKWREEENRHQLDMIKKSELDLLACAQNYVVKTHKGEEVIATKVDVTLPEENVSEASSMADTKQTSLVSEPSTSTLERSTSREKAGSSKEKRHKSHKHHHRKRSRSRSNSRGRSVDKRHRRQHNEGGEQPGSGEREHRSREKQSRERDEIVPSPLPKKRDENDQSPVPKKTAEKKTEASAYNLVDQILESEKTVEQAANLGKPKPSPKPLPTLPSSLKAPEPMDNYSRYLHGLTTSSLWSGTLKMIDLADFEIVMYPVQGNCHQLGNLMPSQMDVIGRITRVNVWEYIKKLKKSPTKEVVIVNIFPASPSETYKFDLFFEYLDSRQRLGVLGVDSDQIRDFYIFPLGSGDKLPPALQTAEPVPFYEEAQRPNTLLGIIVRCLSKRPADAVPSTPSVPTPVPALSSKVAKRSRSSISYPAQSSPKRKISTHSTSSKDDEFDIDAIIKAPIAKLQKTAPKVVPQPSVPNDADEPYSPGGSDDELVPSAPQRPNDLERQVNEINKQIAAQQMEIAGLLKVEPTGSASSSNVLAAISIPANLSKILASIKDKTNLPSSADDGDEEYNPEDDITATSSFASKKPRSKGRLAHLSEAELLSMVPDNLAGVIPRSSRTRHQLAQSPLTPTPLPPPPPPPGV

SEQ ID NO: 41254 - DNA, 2467 bp, DROSOPHILA
gcagccagccacacacacacacacgttctcgtacattactgggattccatcaaaagtttttaaaagttcaccatgttctatggaaaatgtttttatatttttttttttgcattcattctataagcagttgacggaatttcaccaactaattgataataacataggtactgctgcttgcagagctaaatttttgatgcaaaaaccaaacagtcgagttaaaatgaatttgtaaatcaagcagagctaaaataaatgtatgtacgtatacttataaatgtgttgatttcctggggcgctaacccaacaactgaatcggaaatgtgccatacaaatgtttacttaaattataagtgcccggagtggagtctaattaactaggaaacgttccttcgagcggtgtggtatggtaattggttgttcaaattggacgggaacgaaatgaaatcaccaaaataggtgggaaatacacaatatttaatacaaatagatgggttcatatattttcatacgaacatcgtgttttagttaaaagttaatcgaacttgcaaagtgagttttaggcccaattaaaaaagttttaaccaataaaatcgctttttggaccacagtacaaatgaaatcaatcaaatatccaagttttccaccaatcgataccagcagattaagcatccatattgccacacttctggaactatcgatagtatcgcataaacagtgttttgtaccaactctaggcggaaggcgcagcggtgataaaagagaaaaagtgatctttaaatgcaatttttcggttccaaattgcatttgttatgtgctacgcgataagcaccgcatcgcacaccgtttttcgaagttcgcaaatggccaagatcagcggaaagacgagaaaacacgctgcaatgtagatgcccacgagcagccgcggcagcagcaataacaaaagcaaaagtgaaattagcgccgccagagaagtgcaagtggtcaaacaaacggcggcgccatggagaacctcaagataagcgacaaactgttcgaggatgtgatatactttgtgctgggaaatctggacgaggaggtaaaaagctgcaaagcgaatctttcgtttgctgttgctgtacttgcattgtgcgtacgtgtgtgtgtgtttgtgtgagcgggtgtgcgtgcgtctcacagggtgggttggagcgcgggcggacagggtaacccgggcaccttggcaaatgcgcgccataaaagttgccggcaaattgccgtgtttgtgtgtttgtgtactggagtttgtattggtgctaaatcaactgatttttgttttggttctcctctaccaacggaagcaacatatttggcacccttgaaaaaagaattcttatttggtcacatacatatatcttttatatatactgtttaaatcaagtaatgtaataaataattattatgcctttgccttgcagatcgaacgctttcttaagagcggtggcgctcaatcgaaactgttcctgtcggaccaaatcacccacatgatatgcgccaccaactacaacgaggaggagctgtccatgaacctggacctctacagtgcaattcccgtaacggagcaatggatcgtgcacagcgccaagctaggccgaatggcctcgacacgggctttcgacccgagtccgaatcaaatgcggttgatgcgcggcattcgggtggccatcaccaatgtagtggcaggggatcgaaggcgtctttacgccatgctgacataccacggtgccgtagtcacgcacagctttggggccaccaacacgcatctggtgtgcggtgcagccaacggtggcatctacaacaaggcgctggccctgcccaagaatgccatcattattgtgacgcccgactgggtgacagatagccttaagtacaaaaactgcatgcccgtggagacgtatcatccgagactgctgaagcccattgaaaagcagcgaacacaaaagcagcaggctacgcagcagcaacaaattcagcagcagcagcaattgcagcaccaacaccagatgcagcaacaacagcagcagcagcagcagcagcaacaacaacaacaacaacaacaacaacaacaacaacaacaacaacaacaacagcagcagcagcagcagcagcaacatcaacagcagattatccagcaacaggcaacggctacttctgccctatctgacatccttggctttggcgaggacagcgtagctgccaagagcatcgctagcattaagtctcagctgcaggcttcagctgaacaaatacagcagcaacagctgcccgtaccctgcacagcagcaggtggtctttgtgcgcccacagccacaaccccaacagccagcacaacaatcccctcaccagttacagcaaggtggtcctcaagcacctactcctgcaccacacccgcagcatcaacaacaattaataattcagcagcagaagatat

SEQ ID NO: 41255 - DNA, 978 bp, DROSOPHILA
atggagaacctcaagataagcgacaaactgttcgaggatgtgatatactttgtgctgggaaatctggacgaggagatcgaacgctttcttaagagcggtggcgctcaatcgaaactgttcctgtcggaccaaatcacccacatgatatgcgccaccaactacaacgaggaggagctgtccatgaacctggacctctacagtgcaattcccgtaacggagcaatggatcgtgcacagcgccaagctaggccgaatggcctcgacacgggctttcgacccgagtccgaatcaaatgcggttgatgcgcggcattcgggtggccatcaccaatgtagtggcaggggatcgaaggcgtctttacgccatgctgacataccacggtgccgtagtcacgcacagctttggggccaccaacacgcatctggtgtgcggtgcagccaacggtggcatctacaacaaggcgctggccctgcccaagaatgccatcattattgtgacgcccgactgggtgacagatagccttaagtacaaaaactgcatgcccgtggagacgtatcatccgagactgctgaagcccattgaaaagcagcgaacacaaaagcagcaggctacgcagcagcaacaaattcagcagcagcagcaattgcagcaccaacaccagatgcagcaacaacagcagcagcagcagcagcagcaacaacaacaacaacaacaacaacaacaacaacaacaacaacaacaacaacagcagcagcagcagcagcagcaacatcaacagcagattatccagcaacaggcaacggctacttctgccctatctgacatccttggctttggcgaggacagcgtagctgccaagagcatcgctagcattaaccacaaccccaacagccagcacaacaatcccctcaccagttacagcaaggtggtcctcaagcacctactcctgcaccacacccgcagcatcaacaacaattaa

SEQ ID NO: 41256 - protein, 325 aa, DROSOPHILA
MENLKISDKLFEDVIYFVLGNLDEEIERFLKSGGAQSKLFLSDQITHMICATNYNEEELSMNLDLYSAIPVTEQWIVHSAKLGRMASTRAFDPSPNQMRLMRGIRVAITNVVAGDRRRLYAMLTYHGAVVTHSFGATNTHLVCGAANGGIYNKALALPKNAIIIVTPDWVTDSLKYKNCMPVETYHPRLLKPIEKQRTQKQQATQQQQIQQQQQLQHQHQMQQQQQQQQQQQQQQQQQQQQQQQQQQQQQQQQQQQHQQQIIQQQATATSALSDILGFGEDSVAAKSIASINHNPNSQHNNPLTSYSKVVLKHLLLHHTRSINNN

SEQ ID NO: 41257 - DNA, 5289 bp, DROSOPHILA
cttcatggttaacaattagatatagttttacttgtatgttatgttacttgtatatatgtaacatcaaacgcaatgggcttaacggatgaaaattatgatatgggttttgcaagctttttaaatttgctttttaatacttgtgcaaaaagcatggtccatgtgaggtacaattgatgctttataacactttaacacttcgcttaacttttcctgcaaattggactttataatacgcaaggtggatcaaagctttattaaaatctatattttttcaacgtctttttatatatatggtataaatatcaattctaagcatttaggtcgcataataaaatttacttaacatttcattatagattcaaagataagacttcgtttctgataagagaagaatagtgtcttttaatttaaagtttttgtttggttgttaacatgtcatttttataaaattttagaactaggcgtaataatatataaaatgtattgttgatcccttgggcttaaactttttatggttagataaacaagtaacgtttatgcttattggcctatacatttatttaaagcgctggattttcgaaagtataaatttgacgtaacgtttatggcttaatccttaaatcttctgcagcttatgacacttttaactccattgttattaaagtctcaacatagcttatagatattttctattaatacaaattatttaaatcaaaagcgtaggggaatggccagtagattttttaagtattgattttgctttcgcagagatcttaatattcataatttttgcctctaattcgatttcatctttggtagttttgacttgactttatataaatgttaacactcgctttcactacatatggtatgtataaaattatgacttaaaagcaaatgagccttaaatgcttcatgtacattaaattaaattcgagctgagaactttgcccaaaaaaacaataatgctactttgttgatcatcttctggtatttgaccttaggacttcttaggatcgattactttggactcacagtccgtgggatcgatgtcgtgttccacaaccagcgtgttctttgagatcttgtcggccaggagggtgacaggatctgtggctgttttagccacggaaggtctgccagtcgaacgcctcctgatgttttcgtcctgctgctcctttctatgcagatcactcagcctgaacgcttccaggaattcgttcaagtccactttgccatctccgttgaggtccatcattctgcacttctccagcatttccgccttggaataggcacccggcatatgggccaccagcaagtcaatcgcagtttcgaactcatctagggtaatttcgcctggaaattacacatatataatttatgagattcggaatcgtgaagtcgtcttcttgcttacctgaattatcggcatcaattatattaaaaatggcaactaggctggctttgttggcatacaaagcatccattactgacatgccatcagcctcagcttcgagctaaaaagtgaatagaataaataaaaaatcattgtgtggctgcacttacaataacatccgtgtccagcagatccaacgtcctattatagttaaccttttgactatccgtgcctggtgccagtttatcgcgtaggagtctccagggcagccccaacttggtcacgttctccattaccttgcaccagtgcgatatggatatatagccgctatccttgggatcatacttccggaactcgtcctccaactcgtcccgatggtcgcgcatacgcaccgccaactccttgagtgccgaactctccacgatgcccattcgctgtttgaaggataatcgcttggtctgcgatgccgccgatatgtactgaacgaaatggggcatcagctggttgttaagccggatgtaggcgcccttgttggatccaatggcatagtagttcgaggccgaaaatattgtaattatctgtggaggaaggggttcaagagaattcaagaatgagaacgtgacagttaagcccataaagggaaattaaaataccgcacaactcattcaaccgacagatgttgcacgtctaaactaacaacaaaatcaatacacttatggccgcgtttaattattattattcaaccgcaatgtttccattatcgactaattgactatgcacgttaattgcaattgcatgactgacaagtcaaaggaagtggttgggtgggagttgggggaaattgtggatatggtggggggcattcaaaatagtcctttcaaataaacaaaataattgattcgcatgaacccaccttgttgtcatgcataaactcatggccattgggcttgcattcgtgcgatcgaatgacgtagctgagtcgatgtctttgcagaaagttgtcagtcacatccggtccaaaccacacgccagctcctcgcaaagtgttcggaacacatcccatggtggcctgcgggtcactccacattatgtcgaagatctgcaatggcacgtgctagatgtatgtacgtttcaataaactatcttattccgcaaaatacctgctgccactcggttttgtccagtggttcgccatccgtaagtggcggtcgcaaaatggacacgtactgtgagttttaaagagattgaaaactaaaaatcaattccttcatgccatttgtagagtaaatttacctttcccctatcgatactctttattagatccaggcttgtgctgtccgagaagcctccatgcacgattaggactctactattgagaacggagcccaggggaagccatcggtagacctcgtcgatgaaggccaggattcgcttgtgattccgctgcggaaataatggtatattaattaagatcatgaacagtttccgcttcgtagattaccaataagttctaaccattatatatttgcaaacattttaaaaggtgctcaagagtatgtaacattatcttttacaactgaaaacactttgtgtgctacttacgggatacttgctttccacctcccggataaatccatatcgcgcattcataacactatcctcgtggtttccgcggttgaggaaaactgcgttgggaaaagccaagtaaagggagagcagcaggagcaggacctccaagccacgcttgcccctgtccacgaagtctccattgaacacgtagggattggaagatgagggaagaccgttctgcaaatcgggatctattataaatatttaattaccacttcaaggaggtatcaccaccttatgcagcaccacaagaagatcgtccaattttccatgtagatccccgcaaaccgtaacttgttgggaaaccgccgtggacaccggagaaatattgggcagctgctttagcgatttggcagcttcgcgtagaatcagggccacatacttgggatgcaatcggttgccctaaaaagtaatttatgttcagctgaatattgaaaatagcttggttattttcatatatcttacccgtttcttgcggaagacgtcaatcaatagatcgatatgattttttcgtattggcaactcaattttggcattcacaatgtccccaaactcttcgacgagatcgtccttatcatccaagacggaaacttttcattaaaatatgtgataattaaatggaatatttttcaatatatagtaaattatctttaaattatgctcaaaaataataacacaaattttgagatatccattttgcgatgtttgaaacattaataaattcctttttaaatagcatgcccaacattgcttgacaaatagaggtttccaagtactttagcaccctgacagtattccgtagcgattattggagggattagcgagactcaccatgggcggatccttggtactgattcttcctgcccgccgcctggggcatgtgcttgatgaggtcattgaagaatttgtatagctgggggcaagcaaacagagggaatagaaataaattagctatgagtgggtcaacaatgcacttgcgacaaagtttcacggctgagttgattgctatcgacttttgaaactctacaaatgcactcgactggcgtcgtcgtcgtcgagggttcatctttggcttttcttcgacggctgtcttaagcctcctcccatcactaactatatgtgcatcctggactcacctcagcctggtcctgttcgctggcgtactccaggttctggaagatctgccagttgcaacgcctctgcatttcgcgacgggcctgatgcctgcgataccatttctggatgaagattgccgctcggatagctgcaaatggaaaatgttttggcaaactttaagactcaacttgaggagcaataagccttctcaggggggggggggggggggttgttgtgtgtttccaaaaaacatcgagtagctctgagttatatgcaacatggcgaagtactcttttcatggccaataaagctagtggattaatatgtttttttttttggctgccaagttattccctttggcattttcgcgtcggtcgcttattactcgcagcacacacacacaacgcagtacacagtacacttagcgaaatacatattttaatcgggggaactttaatcggactggagctcgaggtcgggggacttgggaatgcgaaatgattactcccacaaagtacttgccgttctcatccattttgatgcaaatttattcgtctgctattaacacaatgctgaaaacgtcaaagactgtggcaaggggatagagaggggttgagtgggatttttttgggctaacaactggttaacatttacgcagctataattatattttgcagccgctttaaagtctttacacacttgtctctagatctggtggcgtaggtggccctttatgcttttttaaatttatgcaacccatgagaaggggcctcaaattaacgcttcgaaatccgctgaaactgctaaccgaaaggacgagtttaataattataaacatcaaagtctagaaaaacattaaatataagtacagcattctagaatcacttttaagcccattaagccaaattacttttggccatattacatttaatttgcaaataattagttttcacgtgcaacacatttaattgaatgtaagataatttattttgttattaagcggttattgattttccatttgataagcctttaattatgagtaattagtagactgttgcgtagaatttttaacttttaaccacgaatgttccctatatgtatatttgccactaccccagaaagaaaggactttcgaccacgagctgctt

SEQ ID NO: 41258 - DNA, 1973 bp, DROSOPHILA
ctatccgagcggcaatcttcatccagaaatggtatcgcaggcatcaggcccgtcgcgaaatgcagaggcgttgcaactggcagatcttccagaacctggagtacgccagcgaacaggaccaggctgagctatacaaattcttcaatgacctcatcaagcacatgccccaggcggcgggcaggaagaatcagtaccaaggatccgcccatgtttccgtcttggatgataaggacgatctcgtcgaagagtttggggacattgtgaatgccaaaattgagttgccaatacgaaaaaatcatatcgatctattgattgacgtcttccgcaagaaacggggcaaccgattgcatcccaagtatgtggccctgattctacgcgaagctgccaaatcgctaaagcagctgcccaatatttctccggtgtccacggcggtttcccaacaagttacggtttgcggggatctacatggaaaattggacgatcttcttgtggtgctgcataagaacggtcttccctcatcttccaatccctacgtgttcaatggagacttcgtggacaggggcaagcgtggcttggaggtcctgctcctgctgctctccctttacttggcttttcccaacgcagttttcctcaaccgcggaaaccacgaggatagtgttatgaatgcgcgatatggatttatccgggaggtggaaagcaagtatccccggaatcacaagcgaatcctggccttcatcgacgaggtctaccgatggcttcccctgggctccgttctcaatagtagagtcctaatcgtgcatggaggcttctcggacagcacaagcctggatctaataaagagtatcgataggggaaagtacgtgtccattttgcgaccgccacttacggatggcgaaccactggacaaaaccgagtggcagcagatcttcgacataatgtggagtgacccgcaggccaccatgggatgtgttccgaacactttgcgaggagctggcgtgtggtttggaccggatgtgactgacaactttctgcaaagacatcgactcagctacgtcattcgatcgcacgaatgcaagcccaatggccatgagtttatgcatgacaacaagataattacaatattttcggcctcgaactactatgccattggatccaacaagggcgcctacatccggcttaacaaccagctgatgccccatttcgttcagtacatatcggcggcatcgcagaccaagcgattatccttcaaacagcgaatgggcatcgtggagagttcggcactcaaggagttggcggtgcgtatgcgcgaccatcgggacgagttggaggacgagttccggaagtatgatcccaaggatagcggctatatatccatatcgcactggtgcaaggtaatggagaacgtgaccaagttggggctgccctggagactcctacgcgataaactggcaccaggcacggatagtcaaaaggttaactataataggacgttggatctgctggacacggatgttattctcgaagctgaggctgatggcatgtcagtaatggatgctttgtatgccaacaaagccagcctagttgccatttttaatataattgatgccgataattcaggcgaaattaccctagatgagttcgaaactgcgattgacttgctggtggcccatatgccgggtgcctattccaaggcggaaatgctggagaagtgcagaatgatggacctcaacggagatggcaaagtggacttgaacgaattcctggaagcgttcaggctgagtgatctgcatagaaaggagcagcaggacgaaaacatcaggaggcgttcgactggcagaccttccgtggctaaaacagccacagatcctgtcaccctcctggccgacaagatctcaaagaacacgctggttgtggaacacgacatcgatcccacggactgtgagtccaaagtaatcgatcctaagaagtcctaa

SEQ ID NO: 41259 - protein, 637 aa, DROSOPHILA
MQRRCNWQIFQNLEYASEQDQAELYKFFNDLIKHMPQAAGRKNQYQGSAHVSVLDDKDDLVEEFGDIVNAKIELPIRKNHIDLLIDVFRKKRGNRLHPKYVALILREAAKSLKQLPNISPVSTAVSQQVTVCGDLHGKLDDLLVVLHKNGLPSSSNPYVFNGDFVDRGKRGLEVLLLLLSLYLAFPNAVFLNRGNHEDSVMNARYGFIREVESKYPRNHKRILAFIDEVYRWLPLGSVLNSRVLIVHGGFSDSTSLDLIKSIDRGKYVSILRPPLTDGEPLDKTEWQQIFDIMWSDPQATMGCVPNTLRGAGVWFGPDVTDNFLQRHRLSYVIRSHECKPNGHEFMHDNKIITIFSASNYYAIGSNKGAYIRLNNQLMPHFVQYISAASQTKRLSFKQRMGIVESSALKELAVRMRDHRDELEDEFRKYDPKDSGYISISHWCKVMENVTKLGLPWRLLRDKLAPGTDSQKVNYNRTLDLLDTDVILEAEADGMSVMDALYANKASLVAIFNIIDADNSGEITLDEFETAIDLLVAHMPGAYSKAEMLEKCRMMDLNGDGKVDLNEFLEAFRLSDLHRKEQQDENIRRRSTGRPSVAKTATDPVTLLADKISKNTLVVEHDIDPTDCESKVIDPKKS

SEQ ID NO: 41260 - DNA, 8004 bp, DROSOPHILA
gcggccgaggcgaaaaggcgcagcctgggatccaccgaccacgatcatggtggaactggtcaaggtgccgacggcgtgggagtcactccgtccgctactctcaacgagtcgtctgttcatctgctaaacgatctctgctggtttactaaggaggctggcgcctgcataatcaacgctttaattattaaactggacaggatcgaggagtcggaatctcattgagcgcacaacaccatactcgcagtagtcacgcctgtccctatattcaccacattttaatcccgctcagcagctacccacaccaaatcgcagtcgcattcctctttgtaaacgagtttgtatttgtattgtaagctctaataaaattatcgcaaagttaatacagattacaaatttattggtaatgaaccaaaccaaagcacatacaaaactttcggttcattgatactaaacaatttctttcacaaacaatcccaaaaattaaaacactagagtaagaacagaaatgcatgattggaattatcattgtttttatttgattattttaattccattcatttagtgtcgctttgttgattttgttattcaaatatatgaaaaatggtcgattagaaattgttttagggttgtgtttatgtttctgtttctgtttcgttttgtatcatcaacacggcagcagcagaagtaaaggattcatcctcgccagttctatctttttctaccactctcgcccacatccgttttactgatttttgtatacagccgcggccgcagaagcattttatcaaattactcttacacttgtaggttggttgtttgcattttgtttgttatgtttattttgttgtattctctgctagtcctgaagcaagtgcatatacaaatatgttgattcatatatgtttaccgtttaagttatcgttattattattatcattaatcgttagccaataccgctgatagccgggaacaaccggatatcggaatgagcctaatgggctcactccacttccatggagggatcgtttccggccgcgctctggccattgttatccacatccattttgtcgccagaattggccgctggctcgccgccattctgttccgcattcgcctcgtccttgggcggtgttgctgtcttggccggagttggcttcggtttcgccctgttgatcaccgaactgacgcacgaatttagagtttgcacctcttggcgcacggcggaaatctggacgggactgtcagcggtgcgcggcgactgtgtgaacttgggcagatttgcatccagccacgattgcgctttgtccgccgtctccgagatgttgatgaactcggtttccgttagatgatcgtacttgggcacacccttgcggaactcggccactgccagacgtgcaatggcaatgctgttcttcagctcatcaaatgcagctggtccctgctcatagtcgctggcgcgtagcttgatgggatccgtcttctggtgcagggcctgcaggcggctggtatagatgtcacgctcgcagtcctcgccatcctcgtacagccagttctcgagatcatttaactgcgacacgattttctcgcgctcagcctcaaccacgtatcgctcgaagggtccaccctgcaaaagagatggggcaagttttagatttaagaacttacaagaaagggatttcgagttcctggctatgccatgttggattagttacctgcagtttgttgcgcatatcgtagacgaactcctccaaggcattcttggcatcaatgcgttccgtttccttctgatcgttgccaatcatttttgactcttgctgtgtgtagttgctcaggtcgacggggctgaagccgtgtgtggtgcactccagcggcaattcggtggctttggaagccttcttctttttatcagcgccctgggcagcaaaagaaaggcaaatgattaatcgaaatgcataaacaaaatagttacaaagagttcaattcaacttttccaatagaaagagaaaattggagcggcaacaagacatcaacaataaagcgaagaggaataacagctccaagcgacagcctacaatatgagcacaatacattttcgtgggtgtttgttgtaagcagttcatatgagtaactgcgggtattggttttttttttaaatttgaaacaagggcgcgcttttttctcaggtgtgtttgaaataataaaaaataaaataaagcttttggatacaataaaataagatggcaaattgtgtaagatttttttttttaatacatttgttttttgttgggagcacatagggtaggcggcttatgagcggtcttcatcattcgtttcatttttggtggaaaatattaaacttaaaaatttcaaaaaccacaaaacggttagattcgtgcttttcaattttgtagtacatttcgttaatcaaaatttccaatatcttggcacacaaatatgggagcaaaaaattcagatttagcgtttttatttttctttttttgttggttttgtttttgaattgaaatttgagaaatttgaggaaaacgtaccgaaccaaaccagcccttgacccgctgtgcccacccttgtccgccaggtgatgaggctgttgatgtattattatcatcctcattctcacaatatgcctacgagagatcaaaacgcgcgcgttcgcaaacatatccaaaacaaacaaaaacaaatattgcagtggtatatttataaaaatgaatgatttatatcaaaaacacgttcgtatatacgtataattcaaacaagagcgctacagctccggtttttcgcatgtccgattatggtaacgatcgaaaatcttaatgagcaattatattgatgattgaagccggtaaaaatcatattttactgacttatcaaagtacaaaaactaaattgatttgccattccaaatttaatctttcctaaccagacatggaaaaccgaaacttattaaggaattagtccagaaatgcgacaataggaattgagttagtttccgcattttcatggtgcttttctttttttttttttcaactaaaatcttccttgcaattttgcttcaatagtttaccacgaatgtgtgaaaaccaatcttgaaaattcaattacacaatttaaagctattttatgttaaagatgagctttatgaagtgaactataaaaagataaaagtttagcactagaaactaaacgctggtttgataacaaaagccaaaatcaaattgatacagaaatgtaagaaagaaagaattttcacgctagtttttacggacagacgttattggactgctttacaacaaacaatatcagctaaatgcactacacccaactcgtttaagccagaagggagggattagtagaatacaagtaaaactaaaacaagagcaacacagcaacccctatccacaacaaaagatgatgagacagtgacagcgtgatttgggcgggagatggttgactcacctcttgctgaccatccgcaggttctccagtattgttggtctgatcgcctggtttttcttcactggcagcctgctcagcagctgcggcagcctcttcggcctccttcttttccaccaaagtggcggacgagattagcacaatgccattgttgttgatgcgcactttcagctttacatcctgaccctcgccgcgttccgtcggctttacatccttgaccttccacacgccaatcgtttgatctggatagggcacctgttggccatacacaatcgaaacgttgaacggtcccttgcggttgattgtcagcaggcgactgaacggagaagcatggtattgcgggaagatctcgatctctcccggagcagcggagccctcactgtcccacagcaccttaacggcgtagttctgtatatcagtgacgccaaactctcggacgcgtacagctggcgacatgatggcgcactgaagggctgctccgcgagacacagcttcgtcctggttaagagtggtgctagccggcttgttaaagacctacgaataataagcgaaatattacaaatgtgacatttagcatgggttgcatcatttgactaacctgctcaataagctgctttacggacggaatgcgtgagcttccgccaacgatctccacggagtgaatgtcgtccagctgcagcttagactcggctagcaaacgcttgaaagtctgctcgacgcgctgcaagacgggggcgcacagctcctccatctgcgaccgctgcatggacgacgagacgtcgatatcatccaagaagcactcaatgttcaacggcagcttggtgctgttggcggacatctgcttcttcagcttttcgatttcggttaacaggcgcagattggcacgggcattggtcttggcgttgatcttgtaacgctcctggaactccttggcgaagtaatcgcccagagccaagtcaatgtcgcgtccaccgatctggtcccaggtgctggccagcatcttcagtttgcccttggtgaaggcacaggcactggcctgcagtgacgagtgcccaaagtcaacaaagatcacgttacgtggcttgtcctcgaacagatcgttcttgtagaagccgtaggccagcgcggtggccgtcgtttcgttcatcaatcgcaggacgttcagtccggcgatctgggcggcatccaggagagccttacgctctgcattggtaaagaacacgggacaggcgatgacgcagtcgttaacctgcgtctgcatggcagccgccgatgtctccttcagcttggtgaagagcatcgccgtcagctgctcaggtccgaaatgctgatcctccccgaggtagttcaccttgatgccaatgctgccatcaccgcgcgcctccacgcgcgctggaatgctcgtgagttcgtgttgtacatggggatcgttgaatttgcggccaagcaggcgcttgaatccgccaactgtgtttttcatgtttgtcacctgctggttcttagcggccacgccgatgatacgcttcttgccatcgaaggccacaaaggagctgcaagattgcagggagtaaaaattgtcagttagtggatagatctgcaggccatataaggttcaaatatcttagttcagttgggattaagtcattacagtgggatgtggcacatatgtacaaaaattaaacaataagttttaaacttcatttttaatgttaatttaatgaaattaaatatgtaatattgaggaaattctggcaggacttatagtagagcaaaagcttctacctaaacatagcctcatatgcaacaggttacaggttctcgatccaatatcaaactcaattgaatgaatgatttttaatctttaatatatacaccagtaacatgattacagaaatttaataaactttgtaaactttgcagttaaaacataactttctgtatctttaatttgatctgcatctgcatcaattaagagtaaattacccgcacattaatggtgaactctttttataaaacggaatttgctaaaatcaagtacccattacaaatagttcaacatatgtacatatgtggtccccactgtgtctacatatgcgagtgtatgctgtctgtgtttgccggctttgaaattatttttgacagcttcgcacacgtttttctgtgctttttgcgcgctctctctctctctctccctctgcatctctcccgcttcacaacagctgctgcttgatttcgctctccgttctccgctctcttctcacctttgatgctgccttcttcttgaccgcatgacgcatgcatcgccagctcttttttttggtgtgagtgtgccaaaaaagtaaattcgtacaagtacaggagagtggggaagtgaggacgattggaaagatacgtaggcccacgcagtcaacggcatttaaatcaaaggcacccatacataggcagcggcaataaatcgaaaaagagaggcagcgggaacagcagaaaaagggagcaaatatgagtgtgccgccgcctcattaaaattgcaatttgcaacactttttatggaagtgcaatcggccaaatttaggcctcccgcaaaagcgaacaaacatcacagtaaataatgcacatatctggggtacacgtatgttattcgaagcgttacccataacaaccatggaattttctaggcgcgctctcttacaaacacatttacgcacacacacgcaaggcatgacttacaaattcgacataaccccaaaaaggcaaaaagtcgaacgattatgcagaccgcaaagcttatcactacaaactgggccgtaatccagagcatcggattgcggataaggcacaattacttacggcgtggcccggagactgtagtcattggccagcgtctcaattcctccggatcgggctgccgcaacatagcagctctcgttgccaaaatcgatgccaatcacggacattttttactcgactccttgtcgtctgaccgatgttccaaataaaattgattcagagcagacacacttcttgggcgtttgctgatttttcttgttttccttctctctttttgtttttgggggcggaacaacgcgatcgcagagttttctttgttttttttttcagctactgcaaaatatacaagttgtaaagagagggagacgtgaattagatataatgtatactgaacacacagccacgcacgtgtcggcttgctatctgttcttttcgtttgacaaacaagtccagaacattcgattcgatatatgcttttcacattcacatcaattatggattcgcttttcgcctgcgaatggaaatttctagcgtccggccttcgtagctcttttctctcgctcgcacgcacaggaaccgtggcggaaaattttgcgataaaatcgcctacgcttgtttggctttccacgattttttttattacttatctgtactcaaacagattggttacgcacgttttagttgataaagagcaatcacctttggattcacggtaatagcacagaaacttcaattcgacaccgcacgttttttttttactgattggtctgcaccatagagctggactaaccactagcgataggatcgatatatcgagcttattggtttttggagaaactatctaggtatcgtttgcgacatttatcgatagtgcaaaattggcaaatctttagaagattccaatttaacttttaccgccgacaattaaaaatcttttaatttattataaaattgttagcaattaccggtatataaatgagtatgagatcaaaagctacgatatctggcgataccgattaaagaagagtaactactaataattgagaaaacattgtttatccagtttgtggttaaatagtaaaaacgccactgcaaatacatttattgtaattttgaaacacccgccacccatcagcaagctcagggaaacgtatttgatccacgcatgggaggtggaccatcaacagtctcctcgatgagcagcggcgagctccagcgcattaggaagtaggcagatccggatttatcgtttgtcccggacaaccgatttccaccaaagggagtcagcccgtacgtgctacccgtgcatcgctcattcacgtagagattactagcggacattcgcagttggttcaggcagtgaaggataacctcatcctgacttgcgaatatggagccggagagcgcgtatctggactgattggcggcaagcttgagagcctcactgaaggaatcgtccgaatagacgaacaccggcaagaacggtccgcagcagggctcacacagcagtggatccaatggatccgacacccggacaatcgttggatcaacgaatctaccagtgctgtcatcacagctgcctccgcacaactgctccatgttcttggtgcgctgcagtagtttctgcatccgccggaagtcatttatatgcaccatcgctcctatatccgtttccgattcgatggggtctccgatggtcagttgctccgtggcctccaccaactcctccctgaggcgtggcca

SEQ ID NO: 41261 - DNA, 2650 bp, DROSOPHILA
cggtgtcgaattgaagtttctgtgctattaccgtgaatccaaaggtgattgctctttatcaactaaaactagctgaaaaaaaaaacaaagaaaactctgcgatcgcgttgttccgcccccaaaaacaaaaagagagaaggaaaacaagaaaaatcagcaaacgcccaagaagtgtgtctgctctgaatcaattttatttggaacatcggtcagacgacaaggagtcgagtaaaaaatgtccgtgattggcatcgattttggcaacgagagctgctatgttgcggcagcccgatccggaggaattgagacgctggccaatgactacagtctccgggccacgccctcctttgtggccttcgatggcaagaagcgtatcatcggcgtggccgctaagaaccagcaggtgacaaacatgaaaaacacagttggcggattcaagcgcctgcttggccgcaaattcaacgatccccatgtacaacacgaactcacgagcattccagcgcgcgtggaggcgcgcggtgatggcagcattggcatcaaggtgaactacctcggggaggatcagcatttcggacctgagcagctgacggcgatgctcttcaccaagctgaaggagacatcggcggctgccatgcagacgcaggttaacgactgcgtcatcgcctgtcccgtgttctttaccaatgcagagcgtaaggctctcctggatgccgcccagatcgccggactgaacgtcctgcgattgatgaacgaaacgacggccaccgcgctggcctacggcttctacaagaacgatctgttcgaggacaagccacgtaacgtgatctttgttgactttgggcactcgtcactgcaggccagtgcctgtgccttcaccaagggcaaactgaagatgctggccagcacctgggaccagatcggtggacgcgacattgacttggctctgggcgattacttcgccaaggagttccaggagcgttacaagatcaacgccaagaccaatgcccgtgccaatctgcgcctgttaaccgaaatcgaaaagctgaagaagcagatgtccgccaacagcaccaagctgccgttgaacattgagtgcttcttggatgatatcgacgtctcgtcgtccatgcagcggtcgcagatggaggagctgtgcgcccccgtcttgcagcgcgtcgagcagactttcaagcgtttgctagccgagtctaagctgcagctggacgacattcactccgtggagatcgttggcggaagctcacgcattccgtccgtaaagcagcttattgagcaggtctttaacaagccggctagcaccactcttaaccaggacgaagctgtgtctcgcggagcagcccttcagtgcgccatcatgtcgccagctgtacgcgtccgagagtttggcgtcactgatatacagaactacgccgttaaggtgctgtgggacagtgagggctccgctgctccgggagagatcgagatcttcccgcaataccatgcttctccgttcagtcgcctgctgacaatcaaccgcaagggaccgttcaacgtttcgattgtgtatggccaacaggtgccctatccagatcaaacgattggcgtgtggaaggtcaaggatgtaaagccgacggaacgcggcgagggtcaggatgtaaagctgaaagtgcgcatcaacaacaatggcattgtgctaatctcgtccgccactttggtggaaaagaaggaggccgaagaggctgccgcagctgctgagcaggctgccagtgaagaaaaaccaggcgatcagaccaacaatactggagaacctgcggatggtcagcaagagggcgctgataaaaagaagaaggcttccaaagccaccgaattgccgctggagtgcaccacacacggcttcagccccgtcgacctgagcaactacacacagcaagagtcaaaaatgattggcaacgatcagaaggaaacggaacgcattgatgccaagaatgccttggaggagttcgtctacgatatgcgcaacaaactgcagggtggacccttcgagcgatacgtggttgaggctgagcgcgagaaaatcgtgtcgcagttaaatgatctcgagaactggctgtacgaggatggcgaggactgcgagcgtgacatctataccagccgcctgcaggccctgcaccagaagacggatcccatcaagctacgcgccagcgactatgagcagggaccagctgcatttgatgagctgaagaacagcattgccattgcacgtctggcagtggccgagttccgcaagggtgtgcccaagtacgatcatctaacggaaaccgagttcatcaacatctcggagacggcggacaaagcgcaatcgtggctggatgcaaatctgcccaagttcacacagtcgccgcgcaccgctgacagtcccgtccagatttccgccgtgcgccaagaggtgcaaactctaaattcgtgcgtcagttcggtgatcaacagggcgaaaccgaagccaactccggccaagacagcaacaccgcccaaggacgaggcgaatgcggaacagaatggcggcgagccagcggccaattctggcgacaaaatggatgtggataacaatggccagagcgcggccggaaacgatccctccatggaagtggagtga

SEQ ID NO: 41262 - protein, 804 aa, DROSOPHILA; identical to SEQ ID NO: 26010

SEQ ID NO: 41263 - DNA, 9062 bp, DROSOPHILA
gatatgtgtgtatgcgggtgcgtgcatgtgtgcgtgtaggtaaatgtgtgatcccttcgactgatctgatcccgggcatctgcaaatccgcatccggactcaccttgccgaagaaccgcatgcgcttgtaggttttccgctggttgatgtcgacgaggcgatccggaatatccgtgctcttatcctcgggcttcgcggccatcttgctctcctttcttctttactacggactgccccttttgcgtttgcgttcgcctggagttttgcggcgatactcctcgttctgagcctataattccaccggcgatcggctgaaagtgcctcggaaacggagatcagatccacacggttgacaagagaagcggcgatcaaatctcggttttgcccatcgaatgcacgaaaaccaagcacaaagcggagaacgcgccgaaaccgttcgattttttaaatgccaaaatgaattggacgtgaagcgtcagctgaattggtgtgcccgtttcgctggctatcgcacactttctggtatgtatcgcggtattttgttgagtgttgaacaacaaattctatggccgttacccttttgaatttacctactggcgtttactctgttcgaattgagcgcaatattttttcctattgctctgcgcaacactgtgtttaaccgctatttatttgaaaatctacaaaaactaacgttacatttttgaaatttcaaaagggtttcataaattgagtttactaaacagtcaacggtcaactttatattgtagagccccttttctaatttgaattgctgcaaacgttttctgagtaaaaatactgccaccttgtaattgcaggtttcgatcctgatttgtgttaaaaagaaattattagaaacagctatctcaaagccttctatgtttttcagttaaactttcaaataacggttaaaaataattttgataaaaaaaaaacaacactaaaacacacacaagtaaatagaaaaaataatgtgtttacttaataactttattaaataatccccagattttgtttttctacattgatttaataacgactacgaataccccactattggtgtagatttccgtttagattttgactatgcctgctgatatctcgaaggggtcgcttgggttggaggattgtatgttctagaataggtctatttggggtctcttggttattgccatcgtttcgttctctgggattactccttacaagctgccccgttttggctcttgttgctgttctgattttaatgttttgtttttgtttgcgaaagaggccttataagtagaaaaatgtggttttagttcttagttgtcgtcgttaatacataaattattacattaaatatattatcaatagtttagtttcatagttggttgctttgccagtgtacgcagtctctccaaaatgccttgtgtttccgtgtgggtgagtgtgtgcttgtgtgttttaggccgaagaagtggctggtggatctgatcgtggatctgagtgtgggtgtgggtgtcagtgagtgtcctgcggttatgtcttaaattttcgccgatctatcttatcagcattcccatcccatcgcatcgcatcccatctccgactcagtctccgcgaactcctctccgcactgagctcccaaagttgaactagaaataggcgactcgatacagcttttctcagctagatccggttgtggaggtgacctgactccgctgcaggcgcagccattcaacaaactcatccagcatgacgggccctgcaaaaagatgggggtaactaaatgctccgtttcaagttcttattttaacttatttatcagcttcttttaatacggttgcgaaatacatagttcagtttagtttagttagctcctttgtgttacttacaagctccgtcgatatcgtagtttgatagatcaatgctaatggtgcgcgagaactcgagaatattacaccactgatctttgttgatcgccttgtactttgattgctctagaaactgtgcgaactgtggatacagaggccaatgtttgcccaaaagtagttgaagcatggctttggcagtgagtatatccatacaccgttggtccgagtcctgcggaatatgcagagccttattaaacgcagctcattgtttattcaaatggattactgaccttggcaaagtcgtaggcgtatctgtagatgcttttaaaggagttgggatcgttgagtatgctgcgcagatagtccaatttcacaaccattttcgctgccgaatcgcagtcgagttctgtgaggccctttagccactcctgctggctgaagaagcccatctgggtggcgcccattttgtaggccagcaccagcatcacaatattctcgggctccacgccgatatcctcgcagaatttttccatgccatcgggacctgaagaatcagtttgttacataagtatttcgaagggccaataagaaataaataagcaatttctttatatacccagaatttggtatgcctgagcgatttaagaagattgccgatatctttatattgcacatattcaaataacataaaacactgcagtgtcatccaactcacccaatgtctccggttcatctggtgttgtgtactcctggaaccaggccatgcaacgcttttgactgaagccatcttccaatctgatatggcgtctgtggatagaaacaacaggttttttacttgagcaattggatgtcgttcgatgattcaatcaaatttacacactctgccatccgaattgcatggaattcgccttcaccacgtatagaccagagttttaatcgaatcgaatcgaatctgtcgctaatgccgtgtggcctcttttgtttattctattctattcgacttgcctctcctctggggtttgtctttgagaattcgcccctaaaaatagcgatagtaaacatggcagagcagagacgaggccattgccaagagcagcggcgcacaggatagcaaagaacataatgcccacacagatgtgacaaaccgaattggaaaaaccgatggcctttggtaggcggcagttgtgcattgccttcagcaattgcattacgaatgatcgcggaataaagctgtcatcgattgcatttctataaacttacgcatttctaatgagtacttataaactaaataatggcgtaaagctttgttatttgttgccttacgacaggctgggagtcttgagtttcaataaatgtttatagttgcgaggaaatacacatattatttagctaaccatgtaattgaaaaatatttcattcgtccacgaaagtaacataatgacgacgcaaaggcgactactatatataagcaaagaaacccgatcaaatcgggtactacactaaaaaattccatactataaaattaaaaaaaaaaaaaaaatatcaggacaaaatcggaaaatgtaaagagtgggtaggtagcaggtgttaaaaatgggcacggattgataccgcatttcttgacatcagatgcttcgttcaaaagatatttccaagggaagtgcaaaattaattttcgtaacaaacgttggtattggaacttttgtacgtcgaaggtgtgttcgtcacttgttttctttttcaaaaggtgttttttttttgataataagagaaaatgataatgatgataataagagaaaaaatgaaataaatatttccgaaatttctcactagcgcaacctgctggcaattacatttattgtatttataatttatgtgtgtttaagggggcagtttttttttggcacattgatttttcatatggacaaggctagatcgactcggctagtgattctagtgataaagaatatatatactttatatgctttacctgttacacatttcataaaaaatatagcctgccatttttagatctttagtaaatatataagtgaatatttaaatattctaattttgttacagaaaatcaattaatactattttatataatttcttcgtaagctaacacagctacaaatgttataaagtagtcttacaaacatttttctttcagtgcacacatacatacatacaaaggcacatctcctccagcgtccaccaactgcgcaggcgaaaagcgagagtgaagtgccatcacaggatggagcggggagagcgggctggaaaagtgtggatgtgggtgagggattgggtggattcgaggagacggcaggacagcacgattctatttgggccgcagttgtgcgcaggacccgaaagaggaaacacgtcgtagttgcgtcgagcagagacttcagcgtaaaatagtcattggaattggccacagattgcacaaggatttactaaagatgatgaaactgtccggtcttaggcggtccttacccagggaccaaggattgggcaactgcctcaacgtggcactgatttactcagcgctcctagcacttttcagtgagtagtagagacatttggggcaggggatgtgtgccattcgtaggtggtggaatccccgaaaatcgatactgtcgaggacggttttgtgacacactgactgaaaaatgaacaagctagctggacgacaattggtgaagcctctgtttccactccttttagtgaccgccgcccagggactacagctgagtgccttcacaacgaagacgccgcgggtcagcaagtacacaaccaagtcgccatcggtaatccccatgtcagcgagttactggctccccgtcccagctaatccgtatatcttttgcaggcctcctccatgaaccacgatgccaccgcctcgctgtatcgtttcaatgccaccaacggcatcacctgcattctgatgcaggtggacggacttatcagcattaagtaccggaacaagctgaacgaggatgtggaggccgatttgtacatgccggatgatccccagctgagtggcgagtgcgtcgagtccaacatggaaattctcaccatggactttaagggtttccggctgtccatgacatttaaaaaggtgcgtgggtgcgtggcttaccagtgattaaccagtgatggggaaggttccacttgcttacgggtctcctcaccccataaagattagaccaattgtttagctaataataatcgtataggtgtagcgaatgcagtaactttcccatataaaattcagtaacaaaataatcaataagtagaagggcatagataaataggcgatacaattaaaacatactgctgcctaggcaagttcgagcattgagaatacattataggcaattacactagcaagtacaacagcaaaactatctgggtagcaaagtggaaacttcccacggccaccggaagtaggtagcgttaaggtcagaggttgttaaaggctattggctattgagtaatgtttgaactttgacccacagtcgtccggcggcgagggttggtatatcaacctgtttgaactgacctactcgtcctccaactggctgttcgagcaccccgatcgtcccaacttggacgtgaggctgacctcgcccgcccagacgccgatgtacttccccacgccggtgggtaagtcctatgtctgcgacaaggagcagactgtgatcatgtacgccccgcacgattccggcgacctgtcggggcatatagccaagctgtatctgcgcgacatgcacatgcagagcttcatgttcaaggacagcggcaagtggggcccgtccttccactgcagcgccacaggatcctatcgcgacgagacagcgcccctggccgtgggaactgcactggccattgccgtgctactgaccatatccggatacggcggttggaggtgatcattgtaagccatagtgccttgcaggccactttaaaggtttattttttacagatacttcaaaatcaagaaggttcagtacggttctatggagtgagcggaacggagtgagaggcccaagattcaagtgaagcgttcgtttttgttcaactatttgatcatatcgttgtctacacatatccccacgtttgttggatctattgcaatcctgtagtcctattttataaaattaagagttgtcccgacagacactgagattaacatttacgaggttatcgaaattaactaaagatacatatatgagaaatgcaaatgtcttccatattgttaatgtataaaataatagcgcaccatatatgattattaaatgttaatatatatcattattaatcgaagaacgtattatttaccaggcaaacgaatctaagtgaaagaccaaagtctgtatcgtggatggcatatcaaatcttatactcatatttcagcgattatagcgatgcatctataaccgaatatcttttttttaataacacattgttaaacgaaatctcctgcaccgcctattaaacattcattatctcttaatccattcaaaagtttgccaattgaaataccagaagatatgtatggggggaagatagagtaacttctacagcttttgtttataattagtattaatgagtttaattaaaatggaaataaatactgatgcctgctgaaaaatatgggattttaatggaccgtttttactaatggcaccacgcgcaacgatggaatcgattggtaacttaattttataaattaaattacattgttggatggatttaataattggactgtgttaaataatatctatattcagctaaaaaaaactttttttttttaatatcggcagagactaataatttttgcctttgaatgcctttcgattttgccacagattttgattaatgttgagataacataataataattataacttggataagaacattattggatacaacacaagacgggtgaataataggatgattattgtgaatctatgaatagagcaagtgaatcaattttcattttacagaaatgccagtatttgttttttttttatgaaaagtatataaaccatgaaaccaaatcgtcgcgaagatgtgaatatgaaaatgataacgtattaattaataaaataacaaattcttcagtgccaggtgtgggtaaatctggccgttccattgaaatatatcaggcatcaatggcttaggaatctctacaccggaaaccagatgcttttccccggaacagatgatacaacaccaaagggcctttgttcttgtttcctattttccaccactcacctgctgctctgttgtgtgggtatgctggtgtagctggttcgggccctcttcggttgaccatgatccatgttgtcgctaatagtatctgcagctcggcgttttccccgtggcatgacttattgtgatgtgttttccagagtcagtccgttccgtccgtcggatttgagttttgctgtgaatagcacacttagttcattcgctattagcgaaaatgtttgaattgcacttaccgcaatgtttcccaatatgaccagtttactttagctccgaagtagttatctgtggggtatgaaagaatccggttaaaatggagcctcaatcacttggtggtatgatatttttaggggagtttttcgggcagaccgaccacccccgatacgcggatgcagcgaagaggtttcacgggatgcacaggacatcgcggtatacatatagtggctatagtatatatatggtcgatatatgtgtgtctaccagatgaacgtttgtactctgtaggcgtgcgtacatatgttttactacaccagagcacgaaataccggctgctggaagggcctcggtctcgactcggttcgcaataccgggactacggaccggggagcacggccattacgggggattggtccgtggtcggcctccgggagccacagccagcagctgatacgaccgaccgaccgtctggcctgcgcgtgctcgcttttctgcgtcgaacgtcgcaacgccgaggggctcagtttacggctttcctttttaactgcgaccggtaaatggatcttaaactgggtgcgctcggttaaagggatccgcccgtgcagttaggggaaagaacggttcaatttttaccatatttttcaaaatcaatcaaaatttcttggcgtcaattagagctgggttggccactcgcgatagtatcgatacatttaacactgatgggggcaaggactatcggtgtcttggatttgatagaccctggtttgcgaaatttaacggcactatagaattaacagggctgtcgcatttccttggaattacttattacacattcttgttaacacataattttctgacatgctttattttaaacgggcttcgaaataaacaacaattttaagatataaaaataaaatattaaacatttgcattttggctgtttttagtggaaacacaacaaccacaacgatactatcgcttaggactcggaaaacaggtgtgccatcactgactgtctaggtctattcttcagaaaaatcaatttttccaatttgattgtaaacacgatgccagacagaaagaggccccttggtctttagtaatagatctcaggatgccgagcttctacctattcgccgccagcagtgaagggcgcgtctacacgctgtccaccaactccggagcgtggcgcgaacttccctatctgggattggagttcaagaagatctgcgctgtgcccaactttttgtgggccattggcggcgaccgccaggtgtacgttcatgtgcacggtctggacgtgcccattcggattcgggaggagtcgtacgagaacgagcgctggctgcccatcgaaggattttcgaagacgctgctgcccactgatcggtacagatattcctccgccgatggcagtgtggagcgtggtgtggacaaaatccgactgccctcgatggcgtggcaatgggacggcgactggcacctggacttagagctcgatggacagccgctgaccgaggatggctggatgtacgccctggactttccggccacgtactcggcaaagaagtcttggaactcgtatgtgcgacgacgcaagtgggtgagatataggaggtatgcagccttgaatagctggtgcgcggtggcaccactacacaaggatcccacgcaggagcccttcat

SEQ ID NO: 41264 - DNA, 1593 bp, DROSOPHILA
ccaacccagctctaattgacgccaagaaattttgattgattttgaaaaatatgataactacttcggagctaaagtaaactggtcatattgggaaacattgcgcaaaactcaaatccgacggacggaacggactgactctggaaaacacatcacaataagtcatgccacggggaaaacgccgagctgcagatactattagcgacaacatggatcatggtcaaccgaagagggcccgaaccagctacaccagcatacccacacaacagagcagcagacgccatatcagattggaagatggcttcagtcaaaagcgttgcatggcctggttccaggagtacacaacaccagatgaaccggagacattgggtcccgatggcatggaaaaattctgcgaggatatcggcgtggagcccgagaatattgtgatgctggtgctggcctacaaaatgggcgccacccagatgggcttcttcagccagcaggagtggctaaagggcctcacagaactcgactgcgattcggcagcgaaaatggttgtgaaattggactatctgcgcagcatactcaacgatcccaactcctttaaaagcatctacagatacgcctacgactttgccaaggactcggaccaacggtgtatggatatactcactgccaaagccatgcttcaactacttttgggcaaacattggcctctgtatccacagttcgcacagtttctagagcaatcaaagtacaaggcgatcaacaaagatcagtggtgtaatattctcgagttctcgcgcaccattagcattgatctatcaaactacgatatcgacggagcttggcccgtcatgctggatgagtttgttgaatggctgcgcctgcagcggagtcaggtcacctccacaaccggatctagctgagaaaagctgtatcgagtcgcctatttctagttcaactttgggagctcagtgcggagaggagttcgcggagactgagtcggagatgggatgcgatgcgatgggatgggaatgctgataagatagatcggcgaaaatttaagacataaccgcaggacactcactgacacccacacccacactcagatccacgatcagatccaccagccacttcttcggcctaaaacacacaagcacacactcacccacacggaaacacaaggcattttggagagactgcgtacactggcaaagcaaccaactatgaaactaaactattgataatatatttaatgtaataatttatgtattaacgacgacaactaagaactaaaaccacatttttctacttataaggcctctttcgcaaacaaaaacaaaacattaaaatcagaacagcaacaagagccaaaacggggcagcttgtaaggagtaatcccagagaacgaaacgatggcaataaccaagagaccccaaatagacctattctagaacatacaatcctccaacccaagcgaccccttcgagatatcagcaggcatagtcaaaatctaaacggaaatctacaccaatagtggggtattcgtagtcgttattaaatcaatgtagaaaaacaaaatctggggattatttaataaagttattaagt

SEQ ID NO: 41265 - protein, 233 aa, DROSOPHILA
MDHGQPKRARTSYTSIPTQQSSRRHIRLEDGFSQKRCMAWFQEYTTPDEPETLGPDGMEKFCEDIGVEPENIVMLVLAYKMGATQMGFFSQQEWLKGLTELDCDSAAKMVVKLDYLRSILNDPNSFKSIYRYAYDFAKDSDQRCMDILTAKAMLQLLLGKHWPLYPQFAQFLEQSKYKAINKDQWCNILEFSRTISIDLSNYDIDGAWPVMLDEFVEWLRLQRSQVTSTTGSS

SEQ ID NO: 41266 - DNA, 14789 bp, DROSOPHILA
cagcaattctttaaagcttacttgtacaattcattagcgtattcattatttatttctgatttctgatcattccgtacgatttcgatctcgtgttcatcttcatttcatacatttttacttagctgctacggcactgcacggctccaaatgaaactaaaccacctatactaaagataagactttcggaaaggatcggttcgaattgggaattagcaactacgtgaagcgactgccacaactggatctttgatttcgagttcaagttcgactgagttcctaagtgggtggtggtggtggtgagagttgagacagtgtactggtaggctgatagttattcatttggggatagtacaattctgtgttactgttcgacttaacactcgggtttaacgcactgggttgattacaatagttacaatgtctaacctataagtacatagcattagggggagagacagagagaaatagaaagaaagttggtatatagttagcaattgggttgttctacgtcggactaaaaactagttttaaactacgtacaaagtttgaaatgcaactgctcgaccgagggagaattttgtttaaaatctcttcacgttgtctagttcttgtttttgtttatatgcaagttaaaatcggtatcaaaatccattcaatgatgacatgtagttgtagttgtagttgtgtgccgtgagtgatttagattacagggagttgtatgtatgctgtatagttttcgtagttgtcggcagtttcggaacttatacattggactaacctagttgcagtggctactctcgctccaagtggctggtgtgtgtgggcgaatgggtttttctgggggttcacatgcatagcggggctagtaactaagtgcaggatggcatatcatataattgggtttgttggttgcacatttcttgtccgacactgatatagttctaggcctacaggggtcacgcgattggttcgagacaagattgctgccgctcttaatagtaaggttcaaatgaaaaactttcagtttattatcaaatttcacactttcaaatcttacaatgactttgtttcgttacatgttgtatgtatttatggataggaatagggggaatgtgtgggcgctcgagtatgagagtgtgtgatgcgcttattgcttatgcttagcttcttcgttttcgagatgtacaatgagattcgcattctacttaagataactcatttcataaatcataaattagaccattaactaaaacaagcaattcacaaaaaatgtacacttaaaatcataaacacaatcagttgttacatggtacgataccaatgtcagtgtgggtctaaacttaaaacatagcgagctgatgaacgtaagctaccagtatagggcgaacataaaattaaaatgttttacagaaagtttcatattcaatattatacataaggccgtttgagggaaaatcgagtttaatacttaaacataggggtttcttcgactttatcttagtctctcttgccagctattttgggagaagctgtcgatgcaaaagcaaatttagcaggcagttttctgcatgcgtttttttctgagtgtgtgtatgtgggtatgtagatggcgtggacgtgggcatgttgggttggaatgatgatcgttccttgtgacgtatatattacagatactgtttgggttgcttgtggttttcgatcggtatcaacaaactggtgctgattatttagatccatgtggatgttaagttagtctgatactgagtgttgttggttcttgttctgtagacgactgttgttgttgtgtttgatttgcatttgctttggattggatttgtttttacatatcggatgcatttagttcaagaactttgctactgttatcattatgaggttggccaagatgatgcaaatgcttgattctggcaaatagctacctccggccacgaccacatccttttcctccaggagtgggtagtcgatgacgtggataattccgttggtgcactcaacatcgggccggtatacgttgatcttcttgtagttccaaatgatcacatagcctgcaaatggaagtaatcgttgttaatagccactagacaatagaaaattggtatgcaatcgatgggtggttaatgctagtggattgcccaatgagcgagctatgggtggacatggccaggtcaaggatttcgttgtgggcggtgcgatgtgggtttgaaaaacggcagcactcaccagtccattcgtgactagcatactcatcatggagatcttttgattggacaacgattagatttagttaagcagaaagcgaaaaatttagtttaagagttgtaaaaaaacaggttcggttagtaatgcagcacggtatgggaagaccaatagaatcaatcaaattaggtgaaacgaatcgacttgaattgaaaggagaagcaactgagcccttggtatccaatgtgttatacttacgtccagcttcctcctccacgcggatactcaaagagtcgcggaacgtgggtaggattacgctgcccgattcttgcgaaaacttaaccagatccttcatggtgtactccttatccgaaatagccaaatgacgctccagaatggacttggactgcggttacaaaacattttgagtataatagaaaagcctaataggcttagggtgaaaaacctacatgataggaaaagtcggccataaaaagcttcttgtgagccgatgggtaatccagctcggtcttctgccagcccttgtccctgggcacaaagtaggtgaagcggcgttgtgtgttgttcagctggtcattaaagtgcgagaattttcccatcttataggtgtcacttaaggaatacgataaaatttaaacagcgtactaataaagctttaaaattgaacatacctcatcatgggatcggattcaagtttgccaagaactgtagtgtaaggcacgcccagcacatggtcgatgatgtgaacataaccattagtctgggccacatcagcctggataacggtggcattcacgccgcctccctcaactgttatcacggtatccgatccctcaccgcgaacgttgaagtacaggaaagtgttgttgttgacagtgggcacctgggcaatcttttgaaaagaatggtgatttgtaaaaaatttccatttgattataagctcatgtaaagctcaccaaatttgcatttttctgcctgatcttgtccacatttaagcggtccttgatgatatgcatgttcaggatctgcctcatcttattccgatctctgtaagatgtatttatttattattatgataattaaatattatcttcccgatttgagcaacattaccgcaaaacattgttgatgttcgaggagttccaagcctcattgctgggagccaaaatggtcacttctgtcaggctattgatgtcgtccagaactgctccaccattgtccattataacttcgtagaacttgcgcagagctccgttctcagcattctccttcaagatagattgcaaaattaatacaatgaacatatatcataatgctatttgaagtacttaaaacaaaatgcatataaataaataaacggtgaatggaagaggggtatgcataagcttataaattgtttttttttttttgggagtagtacaaagaattaggaaaaaaaaatacaacaattggaaatatatccgattataatgtaagccagttatacacatattgggtgggggaatggatggctggccaattaagttgtgaatcaatgggaatgctcgcttaatgactcacttaacacagctgaatttatgcgatttaatgacggaaaatctaccgaatcattgaattgtttgcacggtggttgggttggatggcaatttgatagcaaagcgttgcactgatgactgttgtggtttttgttctttgtctgctggtgtgatgtttacttacgttcataaactaaatcagtttttaaaacggagtgttagcagaaatagttcaatattcattcgaagtgatttggtgaagacaagtttcgaataaaattgaatttaaatattgtttaatatgggatttgggttccacgcagattgcccgagttgttccgccacaaacgaacgtttgaaatgaagcacaagggaattatatttaatctttcattgttctagacatttttcaaagaacaggcaaacggtttggctccattatgtacaatgttactgagttacgtgcatttttcaacaatttacagcgaatcataataatttccattactatgatttaaaaaataaaacaaggatataaaagctccgacaaaaaatagaagtttatcttaagtaattaggtaaaatttctgtaaactcatcatacgataaatactctttaactttaaagtatcatgtgcacttgcttcatttgcaaatttaaactagtgctgtacatcctataaatactatttgtgaataaaaatcagaagaaatattcttagaccctaaggcatcgcgactttaacaaccaatggactaattttacaaaaaaggtctacacattttttgtaataaactcatgcatagctaaaatagcaggggatgcaaaacaaaatgcaagtcaaaagaaaccgaacaacttaaaattaaaatcggattttgagtctgttgtttaccttgaacgactgaacgttttggtttttgtttcaatatttgggtgcaccgattcaatttcgagcgatatgtggttgggttggattgtgttttgtagttttaagtacaattattcggcatgtgacgagaaacaaaggatagaggtatggatcagtaaatagcaaaaggagagtatcgcacgtaattacaacaaaactagtttgaaaatttcgaaaacgatagcacgatatgaaggcgcttacgattcgagcggtcgaatgatatagccgttctacagtgcggactcaaaactgttcggcgcactttgcctcacagtttcgaaacgcactgtttctaatgtatatgcctatgaggagggtaactatttatcgagcgggtgggtggtttgttatcagtttatgcttggtgtatacatatacatctacggttacggtgatgatcaaagcatgccggctgatggcgagcgatcgatgactgatctttggatatgcacggcggtcgagggatcgaagaactttagccaatcaatgatgggaataatttatacacttgcttagttcatgacgccattaaagtaccaatacattcaatatagaaaaatggaagtttttgtgaatgaagttttggtcgatttcaatatagaacaatggaagtttttgtgaatgaagttttggtcgatttcggtcagatcaagcaaagcgcagcctaagcaactttttttagtgtttgccaattggtgactaaatcacgtattgaatttcgagggccaattctgagcgcgttgccctactgagtcagttttttgcaattgcaatgcaaacaactgcttgtgaaatgcatattgatacgaaaatctgattcatagaaaaatttacatgaaatacattgctttaagatttgttttttttttttttgtttttcagctttttggcaatacttacattacacccaaaatttttttaaaataaaatttatattttaaaaattattttaaaataaaattttgcttttgattttacatagaaccgaatcggaatacagacttttgagcgaattccttttttgggggaattttgcatcaagattagcaagaattcagttccaaataaaatcagtcttttgggttttcatttgtattagttagatatatctaggggatactgaaaactagtgtctgcattgatcttatttatttatactgtatgtgtttaggcagtggtttctgggtgcaagattatttggttttggctttgccctcagttgagccccgacgaaacttcaaccttggaaatattatccctttggcgccactttggaggagctgctcacttagggcaaagaaaagccgcttatcagtgtgtatgtttcaatgtgtttagctcatgtgtttgtagcattcgctggggcagcaggcaagtgatttaattggtttcccagtcccatcgggtctgccgccagcgctatctttcagtgcgtgccgagccaatcaaaatgccaagccttatcacaagccacaggcactatcattgtttctatgtgtttgtttcttggactgtctgtgtcgtgtctgtgtgtctacaattgcactggatgctagtcttcaacaccctacatacctgcaggaattgggtgaccgtcgtatcgatgatcatcagcgggcggtggatcagatggactactccgttgctcactgggatgttcgccttcacgatttcggccagaaccacgcccacgcggtgtttggcatcacccacaatggtgtttgacttgacgtacactgcaagtaaaattatatcaaccatacaatcattcgtaaacctttagtaaaatggtatgtctttagtgcaatcttacttttgccgttcttctgcttgaagaaactgacggtgaccttgagtaagtcctcaaaagcggcggaagccttgggatcgtcatgctgggcagcggcagtgaagatgacagtgtttggtatcacatggccatcgatgaccttgccgtccacgaggctgctgcgagccgagagctggagtcataaagcaacagtgagattacaatgcgtaacaaataatgcaattaaactagaaaagcaccttgaagccttcatcgacgggaaccaggaacgtgtgctgtccggcggcatcatagaccgactctttcttggccatcgtcacctggctgcggtacgtgcgcacaccgatgttgtccacgttgaactcctcggcgttcttcaggaacttgagagcattcggattgttgggggtatccgaatggccagccttgacggtgagcggctccagtacctcgtcgatgatgtgcatgatctgtcggtaagtaatgaagagagttgttcaatcactctatgaaatgcaacatatgcatatgtggggccactgacctgccgcttgccatcgctgtttgtctccacactgagcgagggtatgatccgggcattgttcacaaagatgtcgccattcgagttctttgtgatgtacagcggtggattgccggccatgtccgatgacacggtattcggcagtcgtttctgggtgtacgcctcagtggctgcaaagagtaatcagagggtagagtcatgttattttgatttttattatttttaatcagcctgattgaaactgaactcactaatgtgatagagcacatgggcggttttgctcttgtagcgctggaaggcttcattggtgggcacaaagatcgtgcagctgcgcagcgaaagcgttgagttggcaatttgattgctctccagcaggctgtagaactgcaaagataaacgggttcgttacactcattcgcgtcgctctattgccaatatcttatcgaaccgagtgggatggagtagtgggtggtggatctaggatggagtgggtgccttaaggggtggttcgcagacggttgctgggcggttttggcaaaacggcaaccggccagcaccatggcaacgtctaacaaactaataaaatgaggaacaactttatgcatgtcctggtggtgatgccagggcggcgtactagaaaaaaaaggtttattgaaccaattacgtaagcctctgggtgggttacgccgcccaagtggattgtgtgtcattcaattgagagcgggatgtgaaaatgcattttccagccaccccaaaacgccagccactgaccctaaaccgggcccagagtcatttgctcgggcgggccagaccacctgcccctgccatatgaggccacatgcaaccgcacactctgcggcttcccggcggagaaccactggccgccacgccccgctgcacattcccagtcggctttatgaggtcctgcggacatatctgtgtcttggtgtgcctgtgtgggtgcgtgtcctgccgaggacaacacctttttccgtgccctcctttaaaacggtcgtgtgactctcgtgttttcgttgctgcccggcatgagtcatggcaatttgggtttaaaagtccgtcctttcccttttccattcccatttcccctgcctgctgtacatatctatgctctggcatcgccaatacacacgcatgtacaccgaaaaaaaagtggctaggcctagaaataggtgcttcacgtccattcaatccattcaattcataattggaaatatatgcttaaatttaaattgccagtgggatccttacttgtaatttcttttactgatattgatatgcctttgaattcctttcaaacatcaacgaacgaacttaacaccttaaaattgaaatactctttttttgaggaattttcgtccttttcctgagtgtaaatacactttatcctcgctctgcattcattttctttttggtaatttgagaccgtcagttgtcggggccgttagcgttgttgttgtcctggtcgtggacattcgagtcgccagcgcgctttgttcttacaccgtcttcttggccagcttggtcagaactgcttgctggtgtctatatcgctctcgaaatgttttcgcttatctggccaagagagtgccctgctgttaagtggggtcctggggaatggctgtggcatatgtcacagtgtcacaggttgatatgggatacgttcaggtataatggccaatagagtacagagaagttttattgaataggcaatgatattgtttgcgacactttctcttggccgccattttccaatggccatctgtcagcatccttactaaattcaacccccttgggttctggctggaagcctttgacaattagatgcaattactttcataaatttccgttatcgaatgttttgcatttgatgaaaggccgggccggaagggaacagatcttaatgagtttccggctcttttggcacatcatcgcgataaggccagctcttccccggggagtccttttttggaagcccgaaaatttgatacaattgttagagtattatgctgtcatcgataaacagtttccctttcggtctggggcgtctcatttactatgcaaacaccactcgccgcccaaccgccaaaagtgctcccaagagggtgggtttattcaaaagcgcattttgattttcccgagtgccaagccaatgaccctggggccacagacgaacaacgaacatcaggggtgagagtcagacggcggagcaaacaataatttggccaatggcccgatgagtacgggttggttaactaaattaagccaaaaacatgtgagttgtacatttacaatgtcttttgagtttgttccaaatttacaatagcttaattgtgttcgtgtgtttctgtttggttttttggaattgctgcttaccctaactggcataaggcgcctcaaggatttggcagtgctctgaaagagatagagagagagaaagaaagaaagagaaagagagagaaccgctggcagttcaaatttgttctgttttctttcgatttgtagccaaaaattgtactaattcctataccaaaaacaacaacaatcatgagagggtaagcctgtttggaggaaattcaatttccatcatctaatggagccattaaaactaattagccaagagagcgagccaagcttcgtattttggactagggactgaaatcggagcaggagggttaggttgtttccttctgggcgagtgcatgttgtataaataaatttaattggtacaaattatgtatgcatatgtcggttgttcagtatattttcttttcgataattgcagcggcagcagaaacagaaaacagaagcaaaagcgaaagcgatctcaacccccgacttcggattccggttcggaatcgagagattggggcacagcatttctcttttaattggcggttcagcagtggaaaggggatcgaaatggggggttctacactggcatcactccgaggccattccgcccccacgccatggatcgtaaaactgtgcacattcagtgctccgtcggacagagatccgtctatgagcatctggatccattaaggtcagtcgtggctcattcatcgcctcgcctgtaatggagctcgtcgcatatcaaataacgcgccttggcatcgcattgaaatcttaaattaaatttaattgaattcgatgatgctgcgagtgtggactgttctgtgccgtgagccatacgagtgagtgttcctagacagagttcagccagccccgcagttgtcaacccaagctgtccacacccccactcggccaactgcaattgcatcagtcaaaggttaaaaattaaaattaataaaacgcgcaagacgttggctgacgcacgacaggaagtgggggtcaaacgcaggaggtcagctcgttcctcggagtgtactttcatttcggctgtcaagaagttgaatataaaactcagatcggcgtggctcaattatctgctaatttcgaaactctctcctaaactcggtggtttgccatgcaaaaccacaagccgtaagccgtaagccgcaaaccaaaacaggcaacctacatttatctaagccatcagcatgtaatgagaagtgcaggcaccagagtaaagaagcccgacttcgactttagaagatggagatacccttttgaaccagtcttgtctacattttaaatacaactgagaaaatatataaatcgcaaaatttaaaaaggggattggattgaaagcagctacctgcaatacgacatattattaataaaatgattatttcatagtcttaagaagtaactttaaaagggatttcccaagcctgactttttgatccattagttttacggcacttaatttgcataaatgccagaagattactttccgcccttacttttttatggcgaccaaatggtcccaccctcatgtatagcagtactccagatatgaggccggaaatgctttgctccgaaagtggcaaacttctgggcaaagttacaatgccctaaagcaagggtgcaagtgagcaagccgagtcccccttcttgtttttaattttttttagttgtacgctctgtttcgcctattgtaactcgaaaaggttgccttttctgtgtggatgcaactacttccctgagacacttgctgcaacaattacagtctgtcacacgctttctttttacttggaagtctaatttacttttgaagcagcgtgtatttcgggtgttaaatgcagtgttaaggcagactagaaaattaagcagggactcaagtcagttacttaaaaacgcgtattcaactactacttcacctactatataagataaaagcaattacaatagacgaactatgttactattttccactcaaatcaattctattttttgagtataagttatgtggcttaatgggctaccataaaccttaacatattaaaaaaatatatatatatttctcctggtgtaatgctaataccccttctggtgactgaacccccgcctttgaattcattacacatgttgttcttgttatttcagccgcgcacctttgttggcttctgagttttttacacattaatgtgtttttgttttctatgtactttgtatgtgagttggcctgtgaaggtgtaaaaaggcaaaactaaatataaaactgttatgcgcagtggacgtcaacggccggcgttttttctaccatttgccttttgctggggagagccaattcagcagacctgggcttaatttatgtggcttttcatttttacataacgaactccgccatgcatacgaaatgtggccaagtggagcttagcggtcggctggacctgaactgccgccagggattttaggcagcatcatcgattttccgcagtccaacaacaagtgagatggctaaaggtcaaggacgatgctgccggaacgaaggctacgctacctgtgcccaaatgcgggtgcgtccctcttgcgcaggctcctttttcccgcccgatctgccccgcctcctcgcacactccaccaaggcttttcctttcaaggccaacgaattggggcggcgtcttgtgggtggtggcacaattacagccgaactttgataagttgccactattaggtggcaaggtaaatttattgacttcgccaaagccaagtcaggcataataaaaaattgattttatcattgcaataaggtatccgaccatgagaagaaattaaggcatcacagaaatatatgaaacatattcaaaaggctgaaaaaattatttaaacgcataaatgtctgctaaaaatagtttgttttttgctcacacaaaagttattttaattttggcagtttccctggctacagaaaaaatgcgactgattactgtataaaatgtaggcagttaagaaatacttttccaacgaaatgatatattagactaataaaagcccctgaatgtgttcaaattttacatgttgcgcgtacggatacctaaacaaacatacttttgacaaatattcgaagtgtaactcttcgcattaatttaatcggttgcaaagatagaaaaggattactaatgttcatggcaggcaatccctactgtacccaagggtgagcggggggagggggggcgacgtttggtgggtggtgctgggggcttaattgactacggacaagtgtttcggttatttgcaccaactgtttctgctgctactgcttttcttcgtgctcttactctaccacctcctttcacctcctcatcctccacgttctcgttattcgcttcttcttcttcttctgactcacctgagagagttccgaatcatcgcgcaatttgtccgccaaatcggcggcggcggctgcgttcgcggcgcagagcagcgccaaaagcagcgctgcagcgttcagcattttagcggacgagcagcagcagcaacaacaaccacaacagcacttgtttatgcgctggcagtgtacgtcgtttgtgagtgtggctgtgtgtgctgttttgcggggggcgtgtgctggtgtgagtgctgctctacgattaagatctgcaattcaaaggcaaacaacagttagccgacgacaaacagcatttcctcggaaaagaaaatattatttcacagatatatgcttggcatgctttttgtcctccttggtattttctttgtttttgcaaggttatcgctgcttcctgttcgcttttgcccagagttccgttatgtcacatagaacaacaagcgaaaaacggaccaccgaggaatcggcaagcacaacacaaacgcaatttaactagaaacaaagctgcgcttattgtgtattattttttcttcattccgtcgctgtgtgtttaattattatgcgcctttgcatttcgctgctgcggcacttttttctgttttcgattttatagttttctctctggtctttattctgcgtaattctcggaaactcgggctgcaggaattaacattaacggccgccgcagaaattatgcaatgtccacggaccaaacttggaaaacacacaaattctttaagtagcacacacaaacgaacgcagcgcggtggtaaatcaatagcaagggcagcgaaatgggccgtgcagctattttagagttatgccctatgcacagtatagattttccacagagtttcaatataaggggagcaagtaccagtcggaggaatcgcaacgtgcgccacgctcgaacgtttttttcgaattaaaacgaaaagcggagaacaggtttaagccgagcgtgtggtgacgataacgagtgttatcgatagctgtcgatgtttcaaatcgcaacactgtgcactgttaataaatcgcttaacatttatatttatttgtgcatgtctttggcggtgactcttatttatgtgctttttatgcttttccgaatcttgttagaggtaaaatattagtacaaatcgagcgctgcgttgctcttctgtgtcagatttataataatgtctgtttatccaatcttattattattacaagaagactgctttaaattttctcatttttcgtttaaaagcataaataatcattttaaccgtttcgcaaaatgtggcaacgacagaatgcggtggataactccgctaagcagagtctctactgtttgaaagattttattccaaattgaaccggttataattttcaagcacttatttttttacttttctaaggagataacattgaattttaacaagcagtgtacctatttggttcttcttactttaagtaaatggtaaaagtcttcgataaaccacgccgttactaagcaacttgccaccagcaacgcttgtttgctattgaaatcaaattaatatcattatcagttttgacaataccattgcaaagaccgaattcagaaagccaataacgatgactgaccaaagcgagctggatcagttggcaactgccgagctgcagaggctgcaacgccagcatcggggtctccagctggaccttcggggtctcctcgaggagaaggccaagcgcctgaagaagcagaatcacatgatcaacgtactgcaagtggagcaccagaagctgaaggaggagatcaagactctagaaggtggtactcatgcgcgaaagaacaccaatgtagatatccacttaatggactagtcagccacatataaaaggtttacatcggtttcagagagagaagcacctgggcactttgcaggaacagcaggcggatttgcagagggtgctccagaatgagcgaaccaatctc

SEQ ID NO: 41267 - DNA, 2899 bp, DROSOPHILA
ctcggcttaaacctgttctccgcttttcgttttaattcgaaaaaaacgttcgagcgtggcgcacgttgcgattcctccgactgatgctgaacgctgcagcgctgcttttggcgctgctctgcgccgcgaacgcagccgccgccgccgatttggcggacaaattgcgcgatgattcggaactctctcagttctacagcctgctggagagcaatcaaattgccaactcaacgctttcgctgcgcagctgcacgatctttgtgcccaccaatgaagccttccagcgctacaagagcaaaaccgcccatgtgctctatcacattaccactgaggcgtacacccagaaacgactgccgaataccgtgtcatcggacatggccggcaatccaccgctgtacatcacaaagaactcgaatggcgacatctttgtgaacaatgcccggatcataccctcgctcagtgtggagacaaacagcgatggcaagcggcagatcatgcacatcatcgacgaggtactggagccgctcaccgtcaaggctggccattcggatacccccaacaatccgaatgctctcaagttcctgaagaacgccgaggagttcaacgtggacaacatcggtgtgcgcacgtaccgcagccaggtgacgatggccaagaaagagtcggtctatgatgccgccggacagcacacgttcctggttcccgtcgatgaaggcttcaagctctcggctcgcagcagcctcgtggacggcaaggtcatcgatggccatgtgataccaaacactgtcatcttcactgccgctgcccagcatgacgatcccaaggcttccgccgcttttgaggacttactcaaggtcaccgtcagtttcttcaagcagaagaacggcaaaatgtacgtcaagtcaaacaccattgtgggtgatgccaaacaccgcgtgggcgtggttctggccgaaatcgtgaaggcgaacatcccagtgagcaacggagtagtccatctgatccaccgcccgctgatgatcatcgatacgacggtcacccaattcctgcaggtatgtagggagaatgctgagaacggagctctgcgcaagttctacgaagttataatggacaatggtggagcagttctggacgacatcaatagcctgacagaagtgaccattttggctcccagcaatgaggcttggaactcctcgaacatcaacaatgttttgcgagatcggaataagatgaggcagatcctgaacatgcatatcatcaaggaccgcttaaatgtggacaagatcaggcagaaaaatgcaaatttgattgcccaggtgcccactgtcaacaacaacactttcctgtacttcaacgttcgcggtgagggatcggataccgtgataacagttgagggaggcggcgtgaatgccaccgttatccaggctgatgtggcccagactaatggttatgttcacatcatcgaccatgtgctgggcgtgccttacactacagttcttggcaaacttgaatccgatcccatgatgagtgacacctataagatgggaaaattctcgcactttaatgaccagctgaacaacacacaacgccgcttcacctactttgtgcccagggacaagggctggcagaagaccgagctggattacccatcggctcacaagaagctttttatggccgacttttcctatcattccaagtccattctggagcgtcatttggctatttcggataaggagtacaccatgaaggatctggttaagttttcgcaagaatcgggcagcgtaatcctacccacgttccgcgactctttgagtatccgcgtggaggaggaagctggacgctatgtgatcatttggaactacaagaagatcaacgtataccggcccgatgttgagtgcaccaacggaattatccacgtcatcgactacccactcctggaggaaaaggatgtggtcgtggccggaggtagctatttgccagaatcaagcatttgcatcatcttggccaacctcataatgataacagtagcaaagttcttgaactaaatgcatccgatatgtaaaaacaaatccaatccaaagcaaatgcaaatcaaacacaacaacaacagtcgtctacagaacaagaaccaacaacactcagtatcagactaacttaacatccacatggatctaaataatcagcaccagtttgttgataccgatcgaaaaccacaagcaacccaaacagtatctgtaatatatacgtcacaaggaacgatcatcattccaacccaacatgcccacgtccacgccatctacatacccacatacacacactcagaaaaaaacgcatgcagaaaactgcctgctaaatttgcttttgcatcgacagcttctcccaaaatagctggcaagagagactaagataaagtcgaagaaacccctatgtttaagtattaaactcgattttccctcaaacggccttatgtataatattgaatatgaaactttctgtaaaacattttaattttatgttcgccctatactggtagcttacgttcatcagctcgctatgttttaagtttagacccacactgacattggtatcgtaccatgtaacaactgattgtgtttatgattttaagtgtacattttttgtgaattgcttgttttagttaatggtctaatttatgatttatgaaatgagttatcttaagtagaatgcgaatctcattgtacatctcgaaaacgaagaagctaagcataagcaataagcgcatcacacactctcatactcgagcgcccacacattccccctattcctatccataaatacatacaacatgtaacgaaacaaagtcattgtaagatttgaaagtgtgaaatttgataataaactgaaagtttttcatttgaacctt

SEQ ID NO: 41268 - protein, 652 aa, DROSOPHILA
MLNAAALLLALLCAANAAAAADLADKLRDDSELSQFYSLLESNQIANSTLSLRSCTIFVPTNEAFQRYKSKTAHVLYHITTEAYTQKRLPNTVSSDMAGNPPLYITKNSNGDIFVNNARIIPSLSVETNSDGKRQIMHIIDEVLEPLTVKAGHSDTPNNPNALKFLKNAEEFNVDNIGVRTYRSQVTMAKKESVYDAAGQHTFLVPVDEGFKLSARSSLVDGKVIDGHVIPNTVIFTAAAQHDDPKASAAFEDLLKVTVSFFKQKNGKMYVKSNTIVGDAKHRVGVVLAEIVKANIPVSNGVVHLIHRPLMIIDTTVTQFLQVCRENAENGALRKFYEVIMDNGGAVLDDINSLTEVTILAPSNEAWNSSNINNVLRDRNKMRQILNMHIIKDRLNVDKIRQKNANLIAQVPTVNNNTFLYFNVRGEGSDTVITVEGGGVNATVIQADVAQTNGYVHIIDHVLGVPYTTVLGKLESDPMMSDTYKMGKFSHFNDQLNNTQRRFTYFVPRDKGWQKTELDYPSAHKKLFMADFSYHSKSILERHLAISDKEYTMKDLVKFSQESGSVILPTFRDSLSIRVEEEAGRYVIIWNYKKINVYRPDVECTNGIIHVIDYPLLEEKDVVVAGGSYLPESSICIILANLIMITVAKFLN

SEQ ID NO: 41269 - DNA, 5238 bp, DROSOPHILA
cctgccggcaagccctccaagaagcccgccgcccctctgcccgctggcacctttttcccaatcgatttcggaggcaccaacggcggcgccattgccattgccaactctttcagcaccggcgagggcggatctgctaccagccacgccatcgcatacggctctccggagtccgccgtccgccgagcccgccccaatcccagcaagttccgccactaatccttgaaccacaccttgatggcgccagcaactgcgagggcacccgaatcaaatcagtctaaaacgattctcctgtaattattagcaaatttgtcaatctttgagcgcaataaaataaagttttatgtttttaaatttcggaagaatatcatagaatatcatggattgactgactagtcatcacatctaattgaaacagcttatagtaaattgtaagttataagtgaactatctcctttgcagcgataacgccacctagcggtggtttcattcattaattaccaattcatggtaatatacaatcttaattttctagcaccgtgtaaagttatagactgattttgacagtccttaacatacaagaatatataattagcccattgaaagaatattatcaatttcaatcaacttattcgaatgatctgctgcaagttgaggaaaaggaataaatatttagtttttggcaaaggtaaacgcttttttttaaatgttactttgtaaaatttttttgtttatctaatattaatgttttataatatccgcgatgtttttttcttggcaaaaaggcattttataaacacttctgttacaagcggtatataaaattcttttgtttctaaaactttgtatgggcgaaaagagagcgcttcaataagtcataattttcaaatagatggagtagttgaaagcgtacgcctataacatctaagaatgctgtcatatgtggacaaaacccagtgaaaatcaggtcacaattaccaaaattacttttaaacggttttatatgctctaaatagttgtatttatatattcataactttttcaatccagttaaatgccgacgttataacgttcaagttaaatttaaaatgatattttctatactcctcaacacaggaatgtttgctatgcagttagtttatttatgtcacactctttgcttaagttgatgataaacggaaaaaattaaaagctgcccagccgaaatgcaaattgtaatttcaaaacataggtgcacatatagtctgcaatggataaaaacaaagtaaaacaatcgaacttagaaaaaagtgcacagacttaatgcacatggttacattcttaatctgaatggtgtatttatgtatatttaaaagacactacgcgtattgtacagctggctctaccgcttcaattttgttttagattcttctgtttctgctatttgtgtatacaagaacgatatgaggcatgtgaagtggttgctcctctgtaacaagactacgtggctatcggcttggagtccttgaaaactttctgcataatcgcgacagctaatatataaaaacgttattactagactgctctctgatgacgctgctgctgcttctcatgccagcgctgctttgcgggtcaccatgggtgtttcgctgatatcagtaaccgtacttgtcttgccacgaggtcatcacatcattggccaggttgctcagacggccggccactttgtgtacaccctggcgtacgctttcttttacgctttccacatccaggtccggtgcactgaagttgaccgaagatgctgtaacataataataaataaatcccactgaaggggtctagtctagagcgccttctttcactcacccctattgcccccagtgccaccaggggagccgtccccaaaatagtccgacgaagatatggctcgcgatccctggaagcggttcaagcttgcgcttacatcggccgaagactgttcgctggcgaagtactggtcggagccgaaacccttggagttgccgaacttttgctgggcgatcacgggatctgtgctcgttcctcctttggtgtgggtttgcgatgaaccactattcttcttaacgggcgccgacgttttgggtttgtcatagtcattgctgcgagaaaacatggacgtgatattgctgtggctacccccaataggctcaattgtctcgtagcccagcgcatcaagttcaaacttatcaagcttgcttgttccgccaactgagctctcccgcttttcgctagatcctcctcctcctccaccgctgctactatttccgtatagggaaaagtcagtgaaaaaattctcgctttccaataaggagagttttgctttaggggcggccgactgctgaatagtctccatatcgccgagagcggagtgggccatgtcggagcctcgcaggttgaagcccatgcccagccgctccatctgtttagccttagcagggtccatggtcttaagcttggcctcctcgcgggtcttctgcatggagagttcttggtatgccaatcgcatgctggccaccgtctctagttcgtcctcggccgtctgtggcttgaccacaggtgctgctgcagctgatgtcttcatctcgttagccgcgttggcacgggcctcgatgtctgcgaagttagtcttaactttcgtggctccaagaccgcccactttgcgagcacccagctgaaagataggaaagtcgattagccagtgcttcacactgctggcgttgacacctactccacccttcttcggctgcacctttcgcgcgcctatggacgacggcactgctgccggcaccacggaattaagcagattcacgctgggggcgccaccttgttgcgtttcaacgctgatgaccggagcaacggtgggtgggtttggatcctgctgaaacaatataagtgtgagggatcagtgaacgtctacaaacgaaaaatcgaaagatggtgcgggtcccctgcgtgtaagtggcgccataccttactgacattgttgttctggacattgaagtccacctcattgtcacactgggcaaagaagtcctcctccctagcggcttcgttgccctcgctcttgtccgtctgttccaaatgcagctggtgggtgcaaagtatacaacatggaggaggaacagagtcatgggaaggaaaggagcaggcggagcagtgaagcaaagcaatcgtcagttagttggttttagtgtaagagaaaagtacatgcgcatgaacaaaacgtttgatttgaactcacctttgtgccgtgcgtcttcatggcctgctgggcctgggcacacagcttgtccctataaagctgggccgcccgcgagttgtacttgacctgggcgtcggtggtgctgcagttgtgggcgcggaagaattgcgcggcgttcgcgttgccgcccagttgcatctggcggagctggagccaggtccagttggtgtccaggttggtgctgcgcacgaaggtcagatgcacgcccaagttgcggtgcacggcagaacagtcgatgcaaatgaagatgccataggtaacggaggaccaggtgggagccttggcagcgcagtcgaagcaggactgcgaatgaggaaaggagagcagggagccccattagtcagaaccccaagggcgaactggcgaaagtaggccactcactttgttagctggctgggcgcgcaggcgactgaagaccgactcgatctcctgcttggagggtcctgctgctggactggccatgtcggatggttcgaactgaaatatctcaactgaaacacgagtaatggtcgacgttggtagacggccttcgaggcgctttctggcgctctccgcgacttcgatttccgctggccgagggaagccctagataccaaacacaaaccttgccaaattgctcgacttttcagaacgtacgtggacgtgttttcctttcgtcgtactcgacggaacgaaccactgcgtgctgttagttcgctcagtgctgttatgcgcactagtgctggacagcgcacaggttctcggagatgccacgttttaccttggattaaatagctacatttcattaggggaattcgattataatcggcgaatgttatccgattaattttcgcattttacagaaacgtttttacaactaaattaagaaataaaaataaaaaattaatagttggttgcttacaattctgtctgtttgttaataacgaacagaaaaagtgaagacaaaaaatttgtatttgctagttcgcaaggactaatattattgtttcttaaatcttaatacaacaaaaattgcacaggtaactcattcaggtgaccattcttatttgggtaagaatgccgtttaaaatgatttttaaaaaatccgacaacgtatatcaactagcttcaatggtttagcaattttgagagcaagctatcgagtgtcttcagttatcgaatatattaacaccaattaataaatacaattaattcaaacgtatggcaaacgtatgaggacgctaagtgcagaaacagtaattttgtattggtatcaactctgactccggcctcacaagtgaaaaaaagcattgtcgcaaggtgtgtatttcaaccggcgtcggcctgttgcgtctctgaagaaaagtcaccagttgcctaaacgaaatatgattcctcatgtatagcccatgagccacaagggcagcacgcacatagcccacagacgggatatcggagacaccacgaaagcacatgtgcaggatggagaagtacttagctcggaaaccaatgaacacgatggatttccacaggaagcttatattaagaccgagcccttatgcgaagatctgtcggaagtcctggacgagctgggggaaatactggacgaggagctggccgatatgttggatatgaggcagagcaacattatatatagggaccagggcgagattatggataaggaggaggccgaggtggatgaggaagaagcgggcacgccaccggcgccctccatctcacttaccgacgacgcctctttattcaccaggagatcaagaccatatgctgacgattctcccctaagctttagtggatctttatacgagccgggaggctcaagtggggaagaccagaaagaaccagttcgtggcaataatttacatgaaattgccttagtgcggttccgaaactgtccagaacagagcttaaaacgctgcagtatcgacgctttcgtcgaacgaaagttcccctcggagaataag

SEQ ID NO: 41270 - DNA, 2662 bp, DROSOPHILA
agcaaatacaaattttttgtcttcactttttctgttcgttattaacaaacagacagaattctatttaatccaaggtaaaacgtggcatctccgagaacctgtgcgctgtccagcactagtgcgcataacagcactgagcgaactaacagcacgcagtggttcgttccgtcgagtacgacgaaaggaaaacacgtccacgtacgttctgaaaagtcgagcaatttggcaaggtttgtgtttggtatctagggcttccctcggccagcggaaatcgaagtcgcggagagcgccagaaagcgcctcgaaggccgtctaccaacgtcgaccattactcgtgtttcagttgagatatttcagttcgaaccatccgacatggccagtccagcagcaggaccctccaagcaggagatcgagtcggtcttcagtcgcctgcgcgcccagccagctaacaaatcctgcttcgactgcgctgccaaggctcccacctggtcctccgttacctatggcatcttcatttgcatcgactgttctgccgtgcaccgcaacttgggcgtgcatctgaccttcgtgcgcagcaccaacctggacaccaactggacctggctccagctccgccagatgcaactgggcggcaacgcgaacgccgcgcaattcttccgcgcccacaactgcagcaccaccgacgcccaggtcaagtacaactcgcgggcggcccagctttatagggacaagctgtgtgcccaggcccagcaggccatgaagacgcacggcacaaagctgcatttggaacagacggacaagagcgagggcaacgaagccgctagggaggaggacttctttgcccagtgtgacaatgaggtggacttcaatgtccagaacaacaatgtcagtaaggatccaaacccacccaccgttgctccggtcatcagcgttgaaacgcaacaaggtggcgcccccagcgtgaatctgcttaattccgtggtgccggcagcagtgccgtcgtccataggcgcgcgaaaggtgcagccgaagaagggtggactgggtgctcgcaaagtgggcggtcttggagccacgaaagttaagactaacttcgcagacatcgaggcccgtgccaacgcggctaacgagatgaagacatcagctgcagcagcacctgtggtcaagccacagacggccgaggacgaactagagacggtggccagcatgcgattggcataccaagaactctccatgcagaagacccgcgaggaggccaagcttaagaccatggaccctgctaaggctaaacagatggagcggctgggcatgggcttcaacctgcgaggctccgacatggcccactccgctctcggcgatatggagactattcagcagtcggccgcccctaaagcaaaactctccttattggaaagcgagaattttttcactgacttttccctatacggaaatagtagcagcggtggaggaggaggaggatctagcgaaaagcgggagagctcagttggcggaacaagcaagcttgataagtttgaacttgatgcgctgggctacgagacaattgagcctattgggggtagccacagcaatatcacgtccatgttttctcgcagcaatgactatgacaaacccaaaacgtcggcgcccgttaagaagaatagtggttcatcgcaaacccacaccaaaggaggaacgagcacagatcccgtgatcgcccagcaaaagttcggcaactccaagggtttcggctccgaccagtacttcgccagcgaacagtcttcggccgatgtaagcgcaagcttgaaccgcttccagggatcgcgagccatatcttcgtcggactattttggggacggctcccctggtggcactgggggcaatagggcatcttcggtcaacttcagtgcaccggacctggatgtggaaagcgtaaaagaaagcgtacgccagggtgtacacaaagtggccggccgtctgagcaacctggccaatgatgtgatgacctcgtggcaagacaagtacggttactgatatcagcgaaacacccatggtgacccgcaaagcagcgctggcatgagaagcagcagcagcgtcatcagagagcagtctagtaataacgtttttatatattagctgtcgcgattatgcagaaagttttcaaggactccaagccgatagccacgtagtcttgttacagaggagcaaccacttcacatgcctcatatcgttcttgtatacacaaatagcagaaacagaagaatctaaaacaaaattgaagcggtagagccagctgtacaatacgcgtagtgtcttttaaatatacataaatacaccattcagattaagaatgtaaccatgtgcattaagtctgtgcacttttttctaagttcgattgttttactttgtttttatccattgcagactatatgtgcacctatgttttgaaattacaatttgcatttcggctgggcagcttttaattttttccgtttatcatcaacttaagcaaagagtgtgacataaataaactaactgcatagcaaacattcctgtgttgaggagtatagaaaatatcattttaaatttaacttgaacgttataacgtcggcatttaactggattgaaaaagttatgaatatataaatacaactatttagagcat

SEQ ID NO: 41271 - protein, 552 aa, DROSOPHILA
MASPAAGPSKQEIESVFSRLRAQPANKSCFDCAAKAPTWSSVTYGIFICIDCSAVHRNLGVHLTFVRSTNLDTNWTWLQLRQMQLGGNANAAQFFRAHNCSTTDAQVKYNSRAAQLYRDKLCAQAQQAMKTHGTKLHLEQTDKSEGNEAAREEDFFAQCDNEVDFNVQNNNVSKDPNPPTVAPVISVETQQGGAPSVNLLNSVVPAAVPSSIGARKVQPKKGGLGARKVGGLGATKVKTNFADIEARANAANEMKTSAAAAPVVKPQTAEDELETVASMRLAYQELSMQKTREEAKLKTMDPAKAKQMERLGMGFNLRGSDMAHSALGDMETIQQSAAPKAKLSLLESENFFTDFSLYGNSSSGGGGGGSSEKRESSVGGTSKLDKFELDALGYETIEPIGGSHSNITSMFSRSNDYDKPKTSAPVKKNSGSSQTHTKGGTSTDPVIAQQKFGNSKGFGSDQYFASEQSSADVSASLNRFQGSRAISSSDYFGDGSPGGTGGNRASSVNFSAPDLDVESVKESVRQGVHKVAGRLSNLANDVMTSWQDKYGY

SEQ ID NO: 41272 - DNA, 4944 bp, DROSOPHILA
ccaccaagtatgcaacacgttttcaaaggaaaaagttcataacgtaacatttcgccaacttttaaaaataaacataaaattatttggtaaatcacagtaatcatattaattacaaaatgaatagcttgtatagattgttattaaagttaattacaattacttattaaaaacttctttatgagtgccaactgtacctttgacgagtgcatctccatcgccatctgtgacatgcggtcaaagacggacgcagcatatgggccatgggataaaggggcctcgtacactgtccaatcgggttcttgggcacggacattttgcccgtctaggtgtaggaatatgatttctggttttgtgcagggcagcggtgtgcatttcgttctccttgttcttttgcggttgtcaggtggcacatgtgaataaatcattcgcgataagcgcgaagtgagtgctcatgtttatggccttaatggttttggtcacaccaaataaaatttgcatttcagtggcaaaacgaggtaaaatccggctcagataagtttgaaataggagaagagtatggcggatagatgccattgagcgataacactgatagctcttaattaccgcctaattaattaagagatgagcgatgtgccccgaatttctatttccagttggtagtgcgctggaaagagtcggcgctactaggctgtcagtgtagtatgtgtgtgcgaacacgccccctataacgaaactacagggtgcgaacgagatagctgcagcacttccaagaccgacttggttggtcgctcccttccagtcgcacgtatggcgacgctggaacggttggtagtggaacatcgttcgctctgtctcactcccacgcgaccgcgtcgcttggcgatcgctcgttgccaggacgactggaagtggccccaaacacgccgcccgcgtgttccatggccagtgtgttccgccaggactggtttttccattcgtttcgtggcgccgctcagttcttgttggaatctcaaagcgtttacgtggccgcagcgcagcagagtcacgtttgaaagagtgcgagtgagagatagcgacttagagcaccgcgccgagtgcgagtgagagagcgcgctccatcgcctttgtgcctcgtttcaaatgcccgtttgtccgtttttttggcactgttgttcattcattcactcgcttctggcgctcgcgtgcagttgcagtcgctgctccctcctaacggttgtttcgccgtcgccagaatcccgctaaaaggtgcgtgcgtgtttgtgtgtgccaaattcctctgaagacgccgaaatcttcaccccaggtgatggaggtgatatcttgctcctcggacggtccatcacctgtgggcggagccacgcccaacggagtcggaagcgttacccccaaagttgagttggccggaacaacggcggcagcagcagcgggtcaagatccctacgagcgtcaaacggtgctgatgtggggcaccacgcactcgagtggggtaccgctaaatagtcatggcggtcgaactggagccggaaaccctgcctcaccacagcgatccactcctcttggcaacggattgggctacgcaagcgccaataataacaacaacgatcttgaacctgccacggctgccaagtggaacggaacaaaggagctgccgggcaagtcgggcagtgccagtacgccggagagctaccagatgcagcatgatgattccggcctttactccgcctcttcgcacacaacctctccgcagcagcaacaacagcagcagctccaacaatcacagcgaggagttggttccaatgttagcgctcccagcagctcactcactagcacgggcacagatcagcaggcggtgcacccatccagttgccatcaacaacagcagcagcagcagcaacaacaccatcacgcccacccgcatccgcactcgcatcatcaccaccatcatcaccatcaccatgagacggcgcatcagcacagcagcgaggtatggacgcccgcctcctacacgcagtactcgcagtacttcacgtaccatcatccgcatccgcacccacaccatccgtcggctggcggcggtggccatgttccggcccagtcgcatcacctgcaccacggccaccgctagaagacgaatagattgcaccagtaatgaagcacccgcactctctgtactcacccacaaccactcaccttcttctgaaaccaatagaaacccacttcagtgcacccaagtgtgctctctcgcctgactactaaccataacgatcctccctagatcattctcaccacccatcatcagcaacagtcgcagcagcagcagcaatcgctcgctggctacccgctgcaccaccagctggtgggagttggatcaggatcaccgccgccgcagccgccagtcgcattgtcccgctcgcccacgaccttgccggcggtcagcagcttgctgaatggatcggcttcagcaggaggagcatcggatattccataccagcaattggccattgtgtccgctcctctggtgatttgcgccgaggaggtgggtggaggcgtcagcagcattggccgcaagtcatccaagcagcaacagtccctgcaacacctgcagcagcaacagtcactgcaacagcagcaacatgcaatttatcagcagcaacatcaccactcgcagcatcatccgcatcatcagctgctctatccggcgaacattacggcgcacaccgcgctggcttatgccccgcccacggccggaggcgcatatgccgatggcagtccgctgctctccttctccgaggtgaccaacacgctactgaaccagtgaatgtgcagggaggaggcggggaagggaaccgttcaacagttttgccaaaatgtggactatgactatcgtatcttccataatctgaaccagcaacgaatggatatagccagcgcacgccattcgtccacccactccttggttgattctcagaaaactgcagcagccgcagcagaaataatttctatttattttactgtgataatttatagatacattgtattgtatgtgaaactaggtttgcccgtcaacaaaaaatccaaaacagccgtatccaatcttccagggaatcgggtatgggtactgcaaccttaatcagcacaaagttacgaagccaatccccgttgatcccaagcaatcatgatgggtagatggcggttagcatcgacatttaatttcagttgtagatacaaccaaagatttctctaacttatacttatcgttttagcataatacgatccatccaattggcttcggtttgtagcgccaaactttagttacattttagttacactcgtgatcggagtgagaaataaatgcctaaacagttgcgattaagagtgcttaagtagcatttaagtgaataacagatgcttgtatccatatttaattgaactttagacgtaacgagtattgcaagataaagtaattttcatgattcctatcgtttagcaagtaactaaattaatccgtaagcggatatacccgcatacatatattgtattgtatgtttaaagttttcttggaatttctagtcgcccgcataaaaacatttacttataaactaaaaaaatacaagagataccaattgatggtagatttatgtataatattttgcaattcggcaggcattactgtaggtagtctgtactaccgactattggtaaccagcaatgtatgagctatccaacattacagcttaagcattgatgattgatcatgtattcaaaaacatatatttaaattgtagataatctgtcagctaataaacgaaatatttaataaaatctcaattataaatttataaaagaatcccgagtgcacgtaaagcgcgcctatccaaaacaatcagagcgaaataaatctagaaaataatcgaatcacttaatggtcttttaattcaacatccttgatccaacgctattcatgtaacaatttttaggtacctttacaacacgtatatttgaatagaccggcgtattacaaacaattaagatctgttgcccattttgcccaagagtatgccacaaatatggcatgtgcaaagtagccccaaaaatatgccacgaaagtctggtaacagaaataacgttggaatcgaagtctataatataacataatattttgattcctgttgcagcatttgtattacataaaagtaactttttgtgttaattttgttatttgcatttaaaacaattgaaatatatataaagcaagaggaaatgcgaagcaggtttttgagtcaattgaaaatgactgcaatcaggaattgatgaaaactttcactaatagtataaagctctcaataattggtaatcggttacgtaaaatacaatataatccgtttagtagataaatgcctgacgtcaccccgatctgtaagcacttggttttccaaggcgcaacaatactaaatcaccattttccatggagcaattgccattcaaccgcaagccattaccatctccaaacttaattggaggctttactgcctttaattgacgacgacaacgtggcacacacacgcgacacacaaaacttatgattgacacctaacaatcatattttcctggcaatatggataatggaaagcattcaacagatgctgggcgcagatttaaagactaaataagaagtacaaaggcataatcatccggcgaagcgggagcgccccaaactcgacttgaataccaagcaatccaatgtgggctgcgttgtttacgctcgatattaaatgaattattctgtagccatactcattcgcattatcccaagaccaaacatatccagtgtgtgttttgggcctcgaaagcaaaccaattaatcactcacaacagttcctatgtgcgatacaattgaaccgttgaaccaaattcacattgaag
